United States Patent Application Publication US 2007/0054278 A1 - sequence listing, part 2

SEQ ID NO: 1186 - DNA, 3188 bp, Homo sapiens
cgcaggcgcggtccatcccgcccgcagagccgcagtgccgggcgccagagcagcggcgccagagcagctgcaccatcccggcgttcgcgtgtgccgccgctttcctcctccatctcttttcctccgcctccgccggcgcgatggcgaagccgctgacggacagcgagaagcggaagcagatcagcgtgcgcggcctggcggggctaggcgacgtggccgaggtgcggaagagcttcaaccggcacttgcacttcacgctggtcaaggaccgcaatgtggccacgccccgcgactacttcttcgcgctggcgcacacggtgcgcgaccacctcgtgggccgctggatccgcacgcagcagcactactacgagcgcgaccccaagcgcatttattatctttccctggaattctacatgggtcgcacgctgcagaacacgatggtgaacctgggccttcagaatgcctgcgatgaagccatctatcagttggggttagacttggaggaactcgaggagatagaagaagatgctggccttgggaatggaggcctggggaggctggcagcgtgtttccttgactcaatggctaccttgggcctggcagcatacggctatggaatccgctatgaatttgggatttttaaccagaagattgtcaatggctggcaggtggaggaggcygatgactggctgcgctacggcaacccctgggagaaagcgcggcctgagtatatgcttcccgtgcacttctacggacgcgtggagcacacccccgacggcgtgaagtggctggacacacaggtggtgctggccatgccctacgacaccccagtgcccggctacaagaacaacaccgtcaacaccatgcggctgtggtccgccaaggctcccaacgacttcaagctgcaggacttcaacgtgggagactacatcgaggcggtcctggaccggaacttggctgagaacatctccagggtcctgtatccaaatgataacttctttgaggggaaggagctgcggctgaagcaggagtacttcgtggtggcckccacgctccaggacatcatccgccgcttcaagtcgtccaagttcggctgccgggaccctgtgagaacctgtttcgagacgttcccagacaaggtggccatccagctgaacgacacccaccccgccctctccatccctgagctcatgcggatcctggtggacgtggagaaggtggactgggacaaggcctgggaaatcacgaagaagacctgtgcrtacaccaaccacactgtgctgcctgaggccttggagcgctggcccgtgtccatgtttgagaagctgctgccgcggcacctggagataatctatgccatcaaccagcggcacctggaccacgtrgccgcgctgtttcccggcgatgtggaccgcctgcgcaggatgtctgtgatcgaggagggggactgcaagcggatcaacatggcccacctgtgtgtgattgggtcccatgctgtcaatggtgtggcgaggatccactcggagatcgtgaaacagtcggtctttaaggatttttatgaactggagccagagaagttccagaataagaccaatggcatcaccccccgccggtggctgctgctgtgcaacccggggctggccrataccatcgtggagaaaattggggaggagttcctgactgacctgagccagctgaagaagctgctgccgctggtcagtgacgaggtgttcatcagggaygtggccaaggtcaaacaggagaacaagctcaagttctcggccttcctggagaaggagtacaaggtgaagatcaacccctcctccatgttcgaygtgcatgtgaagaggatccacgagtacaagcggcagctgctcaactgcctgcacgtcgtcaccctgtacaatcgaatcaagagagacccggccaaggcttttgtgcccaggactgttatgattgggggcaaggcagcgcccggttaccacatggccaagctgatcatcaagttggtcacctccatcggcgacgtcgtcaatcatgacccagttgtgggtgacaggttgaaagtgatcttcctggagaactaccgtgtgtccttggctgagaaagtgatcccggccgctgatctgtcgcagcagatctccactgcaggcaccgaggcctcaggcacaggcaacatgaagttcatgctcaacggggccctcaccatcggcaccatggacggcgccaacgtggagatggccgaggaggccggggccgagaacctcttcatcttcggcctgcgggtggaggatgtcgaggccttggaccggaaagggtacaatgccagggagtactacgaccacctgcccgagctgaagcaggccgtggaccagatcagcagtggctttttttctcccaaggagccagactgcttcaaggacatcgtgaacatgctgatgcaccatgacaggttcaaggtgtttgcagactatgaagcctacatgcagtgccaggcacaggtggaccarctgtaccggaaccccaaggagtggaccaagaaggtcatcaggaacatcgcctgctcgggcaagttctccagtgaccggaccatcacggagtatgcacgggagatctgggggtcgtggccagccctgcagcttcagcacctgccccacccagagtgggagtcaggtggagccacctgctgggctcccccagaactttgcacacatcttgctatgtattagccgatgtctttagtgttgagcctctggattctggggtctgggccagtggccatagtgaagcctgggaatgagtgctggcaacctgcctyccattgcccaaragagagggcagggaacaggctactgtccttcyctgtggaattgccgagaaatctagcaccttgcatgctggatytgggctgcggggaggctctttttctccctggcctccagtgcccaccaggaggatctgcgcacggtgcacagcccaccagagcactacagccttttattgagtgggkcaagtgctgggctgtggtcgtgccctgacagcatcttccccaggcagcggctctgtggaggaggccatactcccctagttggccactggggccaccaccctgaccaccactgtgcccctcattgttactrccttgtgagataaaaactgattaaacctttgtggctgtggttggctgr

SEQ ID NO: 1187 - DNA, 4162 bp, Homo sapiens
cgcaggcgcggtccatcccgcccgcagagccgcagtgccgggcgccagagcagcggcgccagagcagctgcaccatcccggcgttcgcgtgtgccgccgctttcctcctccatctcttttcctccgcctccgccggcgcgatggcgaagccgctgacggacagcgagaagcggaagcagatcagcgtgcgcggcctggcggggctaggcgacgtggccgaggtgcggaagagcttcaaccggcacttgcacttcacgctggtcaaggaccgcaatgtggccacgccccgcgactacttcttcgcgctggcgcacacggtgcgcgaccacctcgtgggccgctggatccgcacgcagcagcactactacgagcgcgaccccaagcgcatttattatctttccctggaattctacatgggtcgcacgctgcagaacacgatggtgaacctgggccttcagaatgcctgcgatgaagccatctatcagttggggttagacttggaggaactcgaggagatagaagaagatgctggccttgggaatggaggcctggggaggctggcagcgtgtttccttgactcaatggctaccttgggcctggcagcatacggctatggaatccgctatgaatttgggatttttaaccagaagattgtcaatggctggcaggtagaggaggcygatgactggctgcgctacggcaacccctgggagaaagcgcggcctgagtatatgcttcccgtgcacttctacggacgcgtggagcacacccccgacggcgtgaagtggctggacacacaggtggtgctggccatgccctacgacaccccagtgcccggctacaagaacaacaccgtcaacaccatgcggctgtggtccgccaaggctcccaacgacttcaagctgcaggacttcaacgtgggagactacatcgaggcggtcctggaccggaacttggctgagaacatctccagggtcctgtatccaaatgataacttctttgaggggaaggagctgcggctgaagcaggagtacttcgtggtggcckccacgctccaggacatcatccgccgcttcaagtcgtccaagttcggctgccgggaccctgtgagaacctgtttcgagacgttcccagacaaggtggccatccagctgaacgacacccaccccgccctctccatccctgagctcatgcggatcctggtggacgtggagaaggtggactgggacaaggcctgggaaatcacgaagaagacctgtgcrtacaccaaccacactgtgctgcctgaggccttggagcgctggcccgtgtccatgtttgagaagctgctgccgcggcacctggagataatctatgccatcaaccagcggcacctggaccacgtrgccgcgctgtttcccggcgatgtggaccgcctgcgcaggatgtctgtgatcgaggagggggactgcaagcggatcaacatggcccacctgtgtgtgattgggtcccatgctgtcaatggtgtggcgaggatccactcggagatcgtgaaacagtcggtctttaaggatttttatgaactggagccagagaagttccagaataagaccaatggcatcaccccccgccggtggctgctgctgtgcaacccggggctggccrataccatcgtggagaaaattggggaggagttcctgactgacctgagccagctgaagaagctgctgccgctggtcagtgacgaggtgttcatcagggaygtggccaaggtcaaacaggagaacaagctcaagttctcggccttcctggagaaggagtacaaggtgaagatcaacccctcctccatgttcgaygtgcatgtgaagaggatccacgagtacaagcggcagctgctcaactgcctgcacgtcgtcaccctgtacaatcgaatcaagagagacccggccaaggcttttgtgcccaggactgttatgattgggggcaaggcagcgcccggttaccacatggccaagctgatcatcaagttggtcacctccatcggcgacgtcgtcaatcatgacccagttgtgggtgacaggttgaaagtgatcttcctggagaactaccgtgtgtccttggctgagaaagtgatcccggccgctgatctgtcgcagcagatctccactgcaggcaccgaggcctcaggcacaggcaacatgaagttcatgctcaacggggccctcaccatcggcaccatggacggcgccaacgtggagatggccgaggaggccggggccgagaacctcttcatcttcggcctgcgggtggaggatgtcgaggccttggaccggaaagggtacaatgccagggagtactacgaccacctgcccgagctgaagcaggccgtggaccagatcagcagtggctttttttctcccaaggagccagactgcttcaaggacatcgtgaacatgctgatgcaccatgacaggttcaaggtgtttgcagactatgaagcctacatgcagtgccaggcacaggtggaccarctgtaccggaaccccaaggagtggaccaagaaggtcatcaggaacatcgcctgctcgggcaagttctccagtgaccggaccatcacggagtatgcacgggagatctggggtgtggagccctccgacctgcagatcccgccccccaacatcccccgggactaggcacaccctgccttggcgggaccagcgggcatttgttttcttgctgactttgcacctccttttttccccaaacactttgccagccrctggtggtccctgcttttctgagtaccatgtttccaggaggggccatgggggtcagggtggttttgagagagcagggtaaggaaggaatgtgctagaagtgctcctagtttcttgtaaaggaagccagagttgacagtacaaagggtcgtggccagccctgcagcttcagcacctgccccacccagagtgggagtcaggtggagccacctgctgggctcccccagaactttgcacacatcttgctatgtattagccgatgtctttagtgttgagcctctggattctggggtctgggccagtggccatagtgaagcctgggaatgagtgttactgcagcatctgggctgccagccacagggaagggccaagccccatgtagccccagtcatcctgcccagccctgcctcctggccatgccgggaggggtcggatcctctaggcatcgccttcacagccccctgccccctgccctctgtcctggctctgcacctggtatatgggtcatggacccagatggggctttccctttgtagccatccaatgggcattgtgtgggtgcttggaacccgggatgactgagggggacactggagtgggtgcttgtgtctgctgtctcagaggccttggtcaggatgaagttggctgacacagcttagcttggttttgcttattcaaaagagaaaataactacacatggaaatgaaactagctgaagccttttcttgttttakcaactgaaaattgtacttggtcacttttgtgcttgaggaggcccattttctgcctggcagggggcaggtctgtgccctcccgctgactcctgctgtgtcctgaggtgcatttcctgttgtacacacaagggccaggctccattctccctccctttccaccagtgccacagcctcgtctggaaaaaggaccaggggtcccggaggaacccatttgtgctctgcttggacagcaggcctggcactgggaggtgggggtgagcccctcacagccttgcccctccccarggctggcaacctgcctyccattgcccaaragagagggcagggaacaggctactgtccttcyctgtggaattgccgagaaatctagcaccttgcatgctggatytgggctgcggggaggctctttttctccctggcctccagtgcccaccaggaggatctgcgcacggtgcacagcccaccagagcactacagccttttattgagtgggkcaagtgctgggctgtggtcgtgccctgacagcatcttccccaggcagcggctctgtggaggaggccatactcccctagttggccactggggccaccaccctgaccaccactgtgcccctcattgttactrccttgtgagataaaaactgattaaacctttgtggctgtggttggctga

SEQ ID NO: 1188 - DNA, 3816 bp, Homo sapiens
cgcaggcgcggtccatcccgcccgcagagccgcagtgccgggcgccagagcagcggcgccagagcagctgcaccatcccggcgttcgcgtgtgccgccgctttcctcctccatctcttttcctccgcctccgccggcgcgatggcgaagccgctgacggacagcgagaagcggaagcagatcagcgtgcgcggcctggcggggctaggcgacgtggccgaggtgcggaagagcttcaaccggcacttgcacttcacgctggtcaaggaccgcaatgtggccacgccccgcgactacttcttcgcgctggcgcacacggtgcgcgaccacctcgtgggccgctggatccgcacgcagcagcactactacgagcgcgaccccaagcgcatttattatctttccctggaattctacatgggtcgcacgctgcagaacacgatggtgaacctgggccttcagaatgcctgcgatgaagccatctatcagttggggttagacttggaggaactcgaggagatagaagaagatgctggccttgggaatggaggcctggggaggctggcagcgtgtttccttgactcaatggctaccttgggcctggcagcatacggctatggaatccgctatgaatttgggatttttaaccagaagattgtcaatggctggcaggtggaggaggcygatgactggctgcgctacggcaacccctgggagaaagcgcggcctgagtatatgcttcccgtgcacttctacggacgcgtggagcacacccccgacggcgtgaagtggctggacacacaggtggtgctggccatgccctacgacaccccagtgcccggctacaagaacaacaccgtcaacaccatgcggctgtggtccgccaaggctcccaacgacttcaagctgcaggacttcaacgtgggagactacatcgaggcggtcctggaccggaacttggctgagaacatctccagggtcctgtatccaaatgataacttctttgaggggaaggagctgcggctgaagcaggagtacttcgtggtggcckccacgctccaggacatcatccgccgcttcaagtcgtccaagttcggctgccgggaccctgtgagaacctgtttcgagacgttcccagacaaggtggccatccagctgaacgacacccaccccgccctctccatccctgagctcatgcggatcctggtggacgtggagaaggtggactgggacaaggcctgggaaatcacgaagaagacctgtgcrtacaccaaccacactgtgctgcctgaggccttggagcgctggcccgtgtccatgtttgagaagctgctgccgcggcacctggagataatctatgccatcaaccagcggcacctggaccacgtrgccgcgctgtttcccggcgatgtggaccgcctgcgcaggatgtctgtgatcgaggagggggactgcaagcggatcaacatggcccacctgtgtgtgattgggtcccatgctgtcaatggtgtggcgaggatccactcggagatcgtgaaacagtcggtctttaaggatttttatgaactggagccagagaagttccagaataagaccaatggcatcaccccccgccggtggctgctgctgtgcaacccggggctggccrataccatcgtggagaaaattggggaggagttcctgactgacctgagccagctgaagaagctgctgccgctggtcagtgacgaggtgttcatcagggaygtggccaaggtcaaacaggagaacaagctcaagttctcggccttcctggagaaggagtacaaggtgaagatcaacccctcctccatgttcgaygtgcatgtgaagaggatccacgagtacaagcggcagctgctcaactgcctgcacgtcgtcaccctgtacaatcgaatcaagagagacccggccaaggcttttgtgcccaggactgttatgattgggggcaaggcagcgcccggttaccacatggccaagctgatcatcaagttggtcacctccatcggcgacgtcgtcaatcatgacccagttgtgggtgacaggttgaaagtgatcttcctggagaactaccgtgtgtccttggctgagaaagtgatcccggccgctgatctgtcgcagcagatctccactgcaggcaccgaggcctcaggcacaggcaacatgaagttcatgctcaacggggccctcaccatcggcaccatggacggcgccaacgtggagatggccgaggaggccggggccgagaacctcttcatcttcggcctgcgggtggaggatgtcgaggccttggaccggaaagggtacaatgccagggagtactacgaccacctgcccgagctgaagcaggccgtggaccagatcagcagtggctttttttctcccaaggagccagactgcttcaaggacatcgtgaacatgctgatgcaccatgacaggttcaaggtgtttgcagactatgaagcctacatgcagtgccaggcacaggtggaccarctgtaccggaaccccaaggagtggaccaagaaggtcatcaggaacatcgcctgctcgggcaagttctccagtgaccggaccatcacggagtatgcacgggagatctggggtgtggagccctccgacctgcagatcccgccccccaacatcccccgggactaggcacaccctgccttggcgggaccagcgggcatttgttttcttgctgactttgcacctccttttttccccaaacactttgccagccrctggtggtccctgcttttctgagtaccatgtttccaggaggggccatgggggtcagggtggttttgagagagcagggtaaggaaggaatgtgctagaagtgctcctagtttcttgtaaaggaagccagagttgacagtacaaagggtcgtggccagccctgcagcttcagcacctgccccacccagagtgggagtcaggtggagccacctgctgggctcccccagaactttgcacacatcttgctatgtattagccgatgtctttagtgttgagcctctggattctggggtctgggccagtggccatagtgaagcctgggaatgagtgttactgcagcatctgggctgccagccacagggaagggccaagccccatgtagccccagtcatcctgcccagccctgcctcctggccatgccgggaggggtcggatcctctaggcatcgccttcacagccccctgccccctgccctctgtcctggctctgcacctggtatatgggtcatggacccagatggggctttccctttgtagccatccaatgggcattgtgtgggtgcttggaacccgggatgactgaggggaacccatttgtgctctgcttggacagcaggcctggcactgggaggtgggggtgagcccctcacagccttgcccctccccarggctggcaacctgcctyccattgcccaaragagagggcagggaacaggctactgtccttcyctgtggaattgccgagaaatctagcaccttgcatgctggatytgggctgcggggaggctctttttctccctggcctccagtgcccaccaggaggatctgcgcacggtgcacagcccaccagagcactacagccttttattgagtgggkcaagtgctgggctgtggtcgtgccctgacagcatcttccccaggcagcggctctgtggaggaggccatactcccctagttggccactggggccaccaccctgaccaccactgtgcccctcattgttactrccttgtgagataaaaactgattaaacctttgtggctgtggttggctgacatggg

SEQ ID NO: 1189 - DNA, 2057 bp, Homo sapiens
gccttcctgtccaggctccattagggctccctggatgtctgggctccgctgaccggtggggggcaagtccagtgttttgggccacagggcgggccaaatagcaggggcctgtagccccagggggccccagccctgctgcgttcattcattcagcccgcttttgcggacccgcccccagtctgcgtcagggacagacccctccgccctggatgagcccggcggggaagcttcgcgtagcagtttctgggaaacaggaatgggctatgtgaatgaaaaaaggtatccgttatgaaacttccagaaaaacgarctacatttttcagcagccgcagcayggtccttggcaaacaaggatgagaaaaatatccaaccacgggagcctgcgggtggcgaaggtggcataccccctggggctgtgtgtgggcgtgttcatctatgttgcctacatcaagtggcaccgggccaccgccacccaggccttyttcagcatcaccagggcagccccgggggcccrgtggggtcagcaggcccacagccccctggggacagctgcagacgggcacgaggtcttctacgggatcatgtttgatgcaggaagcactggcacccgagtacacgtcttccagttcacccggccccccagagaaactcccacgttaacccacgaaaccttcaaagcactgaagccaggtctttctgcctatgctgatgatgttgaaaagagcgctcagggaatccrggaactactggatgttgctaaacaggacattccrttcgacttctggaaggccatttttcattacatcgactccctgaacagacagaagagtccagcctcatagtggccgagccatccctgtccccgtcagcagtgtctgtgtgtctgcataaaccctcctgtcctggacgtgacttcatcctgaggagccacagcacaggccgtgctggcactttctgcacactggctctgggacttgcagaaggcctggtgctgccctggcatcagcctcttccagtcacatctggccagagggctgtctggacctgggccctgctcaatgccacctgtctgcctgggctccaagtgggcaggaccaggacagaaccacaggcacacactgagggggcagtgtggctccctgcctgtcccatccccatgccccgtccgcggggctgtggctgctgctgtgcatgtccctgcgatgggagtcttgtctcccagcctgtcagtttcctccccagggcagagctccccttcctgcragagtctgggaggcggtgcaggctgtcctggctgctctggggaagccgagggacagccataacacccccgggacagtaggtctgggcggcaccactgggaactctggacttgagtgtgtttgcctcttccttgggtatgaatgtgtgagttcacccagaggcctgctctcctcacacattgtgtggtttggggttaatgatggagggagacacctcytcatagacggcaggtgcccacctttcagggagtctcccagcatgggcggatgccgggcatgagctgctgtaaactatttgtggctgtgctgcttgagtgacgtctctgtcgtgtgggtgccaagtgcttgtgtagaaactgtgttytgagcccccttttctggacaccaactgtgtcctgtgaatgtatcgctactgtgagcygttcccgcctagccagggccatgtcttaggtgcagctgtgccacgggtcagctgagccacagtcccagaaccaagctctcggtgtctcgggccaccatccgcccacctcgggctgaccccacctcctccatggacagtgtgagccccgggccgtgcatcctgctcagtgtggcgtcagtgkcggggctgagccccttgagctgcttcagtgaatgtacagtgcccggcacgagctgaacctcatgtgttccactcccaataaaaggttgacaggggcttctccttctctgggattcctctcgttgagcgacagtagcatttgcccacctggcacctgagatccctgtttactaaaccttagaaaagctgccaaa

SEQ ID NO: 1190 - DNA, 2876 bp, Homo sapiens
cccccccgcccagcctgtgacgccacgtgcatggggcggagcccaggccctagggaatcgtggggtcgtatcccgcgggtggaggccggggtggcgccggccggggcgggggagcccaaaagaccggctgccgcctgctccccggaaaagggcactcgtctccgtgggtgtggcggagcgcgcggtgcatggaatgggctatgtgaatgaaaaaaggtatccgttatgaaacttccagaaaaacgarctacatttttcagcagccgcagcayggtccttggcaaacaaggatgagaaaaatatccaaccacgggagcctgcgggtggcgaaggtggcataccccctggggctgtgtgtgggcgtgttcatctatgttgcctacatcaagtggcaccgggccaccgccacccaggccttyttcagcatcaccagggcagccccgggggcccrgtggggtcagcaggcccacagccccctggggacagctgcagacgggcacgaggtcttctacgggatcatgtttgatgcaggaagcactggcacccgagtacacgtcttccagttcacccggccccccagagaaactcccacgttaacccacgaaaccttcaaagcactgaagccaggtctttctgcctatgctgatgatgttgaaaagagcgctcagggaatccrggaactactggatgttgctaaacaggacattccrttcgacttctggaaggccacccctctggtcctcaaggccacagctggcttacgcctgttacctggagaaaaggcccagaagttactgcagaaggtgaaagaagtatttaaagcatcrcctttccttgtaggggatgactgtgtttccatcatgaacggaacagatgaaggcgtttcggcgtggatcaccatcaacttcctgacaggcagcttgaaaactccaggagggagcagcgtgggcatgctggacttgggcggaggatccactcagatcgccttcctgccacgcgtggagggcaccctgcaggcctccccacccggctacctgacggcactgcggatgtttaacaggacctacaagctctattcctacagctacctcgggctcgggctgatgtcggcacgcctggcgatcctgggcggcgtggaggggcagcctgctaaggatggaaaggagttggtcagcccttgcttgtctcccagtttcaaaggagagtgggaacacgcagaagtcacgtacagggtttcagggcagaaagcagcggcaagcctgcacgagctgtgtgctgccagagtgtcagaggtccttcaaaacagagtgcacaggacggaggaagtgaagcatgtggacttctatgctttctcctactattacgaccttgcagctggtgtgggcctcatagatgcrgagaagggaggcagcctggtggtgggggacttcgagatcgcagccaagtacgtgtgtcggaccctggagacacagccgcagagcagccccttctcatgcatggacctcacctacrtcagcctgctactccaggagttcggctttcccaggagcaaagtgctgaagctcactcggaaaattgacaatgttgagaccagctgggctctgggggccatttttcattacatcgactccctgaacagacagaagagtccagcctcatagtggccgagccatccctgtccccgtcagcagtgtctgtgtgtctgcataaaccctcctgtcctggacgtgacttcatcctgaggagccacagcacaggccgtgctggcactttctgcacactggctctgggacttgcagaaggcctggtgctgccctggcatcagcctcttccagtcacatctggccagagggctgtctggacctgggccctgctcaatgccacctgtctgcctgggctccaagtgggcaggaccaggacagaaccacaggcacacactgagggggcagtgtggctccctgcctgtcccatccccatgccccgtccgcggggctgtggctgctgctgtgcatgtccctgcgatgggagtcttgtctcccagcctgtcagtttcctccccagggcagagctccccttcctgcragagtctgggaggcggtgcaggctgtcctggctgctctggggaagccgagggacagccataacacccccgggacagtaggtctgggcggcaccactgggaactctggacttgagtgtgtttgcctcttccttgggtatgaatgtgtgagttcacccagaggcctgctctcctcacacattgtgtggtttggggttaatgatggagggagacacctcytcatagacggcaggtgcccacctttcagggagtctcccagcatgggcggatgccgggcatgagctgctgtaaactatttgtggctgtgctgcttgagtgacgtctctgtcgtgtgggtgccaagtgcttgtgtagaaactgtgttytgagcccccttttctggacaccaactgtgtcctgtgaatgtatcgctactgtgagcygttcccgcctagccagggccatgtcttaggtgcagctgtgccacgggtcagctgagccacagtcccagaaccaagctctcggtgtctcgggccaccatccgcccacctcgggctgaccccacctcctccatggacagtgtgagccccgggccgtgcatcctgctcagtgtggcgtcagtgkcggggctgagccccttgagctgcttcagtgaatgtacagtgcccggcacgagctgaacctcatgtgttccactcccaataaaaggttgacaggggcttctccttctctgggattcctctcgttgagcgacagtagcatttgcccacctggcacctgagatccctgtttactaaaccttagaaaagctgccaaa

SEQ ID NO: 1191 - DNA, 2645 bp, Homo sapiens
cccccccgcccagcctgtgacgccacgtgcatggggcggagcccaggccctagggaatcgtggggtcgtatcccgcgggtggaggccggggtggcgccggccggggcgggggagcccaaaagaccggctgccgcctgctccccggaaaagggcactcgtctccgtgggtgtggcggagcgcgcggtgcatggaatgggctatgtgaatgaaaaaaggtatccgttatgaaacttccagaaaaacgarctacatttttcagccgcagcayggtccttggcaaacaaggatgagaaaaatatccaaccacgggagcctgcgggtggcgaaggtggcataccccctggggctgtgtgtgggcgtgttcatctatgttgcctacatcaagtggcaccgggccaccgccacccaggccttyttcagcatcaccagggcagccccgggggcccrgtggggtcagcaggcccacagccccctggggacagctgcagacgggcacgaggtcttctacgggatcatgtttgatgcaggaagcactggcacccgagtacacgtcttccagttcacccggccccccagagaaactcccacgttaacccacgaaaccttcaaagcactgaagccaggtctttctgcctatgctgatgatgttgaaaagagcgctcagggaatccrggaactactggatgttgctaaacaggacattccrttcgacttctggaaggccacccctctggtcctcaaggccacagctggcttacgcctgttacctggagaaaaggcccagaagttactgcagaaggtgaaagaagtatttaaagcatcrcctttccttgtaggggatgactgtgtttccatcatgaacggaacagatgaaggcgtttcggcgtggatcaccatcaacttcctgacaggcagcttgaaaactccaggagggagcagcgtgggcatgctggacttgggcggaggatccactcagatcgccttcctgccacgcgtggagggcaccctgcaggcctccccacccggctacctgacggcactgcggatgtttaacaggacctacaagctctattcctacagctacctcgggctcgggctgatgtcggcacgcctggcgatcctgggcggcgtggaggggcagcctgctaaggatggaaaggagttggtcagcccttgcttgtctcccagtttcaaaggagagtgggaacacgcagaagtcacgtacagggtttcagggcagaaagcagcggcaagcctgcacgagctgtgtgctgccagagtgtcagaggtccttcaaaacagagtgcacaggacggaggaagtgaagcatgtggacttctatgctttctcctactattacgaccttgcagctggtgtgggcctcatagatgcrgagaagggaggcagcctggtggtgggggacttcgagatcgcagccaagtacgtgtgtcggaccctggagacacagccgcagagcagccccttctcatgcatggacctcacctacrtcagcctgctactccaggagttcggctttcccaggagcaaagtgctgaagctcactcggaaaattgacaatgttgagaccagctgggctctgggggccatttttcattacatcgactccctgaacagacagaagagtccagcctcatagtggccgagccatccctgtccccgtcagcagtgtctgtgtgtctgcataaaccctcctgtcctggacgtgacttcatcctgaggagccacagcacaggccgtgctggcactttctgcacactggctctgggacttgcagaaggcctggtgctgccctggcatcagcctcttccagtcacatctggccagagggctgtctggacctgggccctgctcaatgccacctgtctgcctgggctccaagtgggcaggaccaggacagaaccacaggcacacactgagggggcagtgtggctccctgcctgtcccatccccatgccccgtccgcggggctgtggctgctgctgtgcatgtccctgcgatgggagtcttgtctcccagcctgtcagtttcctccccagggcagagctccccttcctgcragagtctgggaggcggtgcaggctgtcctggctgctctggggaagccgagggacagccataacacccccgggacagtaggtctgggcggcaccactgggaactctggacttgagtgtgtttgcctcttccttgggtatgaatgtgtgagttcacccagaggcctgctctcctcacacattgtgtggtttggggttaatgatggagggagacacctcytcatagacggcaggtgcccacctttcagggagtctcccagcatgggcggatgccgggcatgagctgctgtaaactatttgtggctgtgctgcttgagtgacgtctctgtcgtgtgggtgccaagtgcttgtgtagaaactgtgttytgagcccccttttctggacaccaactgtgtcctgtgaatgtatcgctactgtgagcygttcccgcctagccagggccatgtcttaggtgcagctgtgccacgggtcagctgagccacaccccttgagctgcttcagtgaatgtacagtgcccggcacgagctgaacctcatgtgttccactcccaataaaaggttgacagggg

SEQ ID NO: 1192 - DNA, 4688 bp, Homo sapiens
tccccaaaaggaaaacgaggcaccgagaagttaaggaacttgctcaaggtcacagagtttgaactcaggctacagatgctgcagcaactggagaaagtcctcatcgccccatatcacccaccaccgacccccagcaggacgtgacccccgccaggacggaggccggcagctggggggctggagcatgggacccagaacacggactcaggcttgcgcagcctcctggcttctaggcgggagcctagaaaggcgccagcccctttcgcgtgctgctgagactccaggggtggggttcactctcaggggcgcacaaaggcatgaaaaccttggcttcagcctctgagatgcggaactgaccgacctattgtcttgggacccaccagtgcgcttgggtgcaccagcccccttaacgttggtgccggctccctcccrgctcctccccatcccagagggtcccctcgccccaggccctgagcctgcgtcctggggtcctgggccgcacgtgcctctggcagctcgaagragctgtcggggcttgcaggagagcgtgcaaactgaaaccaaaacaggccgackcgaggaacatccgggtgggaccgcagactcaccggagcgcagcgcctgggccagggcctgggaccctgctccgccccgcgctcccctgcaccccttccccacgctgctcccctcttcctaagcggccccccctctcccgggcagcagaagaaggggtgggacccgggcgggctccgggagggggccctggaggaatggatggtggcsgaagggcggagcaggggcggggcccgcggagactccacggggcgccccgggcgtgaggcacccactctgggagcacagagagctcaggtagcctgcctagatggcggcgcgcaccctgggccgcggcgtcgggaggctgctgggcagcctgcgagggctctcggggcagcccgcgcggccgccgtgcggggtgagcgcgccgcgcagggcggcctcgggaccctcgggcagcgctcccgcagttgcagcagcagcagcacagccaggctcgtatcccgcgctgagtgcacaggcagcccgggagccggccgccttctgggggcctctggcgcgggacactctcgtgtgggacaccccctaccacaccgtctgggactgcgacttcagcactggcaagatcggctggttcctgggaggccagttaaatgtctctgagttgcgttaccgggtgcatagcgccgctgagcaagagccggcggggagccgcgggctacacccgagcgccccggagtcgggactttcccgttcccataccggggtggagggaaaaacaaagcggtggcggttgtcactgcgggctgcggtgcccggggatcagcctggggacaagccctgcccactcaactgcttggaccagcatgttcggaagtcccccgagagcgttgctttgatctgggagcgcgatgagcctggaacggaagtgaggatcacctacaggtactgtgccctcgaatgttcaagggaactactggagaccacgtgccgcctggccaacacgctgaagaggcatggagtccaccgtggggaccgtgttgccatctacatgcccgtgtccccattggctgtggcagcaatgctggcctgtgccaggatcggagctgtccacacagtcatctttgctggcttcagtgcrgagtccttggctgggaggatcaatgatgccaagtgcaaggtggttatcaccttcaaccaaggactccggggtgggcgcgtggtggagctgaagaaaatagtggatgaggctgtgaagcactgccccaccgtgcagcatgtcctggtggctcacaggacagacaacaaggtccacatgggggatctggacgtcccgctggagcaggaaatggccaaggaggaccctgtktgcgccccagagagcatgggcagtgaggacatgctcttcatgctgtacacctcagggagcaccggaatgcccaagggcatcgtccatacccaggcaggctacctgctctatgccgccctgactcacaagcttgtgtttgaccaccagccaggtgacatctttggctgtgtggccgacatcggttggattacaggacacagctacgtggtgtatgggcctctctgcaatggtgccaccagcgtcctttttgagagcaccccagtttatcccaatgctggtcggtactgggagacagtagagaggttgaagatcaatcagttctatggygccccaacggctgtccggctgttgctgaaatacggtgatgcctgggtgaagaagtatgatcgctcctccytgcggaccctggggtcagtgggagagcccatcaactgtgaggcctgggagtggcttcacagggtggtgggggacagcaggtgcacgctggtggacacctggtggcagacagaaacaggtggcatctgcatcgcaccacggccctcggaagaaggggcggaaatcctccctgccatggcgatgaggcccttctttggcatcgtccccgtcctcatggatgagaagggcagygtcrtggagggcagcaaygtctccggggccctgtgcatctcccaggcctggcygggcatggccaggaccatctatggcgaccaccagcgatttgtggacgcctacttcaaggcctacccaggctattacttcactggagacggggcttaccgaactgagggcggctattaccagatcacagggcggatggatgatgtcatcaacatcagtggccaccggctggggaccgcagagattgaggacgccatcsccgaccaccctgcagtaccagaaagtgctgtcattggctacccccacracatcaaaggagaagctgcctttgccttcattgtggtgaaagatagtgcgggtgactcagatgtggtggtgcaggagctcaagtccatggtggccaccaagatcgccaaatatgctgtgcctgatgagatcctggtggtgaaacgtcttccaaaaaccaggtctgggaaggtcatgcggcggctcctgaggaagatcatcactagtgaggcccaggagctgggagacactaccaccttggaggaccccagcatcatcgcagagatcctgagtgtctaccagaagtgcaaggacaagcaggctgctgctaagtgagctggcaccttgtggggctcttgggatgggcgggcacccaagccctggcttgtccttcccagaaggtacccctgaggttggcgtcttcctacgtcccagaagcagcccccaccccacacatgacccacaccgccctcacgtgaagctgggctgagagccctttctcccatccattggaggtcccaggagtgtcacccatggagaggctatgcgacatggctagggctggttctgccatctgagtttggtttcctggaatgaaaaggcattgccatctccattcctctgccctcttgagccagcacaggaaggtgaggccctgggatagcgcgcctgctcagataacacagagctagttagctagtagcaaccgtgttttctccagatctgtctagatacaaaggtcagaaatcttatttttatacttttatattgtggaagaacagcatgcaacactcacatgtagtgtgtggatttacttgaacatgttctttttaacatgtagttatgaaaatctccttttttgcctctactggtgaggaaacatgaggatcagaggccacatttttaattattgttagtgtatttggaagtctgaattggagatgtttgtacctctgtctaaacagttcccttgagaacttccaagcctccggcatcttttcctggtgagtgtttctcctgtgcttggttgtgtataatggagctaactcctaagcggtggggtgaatgtggccgccttagttctgaagctactccagttatgttctgtttcttcaagctgtgatccagaaagatttttgtgcccccagatgcctcttgataggagaggcaacatactccaaatagttgggttcttcagggaagctattagaaactcaggtgacttgttagagcactaacttggtcagagccaaatcctggcaaacgctgcctgaccttcactctgtggttggggcagtgagaaccactgaggtccaatgatgagacttggaggtctggatccagtctctctttgttttaatgtgacttaggtgctgtcaacattagcaagataatggaaatcacgacgccagtgggtgcttacctccctgctaggcatgcaggggctggcggttggcaggggaaggaggcccagtgagccgggtcccttaggggagggagagtttgtcctctttgccccacagtctacccttcagggccttgtggcagtgccagtgttcggggggtgtctgggccactgagtacccactcggtcgtggttgtgctggcctcttgggtgagtgaacctgtgaagcccaggaggtggtgttggctgcagggtacacaaatactgagtggtggtcttttgttacaggcttagcaacaaagctgtgccctgggcatggggggctgtagtgtagctacagttgtgcgtttgtgaaatggcttarctttccatgttgctgagaggaacctggacatggtcccgggcatctgaatgatctgtaggggagggagttcaaataaagctttattttgttca

SEQ ID NO: 1193 - DNA, 3540 bp, Homo sapiens
tgcaccagcccccttaacgttggtgccggctccctcccrgctcctccccatcccagagggtcccctcgccccaggccctgagcctgcgtcctggggtcctgggccgcacgtgcctctggcagctcgaagragctgtcggggcttgcaggagagcgtgcaaactgaaaccaaaacaggccgackcgaggaacatccgggtgggaccgcagactcaccggagcgcagcgcctgggccagggcctgggaccctgctccgccccgcgctcccctgcaccccttccccacgctgctcccctcttcctaagcggccccccctctcccgggcagcagaagaaggggtgggacccgggcgggctccgggagggggccctggaggaatggatggtggcsgaagggcggagcaggggcggggcccgcggagactccacggggcgccccgggcgtgaggcacccactctgggagcacagagagctcaggtagcctgcctagatggcggcgcgcaccctgggccgcggcgtcgggaggctgctgggcagcctgcgagggctctcggggcagcccgcgcggccgccgtgcggggtgagcgcgccgcgcagggcggcctcgggaccctcgggcagcgctcccgcagttgcagcagcagcagcacagccaggctcgtatcccgcgctgagtgcacaggcagcccgggagccggccgccttctgggggcctctggcgcgggacactctcgtgtgggacaccccctaccacaccgtctgggactgcgacttcagcactggcaagatcggctggttcctgggaggccagttaaatgtctctggtgagtgggcttcgggagacccaggacgcccccaactcttgggtcccgaggggactcggagcctctcgccagcggcagccgtccccgggcagcgcggatcgcagccctgcaggggcccctcctccggtattccgtccgccccgcccgctctaagcagtggctccacgtcacccmgtccctcatcccatcgggccccagatccacgtgcccagctcgggccggcgcccgcggggacccggcggccgcttgggacgccccgctgctggccttgctcggcgcggctcctcgctcggcggactccagagttgcgttaccgggtgcatagcgccgctgagcaagagccggcggggagccgcgggctacacccgagcgccccggagtcgggactttcccgttcccataccggggtggagggaaaaacaaagcggtggcggttgtcactgcgggctgcggtgcccggggatcagcctggggacaagccctgcccactcaactgcttggaccagcatgttcggaagtcccccgagagcgttgctttgatctgggagcgcgatgagcctggaacggaagtgaggatcacctacaggtactgtgccctcgaatgttcaagggaactactggagaccacgtgccgcctggccaacacgctgaagaggcatggagtccaccgtggggaccgtgttgccatctacatgcccgtgtccccattggctgtggcagcaatgctggcctgtgccaggatcggagctgtccacacagtcatctttgctggcttcagtgcrgagtccttggctgggaggatcaatgatgccaagtgcaaggtggttatcaccttcaaccaaggactccggggtgggcgcgtggtggagctgaagaaaatagtggatgaggctgtgaagcactgccccaccgtgcagcatgtcctggtggctcacaggacagacaacaaggtccacatgggggatctggacgtcccgctggagcaggaaatggccaaggaggaccctgtktgcgccccagagagcatgggcagtgaggacatgctcttcatgctgtacacctcagggagcaccggaatgcccaagggcatcgtccatacccaggcaggctacctgctctatgccgccctgactcacaagcttgtgtttgaccaccagccaggtgacatctttggctgtgtggccgacatcggttggattacaggacacagctacgtggtgtatgggcctctctgcaatggtgccaccagcgtcctttttgagagcaccccagtttatcccaatgctggtcggtactgggagacagtagagaggttgaagatcaatcagttctatggygccccaacggctgtccggctgttgctgaaatacggtgatgcctgggtgaagaagtatgatcgctcctccytgcggaccctggggtcagtgggagagcccatcaactgtgaggcctgggagtggcttcacagggtggtgggggacagcaggtgcacgctggtggacacctggtggcagacagaaacaggtggcatctgcatcgcaccacggccctcggaagaaggggcggaaatcctccctgccatggcgatgaggcccttctttggcatcgtccccgtcctcatggatgagaagggcagygtcrtggagggcagcaaygtctccggggccctgtgcatctcccaggcctggcygggcatggccaggaccatctatggcgaccaccagcgatttgtggacgcctacttcaaggcctacccaggctattacttcactggagacggggcttaccgaactgagggcggctattaccagatcacagggcggatggatgatgtcatcaacatcagtggccaccggctggggaccgcagagattgaggacgccatcsccgaccaccctgcagtaccagaaagtgctgtcattggctacccccacracatcaaaggagaagctgcctttgccttcattgtggtgaaagatagtgcgggtgactcagatgtggtggtgcaggagctcaagtccatggtggccaccaagatcgccaaatatgctgtgcctgatgagatcctggtggtgaaacgtcttccaaaaaccaggtctgggaaggtcatgcggcggctcctgaggaagatcatcactagtgaggcccaggagctgggagacactaccaccttggaggaccccagcatcatcgcagagatcctgagtgtctaccagaagtgcaaggacaagcaggctgctgctaagtgagctggcaccttgtggggctcttgggatgggcgggcacccaagccctggcttgtccttcccagaaggtacccctgaggttggcgtcttcctacgtcccagaagcagcccccaccccacacatgacccacacctctacccttcagggccttgtggcagtgccagtgttcggggggtgtctgggccactgagtacccactcggtcgtggttgtgctggcctcttgggtgagtgaacctgtgaagcccaggaggtggtgttggctgcagggtacacaaatactgagtggtggtcttttgttacaggcttagcaacaaagctgtgccctgggcatggggggctgtagtgtagctacagttgtgcgtttgtgaaatggcttarctttccatgttgctgagaggaacctggacatggtcccgggcatctgaatgatctgtaggggagggagttcaaataaagctttattttgtt

SEQ ID NO: 1194 - DNA, 3419 bp, Homo sapiens
ccccaaaaggaaaacgaggcaccgagaagttaaggaacttgctcaaggtcacagagtttgaactcaggctacagatgctgcagcaactggagaaagtcctcatcgccccatatcacccaccaccgacccccagcaggacgtgacccccgccaggacggaggccggcagctggggggctggagcatgggacccagaacacggactcaggcttgcgcagcctcctggcttctaggcgggagcctagaaaggcgccagcccctttcgcgtgctgctgagactccaggggtggggttcactctcaggggcgcacaaaggcatgaaaaccttggcttcagcctctgagatgcggaactgaccgacctattgtcttgggacccaccagtgcgcttgggtgcaccagcccccttaacgttggtgccggctccctcccrgctcctccccatcccagagggtcccctcgccccaggccctgagcctgcgtcctggggtcctgggccgcacgtgcctctggcagctcgaagragctgtcggggcttgcaggagagcgtgcaaactgaaaccaaaacaggccgackcgaggaacatccgggtgggaccgcagactcaccggagcgcagcgcctgggccagggcctgggaccctgctccgccccgcgctcccctgcaccccttccccacgctgctcccctcttcctaagcggccccccctctcccgggcagcagaagaaggggtgggacccgggcgggctccgggagggggccctggaggaatggatggtggcsgaagggcggagcaggggcggggcccgcggagactccacggggcgccccgggcgtgaggcacccactctgggagcacagagagctcaggtagcctgcctagatggcggcgcgcaccctgggccgcggcgtcgggaggctgctgggcagcctgcgagggctctcggggcagcccgcgcggccgccgtgcggggtgagcgcgccgcgcagggcggcctcgggaccctcgggcagcgctcccgcagttgcagcagcagcagcacagccaggctcgtatcccgcgctgagtgcacaggcagcccgggagccggccgccttctgggggcctctggcgcgggacactctcgtgtgggacaccccctaccacaccgtctgggactgcgacttcagcactggcaagatcggctggttcctgggaggccagttaaatgtctctgtcaactgcttggaccagcatgttcggaagtcccccgagagcgttgctttgatctgggagcgcgatgagcctggaacggaagtgaggatcacctacagggaactactggagaccacgtgccgcctggccaacacgctgaagaggcatggagtccaccgtggggaccgtgttgccatctacatgcccgtgtccccattggctgtggcagcaatgctggcctgtgccaggatcggagctgtccacacagtcatctttgctggcttcagtgcrgagtccttggctgggaggatcaatgatgccaagtgcaaggtggttatcaccttcaaccaaggactccggggtgggcgcgtggtggagctgaagaaaatagtggatgaggctgtgaagcactgccccaccgtgcagcatgtcctggtggctcacaggacagacaacaaggtccacatgggggatctggacgtcccgctggagcaggaaatggccaaggaggaccctgtktgcgccccagagagcatgggcagtgaggacatgctcttcatgctgtacacctcagggagcaccggaatgcccaagggcatcgtccatacccaggcaggctacctgctctatgccgccctgactcacaagcttgtgtttgaccaccagccaggtgacatctttggctgtgtggccgacatcggttggattacaggacacagctacgtggtgtatgggcctctctgcaatggtgccaccagcgtcctttttgagagcaccccagtttatcccaatgctggtcggtactgggagacagtagagaggttgaagatcaatcagttctatggygccccaacggctgtccggctgttgctgaaatacggtgatgcctgggtgaagaagtatgatcgctcctccytgcggaccctggggtcagtgggagagcccatcaactgtgaggcctgggagtggcttcacagggtggtgggggacagcaggtgcacgctggtggacacctggtggcagacagaaacaggtggcatctgcatcgcaccacggccctcggaagaaggggcggaaatcctccctgccatggcgatgaggcccttctttggcatcgtccccgtcctcatggatgagaagggcagygtcrtggagggcagcaaygtctccggggccctgtgcatctcccaggcctggcygggcatggccaggaccatctatggcgaccaccagcgatttgtggacgcctacttcaaggcctacccaggctattacttcactggagacggggcttaccgaactgagggcggctattaccagatcacagggcggatggatgatgtcatcaacatcagtggccaccggctggggaccgcagagattgaggacgccatcsccgaccaccctgcagtaccagaaagtgctgtcattggctacccccacracatcaaaggagaagctgcctttgccttcattgtggtgaaagatagtgcgggtgactcagatgtggtggtgcaggagctcaagtccatggtggccaccaagatcgccaaatatgctgtgcctgatgagatcctggtggtgaaacgtcttccaaaaaccaggtctgggaaggtcatgcggcggctcctgaggaagatcatcactagtgaggcccaggagctgggagacactaccaccttggaggaccccagcatcatcgcagagatcctgagtgtctaccagaagtgcaaggacaagcaggctgctgctaagtgagctggcaccttgtggggctcttgggatgggcgggcacccaagccctggcttgtccttcccagaaggtacccctgaggttggcgtcttcctacgtcccagaagcagcccccaccccacacatgacccacacctctacccttcagggccttgtggcagtgccagtgttcggggggtgtctgggccactgagtacccactcggtcgtggttgtgctggcctcttgggtgagtgaacctgtgaagcccaggaggtggtgttggctgcagggtacacaaatactgagtggtggtcttttgttacaggcttagcaacaaagctgtgccctgggcatggggggctgtagtgtagctacagttgtgcgtttgtgaaatggcttarctttccatgttgctgagaggaacctggacatggtcccgggcatctgaatgatctgtaggggagggagttcaaataaagctttattttgtt

SEQ ID NO: 1195 - DNA, 1008 bp, Homo sapiens
gggaggagctggtctcgcgaggccgcgccccggttcgcgcgggcgtcgtgcacgcggttgtagctgcccggcggcggcagaagcggcgctcgcgccaagggacgtgtttctgcgctcgcgtggtcatgkaggcgctgccgctgctagccgcgacaactccggaccacggccgccaccgaaggctgcttctgctgccgctactgctgttcctgctgccggctggagctgtgcagggctgggagacagaggagaggccccggactcgcgaagaggagtgccacttctacgcgggtggacaagtgtacccgggagaggcatcccgggtatcggtcgccgaccactccctgcacctaagcaaagcgaagatttccaagccagcgccctactgggaaggaacagctgtgatcgatggagaatttaaggagctgaagttaactgattatcgtgggaaatacttggttttcttcttctacccacttgatttcacatttgtgtgtccaactgaaattatcgcttttggcgacagacttgaagaattcagatctataaatactgaagtggtagcatgctctgttgattcacagtttacccatttggcctggattaatacccctcgaagacaaggaggacttgggccaataaggattccacttctttcagatttgacccatcagatctcaaaggactatggtgtatacctagaggactcaggccacactcttagaggtctcttcattattgatgacaaaggaatcctaagacaaattactctgaatgatcttcctgtgggtagatcagtggatgagacactacgtttggttcaagcattccagtacactgacaaacacggagaagtctgccctgctggctggaaacctggtagtgaaacaataatcccagatccagctggaaagctgaagtatttcgataaactgaattgagaaatacttcttcargttatgatgcttgaaagttctcaataaagttcacggtttcattaccacattg

SEQ ID NO: 1196 - DNA, 2835 bp, Homo sapiens
gcgcaggcaccgctcgacccgggcgcagcgcgcaggcggtggcgaagagacgccgagcgggccgagtgcggccgagcaaagccggagccggagcggggccgcaggagacgggccgggtccggacgggccgagatgccctataaactgaaaaaggagaaggagccccccaaggttgccaaatgcacagccaagcctagcagctcgggcaaggatggtggaggcgagaacactgaggaggcccagccgcagccccagccccagccccagccccaagcccagtctcagccaccgtcatccaacaagcgtcccagcaatagcacgccgccccccacgcagctcagcaaaatcaagtactcaggggggccccagattgagcgggaggagctgtttatccagaagctacgccagtgctgtgtcctctttgacttcgtgtcagacccactcagtgacctcaaattcaaggaggtgaagcgggcaggactcaacgagatggtggagtacatcacccatagccgtgatgttgtcactgaggccatttaccctgaggctgtcaccatgttttcagtgaacctcttccggacgctgccaccttcatcgaatcccacaggggctgagtttgacccagaggaagatgagcccaccctggaagctgcttggccacatctccagctcgtgtatgagttcttcttacgtttccttgagtctcctgatttccagccaaacatagccaagaagtacatcgaccagaagtttgtacttgctctcctagacctatttgacagtgaggatcctcgagagcgggacttcctcaagaccattttgcatcgcatctatggcaagtttttggggctccgggcttatatccgtaggcagatcaaccacatcttctacaggttcatctacgagacggagcatcacaacgggattgctgagctcctggagatcctgggcagcatcatcaatggctttgccctgccccttaaagaagagcacaagatgttcctcatccgtgtcctacttccccttcacaaggtcaagtccctgagtgtctaccaccctcagctggcatactgtgtggtacaattcctggagaaggagagcagtctgactgagccggtaattgtgggacttctcaagttttggcccaagacccacagccccaaggaggtgatgttcttgaatgagctggaggagattctggacgtcattgaaccttctgagttcagcaaagtgatggaacccctcttccgccagctggccaagtgtgtctctagcccccatttccaggtggcagagcgtgctctctattactggaacaatgagtacatcatgagcctgataagtgacaatgctgcccgagtcctccccatcatgttccctgcactctacaggaactccaagagccactggaacaagacaatccatggactgatctataatgcccygaagttgtttatggaaatgaatcagaagctgtttgatgactgcacacaacaatacaaggcagagaagcagaagggccggttccgaatgaaggaaagggaagagatgtggcaaaaaatcgaggagctggcccggcttaatccccagtatcccatgttccgagcccctccaccactgccccctgtgtactcgatggagacagagacccccacagctgaggacatccagcttctgaagaggactgtggagactgaggctgttcagatgctaaaagacatcaagaaggagaaagtgctgctgcggaggaagtcggagctgccccaggacgtgtacaccatcaaggcactggaggcgcacaagcgggcggaagagttcctaactgccagccaggaggctctctgacccctcacgttcctaccacagggccacagcccacacagccctgggacactgccctggccctccatactctgctccctactggctgtcttgggggaaggcagcgcctctctagctactcaagggagggggatgtgggcacttgaagcagggacacccacagaatggtccctcttctccccaaaagtgctcagacaacctggggatgcctgtcccctacctgctcctcacccacagctacctgaggctgctctgagaagtacacacaggaatacatacgctcctctattcttcccttcatcctcatttgaacgccaggtatctcccctcctctctctcccctgcagaggcatgtagggaacagcaggagattattctcaccaaagttatgtcaagccccattggtcccagagtagctgaagggaagccaacccccctgcagcacaaataggccccccagtcccagccgtgtgctggcagatagggttgtattatttcttcttaccccatgcctgaccaagggaggtcaaaaggagaaaagtataggctgtggacaataactgatgaatatagggcccagatggaccaagtggggccggggagggatgaataaacaccctaccccgtgccctgtctttggtgagcagcagccctggggtcacagacatggaagggaccaccctggggctgactgcttttctgtgctgttggttcccaamactagaaagaaggaagcagggagcggtgccccaagcatggctcctgccaamacctatttatttccttgtttgtgctatgctgggcaggccttctcttgtcccttataggtaccttggaggggccaggggctgaggaaggccggacycaggttccaggggcgcaggcagtgckgcttttggctgtgtacatagggtgctttattctccmcagagtgatacatgctaaggtgggttgggcttggaccgatgtccccatatgtacagaactgaataa

SEQ ID NO: 1197 - DNA, 2765 bp, Homo sapiens
gcgcaggcaccgctcgacccgggcgcagcgcgcaggcggtggcgaagagacgccgagcgggccgagtgcggccgagcaaagccggagccggagcggggccgcaggagacgggccgggtccggacgggccgagatgccctataaactgaaaaaggagaaggagctgtttatccagaagctacgccagtgctgtgtcctctttgacttcgtgtcagacccactcagtgacctcaaattcaaggaggtgaagcgggcaggactcaacgagatggtggagtacatcacccatagccgtgatgttgtcactgaggccatttaccctgaggctgtcaccatgttttcagtgaacctcttccggacgctgccaccttcatcgaatcccacaggggctgagtttgacccagaggaagatgagcccaccctggaagctgcttggccacatctccagctcgtgtatgagttcttcttacgtttccttgagtctcctgatttccagccaaacatagccaagaagtacatcgaccagaagtttgtacttgctctcctagacctatttgacagtgaggatcctcgagagcgggacttcctcaagaccattttgcatcgcatctatggcaagtttttggggctccgggcttatatccgtaggcagatcaaccacatcttctacaggttcatctacgagacggagcatcacaacgggattgctgagctcctggagatcctgggcagcatcatcaatggctttgccctgccccttaaagaagagcacaagatgttcctcatccgtgtcctacttccccttcacaaggtcaagtccctgagtgtctaccaccctcagctggcatactgtgtggtacaattcctggagaaggagagcagtctgactgagccggtaattgtgggacttctcaagttttggcccaagacccacagccccaaggaggtgatgttcttgaatgagctggaggagattctggacgtcattgaaccttctgagttcagcaaagtgatggaacccctcttccgccagctggccaagtgtgtctctagcccccatttccaggtggcagagcgtgctctctattactggaacaatgagtacatcatgagcctgataagtgacaatgctgcccgagtcctccccatcatgttccctgcactctacaggaactccaagagccactggaacaagacaatccatggactgatctataatgcccygaagttgtttatggaaatgaatcagaagctgtttgatgactgcacacaacaatacaaggcagagaagcagaagggccggttccgaatgaaggaaagggaagagatgtggcaaaaaatcgaggagctggcccggcttaatccccagtatcccatgttccgagcccctccaccactgccccctgtgtactcgatggagacagagacccccacagctgaggacatccagcttctgaagaggactgtggagactgaggctgttcagatgctaaaagacatcaagaaggagaaagtgctgctgcggaggaagtcggagctgccccaggacgtgtacaccatcaaggcactggaggcgcacaagcgggcggaagagttcctaactgccagccaggaggctctctgacccctcacgttcctaccacagggccacagcccacacagccctgggacactgccctggccctccatactctgctccctactggctgtcttgggggaaggcagcgcctctctagctactcaagggagggggatgtgggcacttgaagcagggacacccacagaatggtccctcttctccccaaaaggtgttcatgcctccctgtggctagtacaggctgagcactaagatgcttagtgctcagacaacctggggatgcctgtcccctacctgctcctcacccacagctacctgaggctgctctgagaagtacacacaggaatacatacgctcctctattcttcccttcatcctcatttgaacgccaggtatctcccctcctctctctcccctgcagaggcatgtagggaacagcaggagattattctcaccaaagttatgtcaagccccattggtcccagagtagctgaagggaagccaacccccctgcagcacaaataggccccccagtcccagccgtgtgctggcagatagggttgtattatttcttcttaccccatgcctgaccaagggaggtcaaaaggagaaaagtataggctgtggacaataactgatgaatatagggcccagatggaccaagtggggccggggagggatgaataaacaccctaccccgtgccctgtctttggtgagcagcagccctggggtcacagacatggaagggaccaccctggggctgactgcttttctgtgctgttggttcccaamactagaaagaaggaagcagggagcggtgccccaagcatggctcctgccaamacctatttatttccttgtttgtgctatgctgggcaggccttctcttgtcccttataggtaccttggaggggccaggggctgaggaaggccggacycaggttccaggggcgcaggcagtgckgcttttggctgtgtacatagggtgctttattctccmcagagtgatacatgctaaggtgggttgggcttggaccgatgtccccatatgtacagaactgaataaagtgggtctctgagaagtctgatgtgccttgatgtggaaagggagacggggaagatggaaatggacattacaaccagggatgtgttcagtcctgtgctggtt

SEQ ID NO: 1198 - DNA, 2931 bp, Homo sapiens
gcgcaggcaccgctcgacccgggcgcagcgcgcaggcggtggcgaagagacgccgagcgggccgagtgcggccgagcaaagccggagccggagcggggccgcaggagacgggccgggtccggacgggccgagatgccctataaactgaaaaaggagaaggagccccccaaggttgccaaatgcacagccaagcctagcagctcgggcaaggatggtggaggcgagaacactgaggaggcccagccgcagccccagccccagccccagccccaagcccagtctcagccaccgtcatccaacaagcgtcccagcaatagcacgccgccccccacgcagctcagcaaaatcaagtactcaggggggccccagattgtcaagaaggagcgacggcaaagctcctcccgcttcaacctcagcaagaatcgggagctgcagaagcttcctgccctgaaagattcgccaacccaggagcgggaggagctgtttatccagaagctacgccagtgctgtgtcctctttgacttcgtgtcagacccactcagtgacctcaaattcaaggaggtgaagcgggcaggactcaacgagatggtggagtacatcacccatagccgtgatgttgtcactgaggccatttaccctgaggctgtcaccatgttttcagtgaacctcttccggacgctgccaccttcatcgaatcccacaggggctgagtttgacccagaggaagatgagcccaccctggaagctgcttggccacatctccagctcgtgtatgagttcttcttacgtttccttgagtctcctgatttccagccaaacatagccaagaagtacatcgaccagaagtttgtacttgctctcctagacctatttgacagtgaggatcctcgagagcgggacttcctcaagaccattttgcatcgcatctatggcaagtttttggggctccgggcttatatccgtaggcagatcaaccacatcttctacaggttcatctacgagacggagcatcacaacgggattgctgagctcctggagatcctgggcagcatcatcaatggctttgccctgccccttaaagaagagcacaagatgttcctcatccgtgtcctacttccccttcacaaggtcaagtccctgagtgtctaccaccctcagctggcatactgtgtggtacaattcctggagaaggagagcagtctgactgagccggtaattgtgggacttctcaagttttggcccaagacccacagccccaaggaggtgatgttcttgaatgagctggaggagattctggacgtcattgaaccttctgagttcagcaaagtgatggaacccctcttccgccagctggccaagtgtgtctctagcccccatttccaggtggcagagcgtgctctctattactggaacaatgagtacatcatgagcctgataagtgacaatgctgcccgagtcctccccatcatgttccctgcactctacaggaactccaagagccactggaacaagacaatccatggactgatctataatgcccygaagttgtttatggaaatgaatcagaagctgtttgatgactgcacacaacaatacaaggcagagaagcagaagggccggttccgaatgaaggaaagggaagagatgtggcaaaaaatcgaggagctggcccggcttaatccccagtatcccatgttccgagcccctccaccactgccccctgtgtactcgatggagacagagacccccacagctgaggacatccagcttctgaagaggactgtggagactgaggctgttcagatgctaaaagacatcaagaaggagaaagtgctgctgcggaggaagtcggagctgccccaggacgtgtacaccatcaaggcactggaggcgcacaagcgggcggaagagttcctaactgccagccaggaggctctctgacccctcacgttcctaccacagggccacagcccacacagccctgggacactgccctggccctccatactctgctccctactggctgtcttgggggaaggcagcgcctctctagctactcaagggagggggatgtgggcacttgaagcagggacacccacagaatggtccctcttctccccaaaagtgctcagacaacctggggatgcctgtcccctacctgctcctcacccacagctacctgaggctgctctgagaagtacacacaggaatacatacgctcctctattcttcccttcatcctcatttgaacgccaggtatctcccctcctctctctcccctgcagaggcatgtagggaacagcaggagattattctcaccaaagttatgtcaagccccattggtcccagagtagctgaagggaagccaacccccctgcagcacaaataggccccccagtcccagccgtgtgctggcagatagggttgtattatttcttcttaccccatgcctgaccaagggaggtcaaaaggagaaaagtataggctgtggacaataactgatgaatatagggcccagatggaccaagtggggccggggagggatgaataaacaccctaccccgtgccctgtctttggtgagcagcagccctggggtcacagacatggaagggaccaccctggggctgactgcttttctgtgctgttggttcccaamactagaaagaaggaagcagggagcggtgccccaagcatggctcctgccaamacctatttatttccttgtttgtgctatgctgggcaggccttctcttgtcccttataggtaccttggaggggccaggggctgaggaaggccggacycaggttccaggggcgcaggcagtgckgcttttggctgtgtacatagggtgctttattctccmcagagtgatacatgctaaggtgggttgggcttggaccgatgtccccatatgtacagaactgaataa

SEQ ID NO: 1199 - DNA, 3083 bp, Homo sapiens
gcgcaggcaccgctcgacccgggcgcagcgcgcaggcggtggcgaagagacgccgagcgggccgagtgcggccgagcaaagccggagccggagcggggccgcaggagacgggccgggtccggacgggccgagatgccctataaactgaaaaaggagaaggagccccccaaggttgccaaatgcacagccaagcctagcagctcgggcaaggatggtggaggcgagaacactgaggaggcccagccgcagccccagccccagccccagccccaagcccagtctcagccaccgtcatccaacaagcgtcccagcaatagcacgccgccccccacgcagctcagcaaaatcaagtactcaggggggccccagattgtcaagaaggagcgacggcaaagctcctcccgcttcaacctcagcaagaatcgggagctgcagaagcttcctgccctgaaagattcgccaacccaggagcgggaggagctgtttatccagaagctacgccagtgctgtgtcctctttgacttcgtgtcagacccactcagtgacctcaaattcaaggaggtgaagcgggcaggactcaacgagatggtggagtacatcacccatagccgtgatgttgtcactgaggccatttaccctgaggctgtcaccatgttttcagtgaacctcttccggacgctgccaccttcatcgaatcccacaggggctgagtttgacccagaggaagatgagcccaccctggaagctgcttggccacatctccagctcgtgtatgagttcttcttacgtttccttgagtctcctgatttccagccaaacatagccaagaagtacatcgaccagaagtttgtacttgctctcctagacctatttgacagtgaggatcctcgagagcgggacttcctcaagaccattttgcatcgcatctatggcaagtttttggggctccgggcttatatccgtaggcagatcaaccacatcttctacaggttcatctacgagacggagcatcacaacgggattgctgagctcctggagatcctgggcagcatcatcaatggctttgccctgccccttaaagaagagcacaagatgttcctcatccgtgtcctacttccccttcacaaggtcaagtccctgagtgtctaccaccctcagctggcatactgtgtggtacaattcctggagaaggagagcagtctgactgagccggtaattgtgggacttctcaagttttggcccaagacccacagccccaaggaggtgatgttcttgaatgagctggaggagattctggacgtcattgaaccttctgagttcagcaaagtgatggaacccctcttccgccagctggccaagtgtgtctctagcccccatttccaggtggcagagcgtgctctctattactggaacaatgagtacatcatgagcctgataagtgacaatgctgcccgagtcctccccatcatgttccctgcactctacaggaactccaagagccactggaacaagacaatccatggactgatctataatgcccygaagttgtttatggaaatgaatcagaagctgtttgatgactgcacacaacaatacaaggcagagaagcagaagggccggttccgaatgaaggaaagggaagagatgtggcaaaaaatcgaggagctggcccggcttaatccccagtatcccatgttccgagcccctccaccactgccccctgtgtactcgatggagacagagacccccacagctgaggacatccagcttctgaagaggactgtggagactgaggctgttcagatgctaaaagacatcaagaaggagaaagtgctgctgcggaggaagtcggagctgccccaggacgtgtacaccatcaaggcactggaggcgcacaagcgggcggaagagttcctaactgccagccaggaggctctctgacccctcacgttcctaccacagggccacagcccacacagccctgggacactgccctggccctccatactctgctccctactggctgtcttgggggaaggcagcgcctctctagctactcaagggagggggatgtgggcacttgaagcagggacacccacagaatggtccctcttctccccaaaaggtgttcatgcctccctgtggctagtacaggctgagcactaagatgcttagtgctcagacaacctggggatgcctgtcccctacctgctcctcacccacagctacctgaggctgctctgagaagtacacacaggaatacatacgctcctctattcttcccttcatcctcatttgaacgccaggtatctcccctcctctctctcccctgcagaggcatgtagggaacagcaggagattattctcaccaaagttatgtcaagccccattggtcccagagtagctgaagggaagccaacccccctgcagcacaaataggccccccagtcccagccgtgtgctggcagatagggttgtattatttcttcttaccccatgcctgaccaagggaggtcaaaaggagaaaagtataggctgtggacaataactgatgaatatagggcccagatggaccaagtggggccggggagggatgaataaacaccctaccccgtgccctgtctttggtgagcagcagccctggggtcacagacatggaagggaccaccctggggctgactgcttttctgtgctgttggttcccaamactagaaagaaggaagcagggagcggtgccccaagcatggctcctgccaamacctatttatttccttgtttgtgctatgctgggcaggccttctcttgtcccttataggtaccttggaggggccaggggctgaggaaggccggacycaggttccaggggcgcaggcagtgckgcttttggctgtgtacatagggtgctttattctccmcagagtgatacatgctaaggtgggttgggcttggaccgatgtccccatatgtacagaactgaataaagtgggtctctgagaagtctgatgtgccttgatgtggaaagggagacggggaagatggaaatggacattacaaccagggatgtgttcagtcctgtgctggtt

SEQ ID NO: 1200 - DNA, 1755 bp, Homo sapiens
cgcgcgggaacaccggcgccgggattcggatgggggcgggtgggggacgctgcagctggggccatttgaggggagcccatggggcctgaaaggcatctgtcaggcgcccctgcccggatggcaacagtagttctaggaggagacaccatgggccctgagcgtatcttccccaatcagactgasgaactgggacatcagggcycttcagaaggcactggggattggagcagtgaggagcctgaggaagagcaggaggaaacggggtcgggcccagctggctactcctaccagcccctgaaccaagatcctgaacaagaggaggtggaactggcaccagtgggggatggagatgtagttgctgacatccaggatcgaatccaggccctggggcttcatttgccagacccaccattagagagtgaagatgaagatgaggagggagctacagcgttgaacaaccacagctctattcccatggacccagaacatgtagagctggtgaaaaggacaatggctggagtaagcctgcctgcgccaggggttcctgcctgggctcgggagatatcggatgcccagtgggaagatgtggtacagaaagccctccaagcccggcaggcatcccctgmctggaagtgaccacagtgagagctgccttatattcctacattccaggccagaaccagcacaggactgaacacatccctggttgtaatgtccatttccatcttccccgtctccctttccacatcaaggcacatcagacttctcagagacccactttattcagttctgtacatatggggacatcggtccaagcccaacccaccttagcatgtatcactctgkggagaataaagcaccctatgtacacagccaaaagcmgcactgcctgcgcccctggaacctgrgtccggccttcctcagcccctggcccctccaaggtacctataagggacaagagaaggcctgcccagcatagcacaaacaaggaaataaataggtkttggcaggagccatgcttggggcaccgctccctgcttccttctttctagtkttgggaaccaacagcacagaaaagcagtcagccccagggtggtcccttccatgtctgtgaccccagggctgctgctcaccaaagacagggcacggggtagggtgtttattcatccctccccggccccacttggtccatctgggccctatattcatcagttattgtccacagcctatacttttctccttttgacctcccttggtcaggcatggggtaagaagaaataatacaaccctatctgccagcacacggctgggactggggggcctatttgtgctgcaggggggttggcttcccttcagctactctgggaccaatggggcttgacataactttggtgagaataatctcctgctgttccctacatgcctctgcaggggagagagaggaggggagatacctggcgttcaaatgaggatgaagggaagaatagaggagcgtatgtattcctgtgtgtacttctcagagcagcctcaggtagctgtgggtgaggagcaggtaggggacaggcatccccaggttgtctgagcactaagcatcttagtgctcagcctgtactagccacagggaggcatgaacaccttttggggagaagagggaccattctgtgggtgtccctgcttcaagtgcccacatccccctcccttgagtagctagagaggcgctgccttcccccaagacagccagtagggagcagagta

SEQ ID NO: 1201 - DNA, 1791 bp, Homo sapiens
agactcgggcgcccggcccaaagcccggcaggggcgtgtccgcgcgctcacctgctattggccaggtggggctgtcggctgccagcagtgcttatgytttaagtgcggagcgggtggctgcggagccaggcgcggcgcaggatggtggacagcgtgtaccggacccgctccctgggggtggcggccgaagggctcccggaccagtacgcggacggggaggcggcgcgcgtgtggcagctgtatatcggagacacccgcagccgcaccgccgagtacaaggcatggctgcytgggctgctgcgccagcacggctgccagcgggtgctcgacgtagcctgtggcactggggtggactccattatgctggtggaagagggcttcagtgtgacgagtgtggatgccagtgacaagatgctgaagtatgcacttaaggagcgctggaaccggcggcacgagcccgccttcgacaagtgggtcatcgaagaagccaactggatgactctggacaaagatgtgccccagtcagcagagggtggctttgatgctgtcatctgccttggaaacagtttcgctcacttgccagactgcaaaggggaccagagtgagcaccggctggcgctgaaaaacattgcgagcatggtgcgggcagggggcctactggtcattgatmatcgcaactacgaccacatcctcagtacaggctgtgcacccccagggaagaacatctactataagagtgacttgaccaaggacgtcacaacatcagtgctgatagtgaacaacaaggcccacatggtgaccctggactatacggtgcaggtgccgggggctggccaggatggctctcctggcttgagtaagttccggctctcctactacccacactgtctggcatccttcacggagctgctccaagcagccttcggaggtaagtgccagcacagcgtcctgggcgacttcaagccttacaagccaggccaaacctacattccctgctacttcatccacgtgctcaagaggacagactgagtgtggcctcagctcccacaagcctctgcccaggcactgctaggctctgtctggaagatggggaccagcagccccacaccagggccagcctctagagcagactacagctggggtgcagggatgtgggttccacagacggaagggtaaacaatatagtctttttcagttcctgcatgcattgtgwttatgtcagaaggatcaggctcccatgctgcccacccccccaccctctcccagggcttactcctcccacaaccctgctctttctcactccaacctttcatgccacaacaccagtagggggcrggacatgctttattttcagccacagaactagccctctcagggcccaatccccaraacccaaggccctggccctcttcctgagtagatgggcctttctcttaragccrgcctggaaggaggggcaagtaggcaggagatatctcttgagctgttgctgctgtctcaatgccactttgcaccctgggatctcctggagggaggtggcctccaggtgggttggcagcagcctgaggaggagcccttccttcccagatctctctgtgggctatcaaggtacctgcagccatgctgagcggggtcccaraccctggggggctcctagcaggcagcaaacttgcgctggatgcgcttgtaccggagcagctcctgctcactgactgagggttgcagccgggcggcagcctgcagcaagtcctccatggtgagcatcagtgctgagctacctkgytccagccc

SEQ ID NO: 1202 - DNA, 1794 bp, Homo sapiens
agactcgggcgcccggcccaaagcccggcaggggcgtgtccgcgcgctcacctgctattggccaggtggggctgtcggctgccagcagtgcttatgytttaagtgcggagcgggtggctgcggagccaggcgcggcgcaggatggtggacagcgtgtaccggacccgctccctgggggtggcggccgaagggctcccggaccagtacgcggacggggaggcggcgcgcgtgtggcagctgtatatcggagacacccgcagccgcaccgccgagtacaaggcatggctgcytgggctgctgcgccagcacggctgccagcgggtgctcgacgtagcctgtggcactggggtggactccattatgctggtggaagagggcttcagtgtgacgagtgtggatgccagtgacaagatgctgaagtatgcacttaaggagcgctggaaccggcggcacgagcccgccttcgacaagtgggtcatcgaagaagccaactggatgactctggacaaagatgtgccccagtcagcagagggtggctttgatgctgtcatctgccttggaaacagtttcgctcacttgccagactgcaaaggggaccagagtgagcaccggctggcgctgaaaaacattgcgagcatggtgcgggcagggggcctactggtcattgatmatcgcaactacgaccacatcctcagtacaggctgtgcacccccagggaagaacatctactataaggtgggtgacttgaccaaggacgtcacaacatcagtgctgatagtgaacaacaaggcccacatggtgaccctggactatacggtgcaggtgccgggggctggccaggatggctctcctggcttgagtaagttccggctctcctactacccacactgtctggcatccttcacggagctgctccaagcagccttcggaggtaagtgccagcacagcgtcctgggcgacttcaagccttacaagccaggccaaacctacattccctgctacttcatccacgtgctcaagaggacagactgagtgtggcctcagctcccacaagcctctgcccaggcactgctaggctctgtctggaagatggggaccagcagccccacaccagggccagcctctagagcagactacagctggggtgcagggatgtgggttccacagacggaagggtaaacaatatagtctttttcagttcctgcatgcattgtgwttatgtcagaaggatcaggctcccatgctgcccacccccccaccctctcccagggcttactcctcccacaaccctgctctttctcactccaacctttcatgccacaacaccagtagggggcrggacatgctttattttcagccacagaactagccctctcagggcccaatccccaraacccaaggccctggccctcttcctgagtagatgggcctttctcttaragccrgcctggaaggaggggcaagtaggcaggagatatctcttgagctgttgctgctgtctcaatgccactttgcaccctgggatctcctggagggaggtggcctccaggtgggttggcagcagcctgaggaggagcccttccttcccagatctctctgtgggctatcaaggtacctgcagccatgctgagcggggtcccaraccctggggggctcctagcaggcagcaaacttgcgctggatgcgcttgtaccggagcagctcctgctcactgactgagggttgcagccgggcggcagcctgcagcaagtcctccatggtgagcatcagtgctgagctacctkgytccagccc

SEQ ID NO: 1203 - DNA, 3391 bp, Homo sapiens
gcggaagcggccctcgcgcacactagtcgtctggctctctggctccggaagctgcgctccttcaccctcctcgttggtgtcctgtcaccatggcgctggctgtcttgcgggtcctggagccctttccgaccgagacacccccgttggcagtgctgctgccacccgggggcccgtggccggcggcggagctgggcctggtgctggccctgaggcctgcaggggagagcccggcagggccggcgctgctggtggcagccctggaggggccggacgcgggcaccgaagagcagggtcccgggccgccgcagctactggttagccgcgcgctgctgcggctcctggcactgggctccggggcctgggtgcgggcgcgggcggtgcggcggcccccggcgctaggttgggcactgcttggcacctcgctggggcctgggctcggaccgcgagtcgggccgctgctggtgaggcgcggagagaccctcccagttcccggaccgcgggtgctggagacgcggccggcgttgcaagggctgctgggcccagggactcggctggctgtgactgagctccgcgggcgggccagactgtgtccagagtctggggacagcagtcggcccccacccccgcccgtggtgtcctcctttgcggtttctggcacagtgcggcgactccagggagttctgggagggactggagattcactaggggtgagccggagctgtctccgtggccttggcctcttccagggcgaatgggtgtgggtggcccaggccagagagtcatcgaacacttcacagccgcacttggctagggtgyaggtcctagaacctcgctgggacctctctgatagactgggacccggctctggaccgctgggagagcccctcgctgacggactggckcttgtccctgccactttggcttttaatcttggctgtgaccccctggaaatgggagagctcagaattcagaggtacttggaaggctccatcgcccctgaagacaaaggaagctgctcattgctgcctgggcctccatttgccagagagttacacatcgaaattgtgtcttctccccactacagcactaatggaaattatgacggtgttctttaccggcactttcagatacccagggtagtccaggaaggggatgttctatgtgtgccaacaattgggcaagtagagatcctggaaggaagtccagagaaactgcccaggtggcgggaaatgttttttaaagtgaagaaaacagttggggaagctccagatggaccagccagtgcctacttggccgacaccacccatacctccttgtacatggtgggttctaccctgagccctgttccatggctcccttcagaggaatccactctctggagcagtttgtctcctccaggcctggaggccttggtgtctgaactctgtgctgtcctgaagcctcgcctccagccagggggtgccctgctgacaggaactagcagtgtccttctacggggccccccaggctgtgggaagaccacagtagttgctgctgcctgtagtcaccttgggctccacttactgaaggtgccctgctccagcctctgtgcagaaagtagtggggctgtggagacaaaactgcaggccatcttctcccgggcccgccgttgccggcctgcagtcctgttgctcacagctgtggaccttctgggccgggaccgtgatgggctgggtgaggatgcccgtgtgatggctgtgctgcgtcacctcctcctcaatgaggamcccctcaacagctgccctcccctcatggttgtggccaccacaagccgggcccaggacctgcctgctgatgtgcagacagcatttcctcatgagctcgaggtgcctgctctgtcagaggggcagcrgctcagcatcctgcgggccctcactgcccaccttcccctgggccaggaggtgaacttggcacagctagcacggcggtgtgcaggctttgtggtaggggatctctatgcccttctgacccacagcagccgggcagcctgcaccaggatcaagaactcaggtttggcaggtggcttgactgaggaggatgagggggagctgtgtgctgccggctttcctctcctggctgaggactttgggcaggcactggagcaactgcagacagctcactcccaggccgttggagcccccaagatcccctcagtgtcctggcatgatgtgggtgggctgcaggaggtgaagaaggagatcctggagaccattcagctccccctggagcaccctgagctactgagcctgggcctgagacgctcaggccttctgctccatgggccccctggcaccggcaagacccttctggccaaggcagtagccactgagtgcagccttaccttcctcagcgtgaaggggccagagctcattaacatgtatgtgggccaaagtgaggagaatgtgcgggaagtrtttgccagggccagggctgcagctccatgcattatcttctttgatgaactggactctttggycccaagcygrgggcgaagtggagattctggaggagtgatggacagggtggtgtctcagctccttgccgagctagatgggctgcacagcactcaggatgtgtttgtgattggagccaccaacagaccagatctcctggaccctgcccttctgcggcctggcagatttgacaagctggtgtttgtgggggcaaatgaggaccgggcctcccagctacgcrttctaagtgccatcacacgcaaattcaagctagagccatctgtgagcctggtaaacgtgctagattgctgccctccccagctgacgggcgcggacctctactctctctgctctgatgctatgacakctgccctcaaacgcagggttcatgacctggaggaagggctggarcmaggtagctcagcactgatgctcaccatggaggacttgctgcaggctgccgcccggctgcaaccctcagtcagtgagcaggagctgctccggtacaagcgcatccagcgcaagtttgctgcctgctaggagccccccagggtytgggaccccgctcagcatggctgcaggaaaacacaacactccacccccgcccccacttaaaggagccccaggcagaatgaacagtgttcctggtgactgggctgggggagcctggctagacctgcataccccacttgtcgaaggcgggctcgtgccgccggttccagcgctccttaagtgcatacttcagcatcttgtcactggcatccacactcgtcacactgaagccctcttccaccagcataatggagtccaccctgagtacggccagcgaggagaggcagagagaggcagttaggggagcctgggagggccaggaggagaccctgcactggacacttttg

SEQ ID NO: 1204 - DNA, 3498 bp, Homo sapiens
gcggaagcggccctcgcgcacactagtcgtctggctctctggctccggaagctgcgctccttcaccctcctcgttggtgtcctgtcaccatggcgctggctgtcttgcgggtcctggagccctttccgaccgagacacccccgttggcagtgctgctgccacccgggggcccgtggccggcggcggagctgggcctggtgctggccctgaggcctgcaggggagagcccggcagggccggcgctgctggtggcagccctggaggggccggacgcgggcaccgaagagcagggtcccgggccgccgcagctactggttagccgcgcgctgctgcggctcctggcactgggctccggggcctgggtgcgggcgcgggcggtgcggcggcccccggcgctaggttgggcactgcttggcacctcgctggggcctgggctcggaccgcgagtcgggccgctgctggtgaggcgcggagagaccctcccagttcccggaccgcgggtgctggagacgcggccggcgttgcaagggctgctgggcccagggactcggctggctgtgactgagctccgcgggcgggccagactgtgtccagagtctggggacagcagtcggcccccacccccgcccgtggtgtcctcctttgcggtttctggcacagtgcggcgactccagggagttctgggagggactggagattcactaggggtgagccggagctgtctccgtggccttggcctcttccagggcgaatgggtgtgggtggcccaggccagagagtcatcgaacacttcacagccgcacttggctagggtgyaggtcctagaacctcgctgggacctctctgatagactgggacccggctctggaccgctgggagagcccctcgctgacggactggckcttgtccctgccactttggcttttaatcttggctgtgaccccctggaaatgggagagctcagaattcagaggtacttggaaggctccatcgcccctgaagacaaaggaagctgctcattgctgcctgggcctccatttgccagagagttacacatcgaaattgtgtcttctccccactacagcactaatggaaattatgacggtgttctttaccggcactttcagatacccagggtagtccaggaaggggatgttctatgtgtgccaacaattgggcaagtagagatcctggaaggaagtccagagaaactgcccaggtggcgggaaatgttttttaaagtgaagaaaacagttggggaagctccagatggaccagccagtgcctacttggccgacaccacccatacctccttgtacatggtgggttctaccctgagccctgttccatggctcccttcagaggaatccactctctggagcagtttgtctcctccaggcctggaggccttggtgtctgaactctgtgctgtcctgaagcctcgcctccagccagggggtgccctgctgacaggaactagcagtgtccttctacggggccccccaggctgtgggaagaccacagtagttgctgctgcctgtagtcaccttgggctccacttactgaaggtgccctgctccagcctctgtgcagaaagtagtggggctgtggagacaaaactgcaggccatcttctcccgggcccgccgttgccggcctgcagtcctgttgctcacagctgtggaccttctgggccgggaccgtgatgggctgggtgaggatgcccgtgtgatggctgtgctgcgtcacctcctcctcaatgaggamcccctcaacagctgccctcccctcatggttgtggccaccacaagccgggcccaggacctgcctgctgatgtgcagacagcatttcctcatgagctcgaggtgcctgctctgtcagaggggcagcrgctcagcatcctgcgggccctcactgcccaccttcccctgggccaggaggtgaacttggcacagctagcacggcggtgtgcaggctttgtggtaggggatctctatgcccttctgacccacagcagccgggcagcctgcaccaggatcaagaactcaggtttggcaggtggcttgactgaggaggatgagggggagctgtgtgctgccggctttcctctcctggctgaggactttgggcaggcactggagcaactgcagacagctcactcccaggccgttggagcccccaagatcccctcagtgtcctggcatgatgtgggtgggctgcaggaggtgaagaaggagatcctggagaccattcagctccccctggagcaccctgagctactgagcctgggcctgagacgctcaggccttctgctccatgggccccctggcaccggcaagacccttctggccaaggcagtagccactgagtgcagccttaccttcctcagcgtgaaggggccagagctcattaacatgtatgtgggccaaagtgaggagaatgtgcgggaagtrtttgccagggccagggctgcagctccatgcattatcttctttgatgaactggactctttggycccaagcygrgggcgaagtggagattctggaggagtgatggacagggtggtgtctcagctccttgccgagctagatgggctgcacagcactcaggatgtgtttgtgattggagccaccaacagaccagatctcctggaccctgcccttctgcggcctggcagatttgacaagctggtgtttgtgggggcaaatgaggaccgggcctcccagctacgcrttctaagtgccatcacacgcaaattcaagctagagccatctgtgagcctggtaaacgtgctagattgctgccctccccagctgacgggcgcggacctctactctctctgctctgatgctatgacakctgccctcaaacgcagggttcatgacctggaggaagggctggarcmaggtagctcagcactgatgctcaccatggaggacttgctgcaggctgccgcccggctgcaaccctcagtcagtgagcaggagctgctccggtacaagcgcatccagcgcaagtttgctgcctgctaggagccccccagggtytgggaccccgctcagcatggctgcaggtaccttgatagcccacagagagatctgggaaggaagggctcctcctcaggctgctgccaacccacctggaggccacctccctccaggagatcccagggtgcaaagtggcattgagacagcagcaacagctcaagagatatctcctgcctacttgcccctccttccaggcyggctytaagagaaaggcccatctactcaggaagagggccagggccttgggttytggggattgggccctgagagggctagttctgtggctgaaaataaagcatgtccygccccctactggtgttgtggcatgaaaggttggagtgagaaagagcagggttgtgggaggagtaagccctgggagagggtgggggggtgggcagcatgggagcctgatccttctgacataawcacaatgcatgcaggaactgaaaaa

SEQ ID NO: 1205 - DNA, 3127 bp, Homo sapiens
gcggaagcggccctcgcgcacactagtcgtctggctctctggctccggaagctgcgctccttcaccctcctcgttggtgtcctgtcaccatggcgctggctgtcttgcgggtcctggagccctttccgaccgagacacccccgttggcagtgctgctgccacccgggggcccgtggccggcggcggagctgggcctggtgctggccctgaggcctgcaggggagagcccggcagggccggcgctgctggtggcagccctggaggggccggacgcgggcaccgaagagcagggtcccgggccgccgcagctactggttagccgcgcgctgctgcggctcctggcactgggctccggggcctgggtgcgggcgcgggcggtgcggcggcccccggcgctaggttgggcactgcttggcacctcgctggggcctgggctcggaccgcgagtcgggccgctgctggtgaggcgcggagagaccctcccagttcccggaccgcgggtgctggagacgcggccggcgttgcaagggctgctgggcccagggactcggctggctgtgactgagctccgcgggcgggccagactgtgtccagagtctggggacagcagtcggcccccacccccgcccgtggtgtcctcctttgcggtttctggcacagtgcggcgactccagggagttctgggagggactggagattcactagggaggtacttggaaggctccatcgcccctgaagacaaaggaagctgctcattgctgcctgggcctccatttgccagagagttacacatcgaaattgtgtcttctccccactacagcactaatggaaattatgacggtgttctttaccggcactttcagatacccagggtagtccaggaaggggatgttctatgtgtgccaacaattgggcaagtagagatcctggaaggaagtccagagaaactgcccaggtggcgggaaatgttttttaaagtgaagaaaacagttggggaagctccagatggaccagccagtgcctacttggccgacaccacccatacctccttgtacatggtgggttctaccctgagccctgttccatggctcccttcagaggaatccactctctggagcagtttgtctcctccaggcctggaggccttggtgtctgaactctgtgctgtcctgaagcctcgcctccagccagggggtgccctgctgacaggaactagcagtgtccttctacggggccccccaggctgtgggaagaccacagtagttgctgctgcctgtagtcaccttgggctccacttactgaaggtgccctgctccagcctctgtgcagaaagtagtggggctgtggagacaaaactgcaggccatcttctcccgggcccgccgttgccggcctgcagtcctgttgctcacagctgtggaccttctgggccgggaccgtgatgggctgggtgaggatgcccgtgtgatggctgtgctgcgtcacctcctcctcaatgaggamcccctcaacagctgccctcccctcatggttgtggccaccacaagccgggcccaggacctgcctgctgatgtgcagacagcatttcctcatgagctcgaggtgcctgctctgtcagaggggcagcrgctcagcatcctgcgggccctcactgcccaccttcccctgggccaggaggtgaacttggcacagctagcacggcggtgtgcaggctttgtggtaggggatctctatgcccttctgacccacagcagccgggcagcctgcaccaggatcaagaactcaggtttggcaggtggcttgactgaggaggatgagggggagctgtgtgctgccggctttcctctcctggctgaggactttgggcaggcactggagcaactgcagacagctcactcccaggccgttggagcccccaagatcccctcagtgtcctggcatgatgtgggtgggctgcaggaggtgaagaaggagatcctggagaccattcagctccccctggagcaccctgagctactgagcctgggcctgagacgctcaggccttctgctccatgggccccctggcaccggcaagacccttctggccaaggcagtagccactgagtgcagccttaccttcctcagcgtgaaggggccagagctcattaacatgtatgtgggccaaagtgaggagaatgtgcgggaagtrtttgccagggccagggctgcagctccatgcattatcttctttgatgaactggactctttggycccaagcygrgggcgaagtggagattctggaggagtgatggacagggtggtgtctcagctccttgccgagctagatgggctgcacagcactcaggatgtgtttgtgattggagccaccaacagaccagatctcctggaccctgcccttctgcggcctggcagatttgacaagctggtgtttgtgggggcaaatgaggaccgggcctcccagctacgcrttctaagtgccatcacacgcaaattcaagctagagccatctgtgagcctggtaaacgtgctagattgctgccctccccagctgacgggcgcggacctctactctctctgctctgatgctatgacakctgccctcaaacgcagggttcatgacctggaggaagggctggarcmaggtagctcagcactgatgctcaccatggaggacttgctgcaggctgccgcccggctgcaaccctcagtcagtgagcaggagctgctccggtacaagcgcatccagcgcaagtttgctgcctgctaggagccccccagggtytgggaccccgctcagcatggctgcaggaaaacacaacactccacccccgcccccacttaaaggagccccaggcagaatgaacagtgttcctggtgactgggctgggggagcctggctagacctgcataccccacttgtcgaaggcgggctcgtgccgccggttccagcgctccttaagtgcatacttcagcatcttgtcactggcatccacactcgtcacactgaagccctcttccaccagcataatggagtccaccctgagtacggccagcgaggagaggcagagagaggcagttaggggagcctgggagggccaggaggagaccctgcactggacacttttg

SEQ ID NO: 1206 - DNA, 3809 bp, Homo sapiens
gcgggacggcgccgggcgctgccccggggattcgggccggctcgcgggcgctgccagtctcgggcggcggtgtccggcgcgcgggcggcctgctgggcgggctgaagggttagcggagcacgggcaaggcggagagtgacggagtcggcgagcccccgcggcgacaggttctctacttaaaagacaatgactactgatgaaggtgccaagaacaatgaagaaagccccacagccactgttgctgagcagggagaggatattacctccaaaaaagacaggggagtattaaagattgtcaaaagagtggggaatggtgaggaaacgccgatgattggagacaaagtttatgtccattacaaaggaaaattgtcaaatggaaagaagtttgattccagtcatgatagaaatgaaccatttgtctttagtcttggcaaaggccaagtcatcaaggcatgggacattggggtggctaccatgaagaaaggagagatatgccatttactgtgcaaaccagaatatgcatatggctcggctggcagtctccctaaaattccctcgaatgcaactctcttttttgaggcaaattgagctccttgatttcaaaggagaggatttatttgaagatggaggcattatccggagaaccaaacggaaaggagagggatattcaaatccaaacgaaggagcaacagtagaaatccacctggaaggccgctgtggtggaaggatgtttgactgcagagatgtggcattcactgtgggcgaaggagaagaccacgacattccaattggaattgacaaagctctggagaaaatgcagcgggaagaacaatgtattttatatcttggaccaagatatggttttggagaggcagggaagcctaaatttggcattgaacctaatgctgagcttatatatgaagttacacttaagagcttcgaaaaggccaaagaatcctgggagatggataccaaagaaaaattggagcaggctgccattgtcaaagagaagggaaccgtatacttcaagggaggcaaatacatgcaggcggtgattcagtatgggaagatagtgtcctggttagagatggaatatggtttatcagaaaaggaatcgaaagcttctgaatcatttctccttgctgcctttctgaacctggccatgtgctacctgaagcttagagaatacaccaaagctgttgaatgctgtgacaaggcccttggactggacagtgccaatgagaaaggcttgtataggaggggtgaagcccagctgctcatgaaygagtttgagtcagccaagggtgactttgagaaagtgctggaagtaaacccccagaataaggctgcaagactgcagatctccatgtgccaraaaaaggccaaggagcacaacgagcgggaccgcaggatatacgccaacatgttcaagaagtttgcagagcaggatgccaaggaagaggccaataaagcaatgggcaagaagacttcagaaggggtcactaatgaaaaaggaacagacagtcaagcaatggaagaagagaaacctgagggccacgtatgacgccacgccaaggagggaagagtcccagtgaactcggcccctcctcaatgggctttcccccaactcaggacagaacagtgtttaatgtaaagtttgttatagtctatgtgattctggaagcaaatggcaaaaccagtagcttcccaaaaacagcccccctgctgctgcccggagggttcactgaggggtggcacgggaccactccaggtggaacaaacagaaatgactgtggtgtggagggagtgagccagcagcttaagtccagctcatttcagtttctatcaaccttcaagtatccaattcagggtccctggagatcatcctaacaatgtggggctgttaggttttacctttgaactttcatagcactgcagaaacctttaaaaaaaaaatgcttcatgaatttctcctttcctacagttgggtagggtaggggaaggaggataagcttttgttttttaaatgactgaagtgctataaatgtagtctgttgcatttttaaccaacagaacccacagtagaggggtctcatgtctccccagttccacagcagtgtcacagacgtgaaagccagaacctcagaggccacttgcttgctgacttagcctcctcccaaagtccccctcctcagccagcctccttgtgagagtggctttctaccacacacagcctgtccctgggggagtaattctgtcattcctaaaacacccttcagcaatgataatgagcagatgagagtttctggattagcttttcctattttcgatgaagttctgagatactgaaatgtgaaaagagcaatcagaattgtgctttttctcccctcctctattccttttagggaataatattcaatacacagtacttcctcccagcattgctactgctcagcttcttctttcattctaatccttgctattaagaatttaagacttgtgcttacaatatttttgacctggagtggatctatttacatagtcatttaggatccatgcagctttttttgtctttttaagattattggctcataagcatatgtatactggtttatggaactttatttacactcctctatcatgcaaaaaaattttgactttttagtactaagcttaatttttaaaaacaaaatctgtagkgttgacaaataaatagttgctcttctacactaggggtttcacctgcaggtttgacacgcagttgctcgcttttcctgccctgtcaagcttctctgttctggcgtgagttgtgaaagagttgaagacagcttcccatgccggtacacagccagtagcctaaatctccagtacttgagctgaccattgaactagggcaagtcttaaatgtgtacatgtagttgaatttcagtccttacgggtaaacagattgagcatggctctctattccctcagcctaagaaacactcatgggaatgcatttggcaacccaaggaaccatttgcttaaacctggaacatctcacctttttaaatcctaaaaaacactggcagttatattttaaattagtttttatttttatgatggttttatcaaaagacttttattattagattgggacccccttcaaacctaaaaatcaagttatttccttttataatacttttcttccccatggaacaaatgggatcaatttgtgagttttttcctttaatgataactaaaatccctctaatttctcatttatgcttttgtcttttttatgaaatatttcttttaaaagccccagtctcacctacgaaatatgaagagcaaaagctgattttgcttacttgctaaactgttgggaaagctctgtagagcatggttccagtgaggccaagattgaaatttgatactaaaaaggccacctagctttttgcagataacaaacaagaaagctattccaagactcagatgatgccagctgtctcccacgtgtgtattatggttcaccagggggaactggcaaaagtgtgtgtggggaggggaagggtgtgtgagtggttctgagcaaataactacagggtgcccattaccactcaagaagacacttcacgtattcttgtatcaaattcaataatcttaaacaatttgtgtagaagtccacagacatctttcaaccaccttttaggctgcatatggattgccaagtcagcatatgaggaattaaagacattgtttttwaaaaaaaaaaatcatttagatgcacttttttgtgtgttctttaaataaatccaaaaaaaatgtga

SEQ ID NO: 1207 - DNA, 3805 bp, Homo sapiens
gcgggacggcgccgggcgctgccccggggattcgggccggctcgcgggcgctgccagtctcgggcggcggtgtccggcgcgcgggcggcctgctgggcgggctgaagggttagcggagcacgggcaaggcggagagtgacggagtcggcgagcccccgcggcgacaggttctctacttaaaagacaatgactactgatgaaggtgccaagaacaatgaagaaagccccacagccactgttgctgagcagggagaggatattacctccaaaaaagacaggggagtattaaagattgtcaaaagagtggggaatggtgaggaaacgccgatgattggagacaaagtttatgtccattacaaaggaaaattgtcaaatggaaagaagtttgattccagtcatgatagaaatgaaccatttgtctttagtcttggcaaaggccaagtcatcaaggcatgggacattggggtggctaccatgaagaaaggagagatatgccatttactgtgcaaaccagaatatgcatatggctcggctggcagtctccctaaaattccctcgaatgcaactctcttttttgagattgagctccttgatttcaaaggagaggatttatttgaagatggaggcattatccggagaaccaaacggaaaggagagggatattcaaatccaaacgaaggagcaacagtagaaatccacctggaaggccgctgtggtggaaggatgtttgactgcagagatgtggcattcactgtgggcgaaggagaagaccacgacattccaattggaattgacaaagctctggagaaaatgcagcgggaagaacaatgtattttatatcttggaccaagatatggttttggagaggcagggaagcctaaatttggcattgaacctaatgctgagcttatatatgaagttacacttaagagcttcgaaaaggccaaagaatcctgggagatggataccaaagaaaaattggagcaggctgccattgtcaaagagaagggaaccgtatacttcaagggaggcaaatacatgcaggcggtgattcagtatgggaagatagtgtcctggttagagatggaatatggtttatcagaaaaggaatcgaaagcttctgaatcatttctccttgctgcctttctgaacctggccatgtgctacctgaagcttagagaatacaccaaagctgttgaatgctgtgacaaggcccttggactggacagtgccaatgagaaaggcttgtataggaggggtgaagcccagctgctcatgaaygagtttgagtcagccaagggtgactttgagaaagtgctggaagtaaacccccagaataaggctgcaagactgcagatctccatgtgccaraaaaaggccaaggagcacaacgagcgggaccgcaggatatacgccaacatgttcaagaagtttgcagagcaggatgccaaggaagaggccaataaagcaatgggcaagaagacttcagaaggggtcactaatgaaaaaggaacagacagtcaagcaatggaagaagagaaacctgagggccacgtatgacgccacgccaaggagggaagagtcccagtgaactcggcccctcctcaatgggctttcccccaactcaggacagaacagtgtttaatgtaaagtttgttatagtctatgtgattctggaagcaaatggcaaaaccagtagcttcccaaaaacagcccccctgctgctgcccggagggttcactgaggggtggcacgggaccactccaggtggaacaaacagaaatgactgtggtgtggagggagtgagccagcagcttaagtccagctcatttcagtttctatcaaccttcaagtatccaattcagggtccctggagatcatcctaacaatgtggggctgttaggttttacctttgaactttcatagcactgcagaaacctttaaaaaaaaaatgcttcatgaatttctcctttcctacagttgggtagggtaggggaaggaggataagcttttgttttttaaatgactgaagtgctataaatgtagtctgttgcatttttaaccaacagaacccacagtagaggggtctcatgtctccccagttccacagcagtgtcacagacgtgaaagccagaacctcagaggccacttgcttgctgacttagcctcctcccaaagtccccctcctcagccagcctccttgtgagagtggctttctaccacacacagcctgtccctgggggagtaattctgtcattcctaaaacacccttcagcaatgataatgagcagatgagagtttctggattagcttttcctattttcgatgaagttctgagatactgaaatgtgaaaagagcaatcagaattgtgctttttctcccctcctctattccttttagggaataatattcaatacacagtacttcctcccagcattgctactgctcagcttcttctttcattctaatccttgctattaagaatttaagacttgtgcttacaatatttttgacctggagtggatctatttacatagtcatttaggatccatgcagctttttttgtctttttaagattattggctcataagcatatgtatactggtttatggaactttatttacactcctctatcatgcaaaaaaattttgactttttagtactaagcttaatttttaaaaacaaaatctgtagkgttgacaaataaatagttgctcttctacactaggggtttcacctgcaggtttgacacgcagttgctcgcttttcctgccctgtcaagcttctctgttctggcgtgagttgtgaaagagttgaagacagcttcccatgccggtacacagccagtagcctaaatctccagtacttgagctgaccattgaactagggcaagtcttaaatgtgtacatgtagttgaatttcagtccttacgggtaaacagattgagcatggctctctattccctcagcctaagaaacactcatgggaatgcatttggcaacccaaggaaccatttgcttaaacctggaacatctcacctttttaaatcctaaaaaacactggcagttatattttaaattagtttttatttttatgatggttttatcaaaagacttttattattagattgggacccccttcaaacctaaaaatcaagttatttccttttataatacttttcttccccatggaacaaatgggatcaatttgtgagttttttcctttaatgataactaaaatccctctaatttctcatttatgcttttgtcttttttatgaaatatttcttttaaaagccccagtctcacctacgaaatatgaagagcaaaagctgattttgcttacttgctaaactgttgggaaagctctgtagagcatggttccagtgaggccaagattgaaatttgatactaaaaaggccacctagctttttgcagataacaaacaagaaagctattccaagactcagatgatgccagctgtctcccacgtgtgtattatggttcaccagggggaactggcaaaagtgtgtgtggggaggggaagggtgtgtgagtggttctgagcaaataactacagggtgcccattaccactcaagaagacacttcacgtattcttgtatcaaattcaataatcttaaacaatttgtgtagaagtccacagacatctttcaaccaccttttaggctgcatatggattgccaagtcagcatatgaggaattaaagacattgtttttwaaaaaaaaaaatcatttagatgcacttttttgtgtgttctttaaataaatccaaaaaaaatgtga

SEQ ID NO: 1208 - DNA, 1023 bp, Homo sapiens
atgccaggaaaaagaattgcagtgattggygctgaagtcagtggattaaacgctattaagagctgtctggaagagggactggagcccacctgttttgaaggaggcagtgacattggaggagtatggagatatgaggagaaggctgaaggtggcagggcaatcatctataaatgtgtcaccagcaatacttcaaaggaaatatcagcctakagtgattaccctttcccttcccatcttcccaactatttgcacaattccaaattgatggagtacctcagaatgtacatcaawcactttcatcttctgaagcacatacagtttatgtcaaaggtgtgcagtgtgaagaagtgctgcaacttctcatgcacaaggcaatgggatgttgtggtcgagactggagggaagcagaaatcctatgtctttgatgggattatggtgtgtagtggccttcatagccatcccgtattaccactccaggactttccaaggatcaagaggttcaaaggccaatatattcacagttgggaatacaagaggccagataaatttckggagaagaaaattgttgttattggctttggaaattccagagctgatttggccattgagctcagccatgtagctgcacagctggaggagccaacactagctttcactggcatccttcraacagtgggagccaccatttcctcttcagargtccagagctgttgggctgtatgtgtatttaaagtgtactatgtagattacatggatgaaactgcctctgaaattggagcgaaacccaacctccyctcactcttcctgtgggatccaaagctagctatggaagttttctttggaccatgcacaccttaccagtactgccttcagrggccagggaagtgggctggaggccaggaagccatcctgacccagagagagagaattatcaagcccctgaggactcgtatccttactcgtgaccagccttcattctctgttattttggcttaaaagtatcagtgcagtccttctcatctt

SEQ ID NO: 1209 - DNA, 1577 bp, Homo sapiens
tcctggcccctggacggggacctcgctgttccaccagcccatccgtgcacacttagtttcccctaaagcagtttccgcaysggccggaccgtggtcgtgctgggcggargcaycagcggcttsgccgccagttaccacctgagccgggccccctgcccccctaaggtggtcctagtggagagcagtgagcgtctgggaggctggattcgctccgttcgaggccctaatggtgctatctttgagcttggacctyggggaattaggccagcgggagccctaggggcccggaccttgcycctggtttctgagcttggcttggattcagaagtgctgcctgtccggggagaccacccagctgcccagaacaggttcctctacgtgggcggtgccctgcmtgccctacccactggcctcagggggctactccgcccttcaccccccttctccaaacctctgttttgggctgggctgaggkagctgaccaagccccsgggcaaagagcctgwtgagactgtgcacagttttgcccagygccgccytggacctgagtcctagtctcacccttaagrtggcgtctctagccatggacagtctctgccgtggagtgtttgyaggcaacagccgtgagstcagcatcaggtcctgctttcccagtctcttcyaagctkagcaaacccatcgttccatatkactgggcctgctgctgggggcagggcggaccccacagccagactcagcactcattcgccaggccttggctgagcgctgragccagtggtcacttcgtggasgtctagagatgttgcctcaggcccttgaaacccacctgactagtaggggggtcagtgttctcagaggccagcsggtctgtgggctcagcctccaggcagaagggcgctrgaaggtatctctaagggacagcagtctggaggctgaccacgttattagtgccattccagcttcartgctcagtgagctgcyccctgctgaggctgcccctctggctcrtgccctgagtgccatcactgcagtgtctgtagctgtggtgaatctgcagtaccaaggagcccatctgcctgtccagggatttggacatttggkgccatcttcagaagatccaggagtcctgggaatcgtgtrtgmcycagttgctttccctgagcaggacgggagcccccctggcctcagagtgactgtgatgctgggaggttcctgrttayagacactggaggctagtggctgtgtcttatctcaggagctgtttcaacagcgggcccaggaagcagctgctacacaattmggactgaaggagatgccgagccactgcttggtccatctacacaagaactgcattccccagtatacactaggtcactggcaaaaactagagtcasctaggyaattcctgactgctcacaggttgccccygactctggctrgagccycctatgagrkagttgctgttaatgactgtatagagagtgggcgccaggcagcagtcagtgtcctgggcacagaacctaacagctgatccccaactctcattcatgaaaataaaaattgctggagcttggctt

SEQ ID NO: 1210 - DNA, 1840 bp, Homo sapiens
taggcgcgtgccgcgagaacagagtggacggagmgtaggagagaccgaaaaggctgggggtgggagtagcggatttgaagcacttgttggcctacagaggtgtggcaagcagagcacctcagaactcaggcgtactgcccgccgcccgagccstgcgagggccgatagcgagggtgtggcccttatctgcacccagcagagcgccggcggggtacggtcttaggacctcgatctccttctccctcattttctctcatccctacctattgtgggtttccgcaysggccggaccgtggtcgtgctgggcggargcaycagcggcttsgccgccagttaccacctgagccgggccccctgcccccctaaggtggtcctagtggagagcagtgagcgtctgggaggctggattcgctccgttcgaggccctaatggtgctatctttgagcttggacctyggggaattaggccagcgggagccctaggggcccggaccttgcycctggtttctgagcttggcttggattcagaagtgctgcctgtccggggagaccacccagctgcccagaacaggttcctctacgtgggcggtgccctgcmtgccctacccactggcctcagggggctactccgcccttcaccccccttctccaaacctctgttttgggctgggctgaggkagctgaccaagccccsgggcaaagagcctgwtgagactgtgcacagttttgcccagygccgccytggacctgagrtggcgtctctagccatggacagtctctgccgtggagtgtttgyaggcaacagccgtgagstcagcatcaggtcctgctttcccagtctcttcyaagctkagcaaacccatcgttccatatkactgggcctgctgctgggggcagggcggaccccacagccagactcagcactcattcgccaggccttggctgagcgctgragccagtggtcacttcgtggasgtctagagatgttgcctcaggcccttgaaacccacctgactagtaggggggtcagtgttctcagaggccagcsggtctgtgggctcagcctccaggcagaagggcgctrgaaggtatctctaagggacagcagtctggaggctgaccacgttattagtgccattccagcttcartgctcagtgagctgcyccctgctgaggctgcccctctggctcrtgccctgagtgccatcactgcagtgtctgtagctgtggtgaatctgcagtaccaaggagcccatctgcctgtccagggatttggacatttggkgccatcttcagaagatccaggagtcctgggaatcgtgtrtgmcycagttgctttccctgagcaggacgggagcccccctggcctcagagtgactgtgatgctgggaggttcctgrttayagacactggaggctagtggctgtgtcttatctcaggagctgtttcaacagcgggcccaggaagcagctgctacacaattmggactgaaggagatgccgagccactgcttggtccatctacacaagaactgcattccccagtatacactaggtcactggcaaaaactaggtaagttgggaaaacagctgggctgaggagggccaaggacatcagacccccagctaaaacattcctttcatcctttccttccagagtcasctaggyaattcctgactgctcacaggttgccccygactctggctrgagccycctatgagrkagttgctgttaatgactgtatagagagtgggcgccaggcagcagtcagtgtcctgggcacagaacctaacagctgatccccaactctcattcatgaaaataaaaattgctggagcttg

SEQ ID NO: 1211 - DNA, 1644 bp, Homo sapiens
taggcgcgtgccgcgagaacagagtggacggagmgtaggagagaccgaaaaggctgggggtgggagtagcggatttgaagcacttgttggcctacagaggtgtggcaagcagagcacctcagaactcaggcgtactgcccgccgcccgagccstgcgagggccgatagcgagggtgtggcccttatctgcacccagcagagcgccggcggggtacggtcttaggacctcgatctccttctccctcattttctctcatccctacctattgtgggtttccgcaysggccggaccgtggtcgtgctgggcggargcaycagcggcttsgccgccagttaccacctgagccgggccccctgcccccctaaggtggtcctagtggagagcagtgagcgtctgggaggctggattcgctccgttcgaggccctaatggtgctatctttgagcttggacctyggggaattaggccagcgggagccctaggggcccggaccttgcycctgggggctactccgcccttcaccccccttctccaaacctctgttttgggctgggctgaggkagctgaccaagccccsgggcaaagagcctgwtgagactgtgcacagttttgcccagygccgccytggacctgagrtggcgtctctagccatggacagtctctgccgtggagtgtttgyaggcaacagccgtgagstcagcatcaggtcctgctttcccagtctcttcyaagctkagcaaacccatcgttccatatkactgggcctgctgctgggggcagggcggaccccacagccagactcagcactcattcgccaggccttggctgagcgctgragccagtggtcacttcgtggasgtctagagatgttgcctcaggcccttgaaacccacctgactagtaggggggtcagtgttctcagaggccagcsggtctgtgggctcagcctccaggcagaagggcgctrgaaggtatctctaagggacagcagtctggaggctgaccacgttattagtgccattccagcttcartgctcagtgagctgcyccctgctgaggctgcccctctggctcrtgccctgagtgccatcactgcagtgtctgtagctgtggtgaatctgcagtaccaaggagcccatctgcctgtccagggatttggacatttggkgccatcttcagaagatccaggagtcctgggaatcgtgtrtgmcycagttgctttccctgagcaggacgggagcccccctggcctcagagtgactgtgatgctgggaggttcctgrttayagacactggaggctagtggctgtgtcttatctcaggagctgtttcaacagcgggcccaggaagcagctgctacacaattmggactgaaggagatgccgagccactgcttggtccatctacacaagaactgcattccccagtatacactaggtcactggcaaaaactagagtcasctaggyaattcctgactgctcacaggttgccccygactctggctrgagccycctatgagrkagttgctgttaatgactgtatagagagtgggcgccaggcagcagtcagtgtcctgggcacagaacctaacagctgatccccaactctcattcatgaaaataaaaattgctggagcttggctt

SEQ ID NO: 1212 - DNA, 1760 bp, Homo sapiens
taggcgcgtgccgcgagaacagagtggacggagmgtaggagagaccgaaaaggctgggggtgggagtagcggatttgaagcacttgttggcctacagaggtgtggcaagcagagcacctcagaactcaggcgtactgcccgccgcccgagccstgcgagggccgatagcgagggtgtggcccttatctgcacccagcagagcgccggcggggtacggtcttaggacctcgatctccttctccctcattttctctcatccctacctattgtgggtttccgcaysggccggaccgtggtcgtgctgggcggargcaycagcggcttsgccgccagttaccacctgagccgggccccctgcccccctaaggtggtcctagtggagagcagtgagcgtctgggaggctggattcgctccgttcgaggccctaatggtgctatctttgagcttggacctyggggaattaggccagcgggagccctaggggcccggaccttgcycctggtttctgagcttggcttggattcagaagtgctgcctgtccggggagaccacccagctgcccagaacaggttcctctacgtgggcggtgccctgcmtgccctacccactggcctcagggggctactccgcccttcaccccccttctccaaacctctgttttgggctgggctgaggkagctgaccaagccccsgggcaaagagcctgwtgagactgtgcacagttttgcccagygccgccytggacctgagrtggcgtctctagccatggacagtctctgccgtggagtgtttgyaggcaacagccgtgagstcagcatcaggtcctgctttcccagtctcttcyaagctkagcaaacccatcgttccatatkactgggcctgctgctgggggcagggcggaccccacagccagactcagcactcattcgccaggccttggctgagcgctgragccagtggtcacttcgtggasgtctagagatgttgcctcaggcccttgaaacccacctgactagtaggggggtcagtgttctcagaggccagcsggtctgtgggctcagcctccaggcagaagggcgctrgaaggtatctctaagggacagcagtctggaggctgaccacgttattagtgccattccagcttcartgctcagtgagctgcyccctgctgaggctgcccctctggctcrtgccctgagtgccatcactgcagtgtctgtagctgtggtgaatctgcagtaccaaggagcccatctgcctgtccagggatttggacatttggkgccatcttcagaagatccaggagtcctgggaatcgtgtrtgmcycagttgctttccctgagcaggacgggagcccccctggcctcagagtgactgtgatgctgggaggttcctgrttayagacactggaggctagtggctgtgtcttatctcaggagctgtttcaacagcgggcccaggaagcagctgctacacaattmggactgaaggagatgccgagccactgcttggtccatctacacaagaactgcattccccagtatacactaggtcactggcaaaaactagagtcasctaggyaattcctgactgctcacaggttgccccygactctggctrgagccycctatgagrkagttgctgttaatgactgtatagagagtgggcgccaggcagcagtcagtgtcctgggcacagaacctaacagctgatccccaactctcattcatgaaaataaaaattgctggagcttggctt

SEQ ID NO: 1213 - DNA, 1779 bp, Homo sapiens
taggcgcgtgccgcgagaacagagtggacggagmgtaggagagaccgaaaaggctgggggtgggagtagcggatttgaagcacttgttggcctacagaggtgtggcaagcagagcacctcagaactcaggcgtactgcccgccgcccgagccstgcgagggccgatagcgagggtgtggcccttatctgcacccagcagagcgccggcggggtacggtcttaggacctcgatctccttctccctcattttctctcatccctacctattgtgggtttccgcaysggccggaccgtggtcgtgctgggcggargcaycagcggcttsgccgccagttaccacctgagccgggccccctgcccccctaaggtggtcctagtggagagcagtgagcgtctgggaggctggattcgctccgttcgaggccctaatggtgctatctttgagcttggacctyggggaattaggccagcgggagccctaggggcccggaccttgcycctggtttctgagcttggcttggattcagaagtgctgcctgtccggggagaccacccagctgcccagaacaggttcctctacgtgggcggtgccctgcmtgccctacccactggcctcagggggctactccgcccttcaccccccttctccaaacctctgttttgggctgggctgaggkagctgaccaagccccsgggcaaagagcctgwtgagactgtgcacagttttgcccagygccgccytggacctgagtcctagtctcacccttaagrtggcgtctctagccatggacagtctctgccgtggagtgtttgyaggcaacagccgtgagstcagcatcaggtcctgctttcccagtctcttcyaagctkagcaaacccatcgttccatatkactgggcctgctgctgggggcagggcggaccccacagccagactcagcactcattcgccaggccttggctgagcgctgragccagtggtcacttcgtggasgtctagagatgttgcctcaggcccttgaaacccacctgactagtaggggggtcagtgttctcagaggccagcsggtctgtgggctcagcctccaggcagaagggcgctrgaaggtatctctaagggacagcagtctggaggctgaccacgttattagtgccattccagcttcartgctcagtgagctgcyccctgctgaggctgcccctctggctcrtgccctgagtgccatcactgcagtgtctgtagctgtggtgaatctgcagtaccaaggagcccatctgcctgtccagggatttggacatttggkgccatcttcagaagatccaggagtcctgggaatcgtgtrtgmcycagttgctttccctgagcaggacgggagcccccctggcctcagagtgactgtgatgctgggaggttcctgrttayagacactggaggctagtggctgtgtcttatctcaggagctgtttcaacagcgggcccaggaagcagctgctacacaattmggactgaaggagatgccgagccactgcttggtccatctacacaagaactgcattccccagtatacactaggtcactggcaaaaactagagtcasctaggyaattcctgactgctcacaggttgccccygactctggctrgagccycctatgagrkagttgctgttaatgactgtatagagagtgggcgccaggcagcagtcagtgtcctgggcacagaacctaacagctgatccccaactctcattcatgaaaataaaaattgctggagcttggctt

SEQ ID NO: 1214 - DNA, 1558 bp, Homo sapiens
tcctggcccctggacggggacctcgctgttccaccagcccatccgtgcacacttagtttcccctaaagcagtttccgcaysggccggaccgtggtcgtgctgggcggargcaycagcggcttsgccgccagttaccacctgagccgggccccctgcccccctaaggtggtcctagtggagagcagtgagcgtctgggaggctggattcgctccgttcgaggccctaatggtgctatctttgagcttggacctyggggaattaggccagcgggagccctaggggcccggaccttgcycctggtttctgagcttggcttggattcagaagtgctgcctgtccggggagaccacccagctgcccagaacaggttcctctacgtgggcggtgccctgcmtgccctacccactggcctcagggggctactccgcccttcaccccccttctccaaacctctgttttgggctgggctgaggkagctgaccaagccccsgggcaaagagcctgwtgagactgtgcacagttttgcccagygccgccytggacctgagrtggcgtctctagccatggacagtctctgccgtggagtgtttgyaggcaacagccgtgagstcagcatcaggtcctgctttcccagtctcttcyaagctkagcaaacccatcgttccatatkactgggcctgctgctgggggcagggcggaccccacagccagactcagcactcattcgccaggccttggctgagcgctgragccagtggtcacttcgtggasgtctagagatgttgcctcaggcccttgaaacccacctgactagtaggggggtcagtgttctcagaggccagcsggtctgtgggctcagcctccaggcagaagggcgctrgaaggtatctctaagggacagcagtctggaggctgaccacgttattagtgccattccagcttcartgctcagtgagctgcyccctgctgaggctgcccctctggctcrtgccctgagtgccatcactgcagtgtctgtagctgtggtgaatctgcagtaccaaggagcccatctgcctgtccagggatttggacatttggkgccatcttcagaagatccaggagtcctgggaatcgtgtrtgmcycagttgctttccctgagcaggacgggagcccccctggcctcagagtgactgtgatgctgggaggttcctgrttayagacactggaggctagtggctgtgtcttatctcaggagctgtttcaacagcgggcccaggaagcagctgctacacaattmggactgaaggagatgccgagccactgcttggtccatctacacaagaactgcattccccagtatacactaggtcactggcaaaaactagagtcasctaggyaattcctgactgctcacaggttgccccygactctggctrgagccycctatgagrkagttgctgttaatgactgtatagagagtgggcgccaggcagcagtcagtgtcctgggcacagaacctaacagctgatccccaactctcattcatgaaaataaaaattgctggagcttggctt

SEQ ID NO: 1215 - DNA, 2440 bp, Homo sapiens
caatgtttcattgttttattaactaatcgcyttttatttccaggcctgcgggatacaacgggaatacaaaaatgcgctagagcggtccgcaacgctgtagcctgcgtaaggaacaattgatactaagtggcactaggctgcagggggtgccactgacacactgggagagggctcagccaaccacaaggtgataacgaggtcagcggagcaccagaaaccggctcactagcctcctgatcagtctcggcccagaggaaaatgaagggcttgagcttctgcttttacaaatctgaggggcaggaaatgaaatcccactagcagtctgcgtagtggagttgaaccctagcacccgctccccagggggtcgcctacaacgcgttccaggtgggcaggctcaggcgctgctccctcacaagcccccggccacgcggtgtctgggaccgggtgcctagtcagcccgggtggctccgccccgaggccccgccccatgacgcgagaccccgcccccgcagcgcccgcttccaagatggcggcagcgatgcctgcccggctgttggggtggcggtgacgacaggcagcaaaagaccagctggtcccagattcgctgctggagtgctggatggagcctttctctgccctctgtgacatttccaattttagataatgcctcacatctctgtccccccgggaccccctggagcccccatgatccctaagaagacagcttgaacctagatctcacccccaggatgttgcggaggctgctggagcggccttgcacgctggccctgcttgtgggctcccagctggctgtcatgatgtacctgtcactggggggcttccgaagtctcagtgccctatttggccgagatcagggaccgacatttgactattctcaccctcgtgatgtctacagtaacctcagtcacctgcctggggccccagggggtcctccagctcctcaaggtctgccctactgtccagaacgatctcctctcttagtgggtcctgtgtcrgtgtcctttagcccagtgccatcactggcagagattgtggagcggaatccccgggtagaaccagggggccggtaccgccctgcaggttgtgagccccgctcccgaacagccatcattgtgcctcatcgtgcccgggagcaccacctgcgcctgctgctctaccacctgcaccccttcttgcagcgccagcagcttgcttatggcatctatgtcatccaccaggctggaaatggaacatttaacagggcaaaactgttgaaygttggggtgcgagaggccctgcgtgatgaagagtgggactgcctgttcttgcacgatgtggacctcttgccagaaaatgaccacaatctgtatgtgtgtgacccccggggaccccgccatgttgccgttgctatgaacaagtttggatacagcctcccgtacccccagtacttcggaggagtctcagcacttactcctgaccagtacctgaagatgaatggcttccccaatgaatactggggctggggtggtgaggatgacgacattgctaccagggtgcgcctggctgggatgaagatctctcggccccccacatctgtaggacactataagatggtgaagcaccgaggagataagggcaatgaggaaaatccccacagatttgacctcctggtccgtacccagaattcctggacgcaagatgggatgaactcactgacataccagttgctggctcgagagctggggcctctttataccaacatcacagcagacattgggactgaccctcggggtcctcgggctccttctgggccacgttacccacctggttcctcccaagccttccgtcaagagatgctgcaacgccggcccccagccaggcctgggcctctatctactgccaaccacacagccctccgaggttcacactgactcctccttcctgtctaccttaatcatgaaaccgaattcatggggttgtattctccccaccctcagctcctcactgttctcagagggatgtgagggaactgaactctggtgccgtgctagggggtaggggcctctccctcactgctggactggagctgggctcctgtagacctsaggggtccctctctctagggtctcctgtagggcttatgactgygaatccttgatgtcatgattttatgtgacgattcctaggagtccctgcccctagagtaggagcagggctggaccccaagcccctccctcttccatggagagaagagtgatctggcttctcctcggacctctgtgaatatttattctatttatggttcccgggaagttgtttggtgaaggaagcccctccctgggcattttctgcctatgctggaatagctccctcttctggtcctggctcagggggctgggattttgatatattttctaataaaggactttgtctcgcatct

SEQ ID NO: 1216 - DNA, 1878 bp, Homo sapiens
cgcagcgcccgcttccaagatggcggcagcgatgcctgcccggctgttggggtggcggtgacgacaggcagcaaaagaccagataatgcctcacatctctgtccccccgggaccccctggagcccccatgatccctaagaagacagcttgaacctagaattcccctctccctccctagatctcacccccaggatgttgcggaggctgctggagcggccttgcacgctggccctgcttgtgggctcccagctggctgtcatgatgtacctgtcactggggggcttccgaagtctcagtgccctatttggccgagatcagggaccgacatttgactattctcaccctcgtgatgtctacagtaacctcagtcacctgcctggggccccagggggtcctccagctcctcaaggtctgccctactgtccagaacgatctcctctcttagtgggtcctgtgtcrgtgtcctttagcccagtgccatcactggcagagattgtggagcggaatccccgggtagaaccagggggccggtaccgccctgcaggttgtgagccccgctcccgaacagccatcattgtgcctcatcgtgcccgggagcaccacctgcgcctgctgctctaccacctgcaccccttcttgcagcgccagcagcttgcttatggcatctatgtcatccaccaggctggaaatggaacatttaacagggcaaaactgttgaaygttggggtgcgagaggccctgcgtgatgaagagtgggactgcctgttcttgcacgatgtggacctcttgccagaaaatgaccacaatctgtatgtgtgtgacccccggggaccccgccatgttgccgttgctatgaacaagtttggatacagcctcccgtacccccagtacttcggaggagtctcagcacttactcctgaccagtacctgaagatgaatggcttccccaatgaatactggggctggggtggtgaggatgacgacattgctaccagggtgcgcctggctgggatgaagatctctcggccccccacatctgtaggacactataagatggtgaagcaccgaggagataagggcaatgaggaaaatccccacagatttgacctcctggtccgtacccagaattcctggacgcaagatgggatgaactcactgacataccagttgctggctcgagagctggggcctctttataccaacatcacagcagacattgggactgaccctcggggtcctcgggctccttctgggccacgttacccacctggttcctcccaagccttccgtcaagagatgctgcaacgccggcccccagccaggcctgggcctctatctactgccaaccacacagccctccgaggttcacactgactcctccttcctgtctaccttaatcatgaaaccgaattcatggggttgtattctccccaccctcagctcctcactgttctcagagggatgtgagggaactgaactctggtgccgtgctagggggtaggggcctctccctcactgctggactggagctgggctcctgtagacctsaggggtccctctctctagggtctcctgtagggcttatgactgygaatccttgatgtcatgattttatgtgacgattcctaggagtccctgcccctagagtaggagcagggctggaccccaagcccctccctcttccatggagagaagagtgatctggcttctcctcggacctctgtgaatatttattctatttatggttcccgggaagttgtttggtgaaggaagcccctccctgggcattttctgcctatgctggaatagctccctcttctggtcctggctcagggggctgggattttgatatattttctaataaaggactttgtctcg

SEQ ID NO: 1217 - DNA, 2245 bp, Homo sapiens
ctagtcagcccgggtggctccgccccgaggccccgccccatgacgcgagaccccgcccccgcagcgcccgcttccaagatggcggcagcgatgcctgcccggctgttggggtggcggtgacgacaggcagcaaaagaccaggtatgtgcgctgggaatgcgtcgacacggaggcctgggataaaggtttgggcattcgagagagtgagaagttttgggtaacgcctggagacgagcctgagcagggacggggtcctaggtggaagtatggacgggggccgggcgggctcacgttgctagtaggtagggcaaaagcaagagactgggataggatgggcgtgctccgaaagagctgggttttaaccccctccacagcgcggaccacgcccctctagctggtcccagattcgctgctggagtgctggatggagcctttctctgccctctgtgacatttccaattttagataatgcctcacatctctgtccccccgggaccccctggagcccccatgatccctaagaagacagcttgaacctagatctcacccccaggatgttgcggaggctgctggagcggccttgcacgctggccctgcttgtgggctcccagctggctgtcatgatgtacctgtcactggggggcttccgaagtctcagtgccctatttggccgagatcagggaccgacatttgactattctcaccctcgtgatgtctacagtaacctcagtcacctgcctggggccccagggggtcctccagctcctcaaggtctgccctactgtccagaacgatctcctctcttagtgggtcctgtgtcrgtgtcctttagcccagtgccatcactggcagagattgtggagcggaatccccgggtagaaccagggggccggtaccgccctgcaggttgtgagccccgctcccgaacagccatcattgtgcctcatcgtgcccgggagcaccacctgcgcctgctgctctaccacctgcaccccttcttgcagcgccagcagcttgcttatggcatctatgtcatccaccaggctggaaatggaacatttaacagggcaaaactgttgaaygttggggtgcgagaggccctgcgtgatgaagagtgggactgcctgttcttgcacgatgtggacctcttgccagaaaatgaccacaatctgtatgtgtgtgacccccggggaccccgccatgttgccgttgctatgaacaagtttggatacagcctcccgtacccccagtacttcggaggagtctcagcacttactcctgaccagtacctgaagatgaatggcttccccaatgaatactggggctggggtggtgaggatgacgacattgctaccagggtgcgcctggctgggatgaagatctctcggccccccacatctgtaggacactataagatggtgaagcaccgaggagataagggcaatgaggaaaatccccacagatttgacctcctggtccgtacccagaattcctggacgcaagatgggatgaactcactgacataccagttgctggctcgagagctggggcctctttataccaacatcacagcagacattgggactgaccctcggggtcctcgggctccttctgggccacgttacccacctggttcctcccaagccttccgtcaagagatgctgcaacgccggcccccagccaggcctgggcctctatctactgccaaccacacagccctccgaggttcacactgactcctccttcctgtctaccttaatcatgaaaccgaattcatggggttgtattctccccaccctcagctcctcactgttctcagagggatgtgagggaactgaactctggtgccgtgctagggggtaggggcctctccctcactgctggactggagctgggctcctgtagacctsaggggtccctctctctagggtctcctgtagggcttatgactgygaatccttgatgtcatgattttatgtgacgattcctaggagtccctgcccctagagtaggagcagggctggaccccaagcccctccctcttccatggagagaagagtgatctggcttctcctcggacctctgtgaatatttattctatttatggttcccgggaagttgtttggtgaaggaagcccctccctgggcattttctgcctatgctggaatagctccctcttctggtcctggctcagggggctgggattttgatatattttctaataaaggactttgtctcgcatct

SEQ ID NO: 1218 - DNA, 2254 bp, Homo sapiens
ctagtcagcccgggtggctccgccccgaggccccgccccatgacgcgagaccccgcccccgcagcgcccgcttccaagatggcggcagcgatgcctgcccggctgttggggtggcggtgacgacaggcagcaaaagaccaggtatgtgcgctgggaatgcgtcgacacggaggcctgggataaaggtttgggcattcgagagagtgagaagttttgggtaacgcctggagacgagcctgagcagggacggggtcctaggtggaagtatggacgggggccgggcgggctcacgttgctagtaggtagggcaaaagcaagagactgggataggatgggcgtgctccgaaagagctgggttttaaccccctccacagcgcggaccacgcccctctagctggtcccagattcgctgctggagtgctggatggagcctttctctgccctctgtgacatttccaattttagataatgcctcacatctctgtccccccgggaccccctggagcccccatgatccctaagaagacagcttgaacctagaattcccctctccctccctagatctcacccccaggatgttgcggaggctgctggagcggccttgcacgctggccctgcttgtgggctcccagctggctgtcatgatgtacctgtcactggggggcttccgaagtctcagtgccctatttggccgagatcagggaccgacatttgactattctcaccctcgtgatgtctacagtaacctcagtcacctgcctggggccccagggggtcctccagctcctcaaggtctgccctactgtccagaacgatctcctctcttagtgggtcctgtgtcrgtgtcctttagcccagtgccatcactggcagagattgtggagcggaatccccgggtagaaccagggggccggtaccgccctgcaggttgtgagccccgctcccgaacagccatcattgtgcctcatcgtgcccgggagcaccacctgcgcctgctgctctaccacctgcaccccttcttgcagcgccagcagcttgcttatggcatctatgtcatccaccaggctggaaatggaacatttaacagggcaaaactgttgaaygttggggtgcgagaggccctgcgtgatgaagagtgggactgcctgttcttgcacgatgtggacctcttgccagaaaatgaccacaatctgtatgtgtgtgacccccggggaccccgccatgttgccgttgctatgaacaagtttggatacagcctcccgtacccccagtacttcggaggagtctcagcacttactcctgaccagtacctgaagatgaatggcttccccaatgaatactggggctggggtggtgaggatgacgacattgctaccagggtgcgcctggctgggatgaagatctctcggccccccacatctgtaggacactataagatggtgaagcaccgaggagataagggcaatgaggaaaatccccacagatttgacctcctggtccgtacccagaattcctggacgcaagatgggatgaactcactgacataccagttgctggctcgagagctggggcctctttataccaacatcacagcagacattgggactgaccctcggggtcctcgggctccttctgggccacgttacccacctggttcctcccaagccttccgtcaagagatgctgcaacgccggcccccagccaggcctgggcctctatctactgccaaccacacagccctccgaggttcacactgactcctccttcctgtctaccttaatcatgaaaccgaattcatggggttgtattctccccaccctcagctcctcactgttctcagagggatgtgagggaactgaactctggtgccgtgctagggggtaggggcctctccctcactgctggactggagctgggctcctgtagacctsaggggtccctctctctagggtctcctgtagggcttatgactgygaatccttgatgtcatgattttatgtgacgattcctaggagtccctgcccctagagtaggagcagggctggaccccaagcccctccctcttccatggagagaagagtgatctggcttctcctcggacctctgtgaatatttattctatttatggttcccgggaagttgtttggtgaaggaagcccctccctgggcattttctgcctatgctggaatagctccctcttctggtcctggctcagggggctgggattttgatatattttctaataaaggactt

SEQ ID NO: 1219 - DNA, 2075 bp, Homo sapiens
atgagcaagagggttggcatcatcggagctggagtcagtggcttggctgccatatggtgctgtctggaggaggggctggagcccacttgctttgaaaggagcgatgatgttggaggcctgtggaaattctcagaccacacagaagaaggcagagccagcatttaccagtctgtattcacaaactcttccaaagaaatgatgtgctttccagacttcccttatccggatgattacccaaactatatacaccacagcaagctccaggaatatataaagacatatgctcaaaagaaggatcttttaagatacatayaaattataaatggaaaaataaattttctrgttttcttaaagaccctggtttccggtataaagaaatgtcccagcttcttagtcacgggccaatgggttrttgttactgaaaargatgggaaacaggaatctactatttttgatgctgtaatgatttgttcaggacatcacgtataccccaatctgccaackgattcctttcctggcctggaccagtttcgaggcaactacctccatagccgggattataagaatccagaagccttcaaggggaagagggtcctcgtgattggtctggggaattcgggatctgacattgctgttgagctcagccgtctggctacacaggtcattatcagtaccagaagtgcttcctgggtcatgagtcgggtctgggatgatggctatccttgggatatgatgtatgttacccgctttgcatcctttctccggaatgtccttccttcattcatctctgactggttatatrtccagaagatgaacacgtggtttaagcatgagaactatggcctgatgcctttaaatggttccctgagaaaagagcctgtgttcaatgatgagctcccatcccgcatcctgtgtggcactctgtccatcaagcccagtgtgaaggagttcacggaaacctcagctgtgtttgaggatgggaccrtgtttgaggctatcgactctgtcatctttgcawcaggctatgattattcctaccccttccttgatgagaccatcatgaaaagcagaaacaatgargttaccttgtttaaaggcatcttccccccactaatggagaagccaaccttggctgtgattggcttggttcagtcccttggagctgccatccccacagcagacctgcaagcctggtgggctgctaaagtatttgcaaactcatgtaccctgccaaccacgaatgaaatgatggatgacactgatgagaaaatggggaaaaaactcaagtgtatgttctcttctttcttcatgtttggccagagccagactttgcagacagattacatcacatatgtggatgagctgggctctttcataggggccaagcctaacataccatggctcttcctgacagatccccgcctggccctggaggtgtactttggcccttgcagcccataccagtttcgactgatgggaccagggaagtgggatggggccagaaatgccatcctgacccagtggaaccggacagtgaagccaaccaggacaagagttgtcagtgaagttcagcgaccccatcccttttacaatttgcttaaaatgctttcattcccattactccttctggctgttacacttacattttattaatgagaaagtctttgaggtctcaaaattcagcatagaagtgtaatcacacaatacaacacacacacacacacacatacacacacacaatcacaacatagttcctctctcctttcctgaagatatgaaaatcagtcttggcccatttgaattaaagtataagtaaaatggaaaatactcagcctctctctctctgttgggaatctgttctctaaaaggcttttcacatgctgaattggcaaatttggggatgcttaagataagacaggaagttgaataagcatgagcacagattttcaggctgaacaaagtttaacaaaatgtaaaggcattttattttgtccattatagtatattaaccaatgtatttttcatattaactgaagttattgacattaaatcaacatagagagataagtttatac

SEQ ID NO: 1220 - DNA, 2723 bp, Homo sapiens
aggaagtagggagagaggagttgggctgtgccggaggccgaggaccgagagggctcaggtgacccctggaaagcctgggtggctggaaaggagcctagcgcctgcatgaaaggaagaacctgctgggaagtacctgagctcgagctgtgggttccgccgcccttcccctgcgtggtggcttggtggccgcgtctgcgcctcagccctgagaatccggatggcggtgaggtggacttgggcaggcaagagctgcctgctgctggcgtttttaacagtggcctatatcttcgtggagctcttggtctctacttttcatgcctccgcaggagccggccgtgccagggagctggggtcaagaaggctctcagacctccagaaaaatacggaggatttgtctcgaccgctttataagaagccccctgcagattcccgtgcacttggggagtgggggaaagccagcaaactccagctcaacgaggatgaactgaagcagcaagaagaactcattgagagatacgccatcaatatttacctcagtgacaggatttccctgcatcgacacatagaggataaaagaatgtatgagtgtaagtcccagaagttcaactataggacacttcctaccacctctgttatcattgctttctataacgaagcctggtcgactttgctccgtaccattcacagtgttttagaaacttctcctgcagttcttttgaaagagatcatcttggtggatgacttgagtgacagagtttatttgaagacacaacttgaaacttacatcagcaatcttgatagagtacgcttgattaggaccaataagcgagaggggctggttagggcccgtctgattggggccactttcgccactggggacgtcctcactttcctggattgtcactgtgagtgtaattccggttggctggaaccgcttttggaaaggattgggagagatgaaacagcagttgtgtgtcctgttatagacacaattgattggaatacttttgaattctatatgcagayaggggagcccatgattggtgggtttgactggcgtttaacatttcagtggcattctgtccccaaacaggaaagggacaggcggatatcaagaattgaccccatcagatcacctaccatggctggaggactgtttgctgtcagcaagaaatattttcagtaccttggaacgtatgacacaggaatggaagtgtggggaggtgaaaaccttgagctgtcttttagggtgtggcagtgtggtggcaaattggagatccacccgtgttcccacgtgggccatgtgttccccaagcgggcaccatatgctcgccccaatttcctacagaatactgctcgggcagcagaagtttggatggatgaatacaaagagcacttctacaatagaaaccctccagcaagaaaagaagcttatggtgatatttctgaaagaaaattactacgagagcggttgagatgcaagagctttgactggtatttgaaaaaygtttttcctaatttacatgttccagaggatagaccaggctggcatggggctattcgcagtagagggatctcgtctgaatgtttagattataattctcctgacaacaaccccacaggtgctaacctttcactgtttggatgccatggtcaaggaggcaatcaattctttgaatatacttcaaacaaagaaataaggtttaattctgtgacagagttatgtgcagagrtacctgagcaaaaaaattatgtgggaatgcaaaattgtcccaaagatgggttccctgtaccagcaaacattatttggcattttaaagaagatggaactatttttcacccacactcaggactgtgtcttagtgcttatcggacaccrgagggccgacctgatgtacaaatgagaacttgtgatgctctagataaaaatcaaatttggagttttgagaaatagagcacaacagcactttcgtcatgagctgacagtagtgtcaagaaagtcaaagagccttaagagcctcagtgaagattgtattttattttatcaaaagccacctagcagtcatctgtggagcactggaaagctggggttcattttggtatatcacactgaaactgggtacccagagtgctgctgtttaatatttcacaatgccttacttattggttgttttatataagagttttgtcaatatggtctcttcttaaaagaagttgactatgaattgaaacacacaaaacatttaagtgccagacttaatattaaagaatgtaaaggtccaagtaaaatgaggtatgatttatgttgatgtgtaagttcaccgcacatcccactttttaacaaaactcatgaatgtgcagtttgagccattgctattttgattacatagaatttgtatttcttttttagccagcacattaaattttagattttattttttaatctaatttttttctaatcaaaaagaaaattgagcttaaggcaaaaggcctggttttagagatatgtgtaattggaagagggcatttgtttgagtgtgagtttggaggcctttttaacatgcagacatacccatatttaaatgaaatggggagatatttacattccgtacttygtaaacttgagctattggacttcactgatgtatatattaatacctcagattcctctgattttgtaagctgtcttctctgtgaacgtgtttgtgtgtgtagggcatttt

SEQ ID NO: 1221 - DNA, 2471 bp, Homo sapiens
ctctctctccttcctattttcattctatctcttttcctcactctctttttctcccccttgaaggcactgttactagaaatagagagctctggggcttgcctgaagccatgggcagtcaccactccaggattccccttttagcgcctcctccccatcttaatctcaaagtccagcaggatagtgagcagttagagcccggcctccaatctgcttccatgggggttggctttctgagtgggagaaatgactctaatctggagacatttgctgagacccttgtgcctggtcacttccgctcccaggatccttgagatgcatcctttcctgagcctaggtacttcccggacatcagtaaccaagctcagtcttcatacaaagcccagaatgcctccatgtgacttcatgcctgaaagataccagtcccttggctacaaccgtgtcctggaaatccacaaggaacatctttctcctgtggtgacggcatatttccagaaacccctgctgctccaccaggggcacatggagtggctctttgatgctgaaggaarcagatacctggatttcttttccgggattgttactgtcagtgttggccaytgccacccaaaggtgaatgcagtggcacaaaagcagctcsgccrcctgtggcatacaagcaccrtcttcttccaccctccaatgcatgaatatgcagagaagcttgccgcacttcttcctgagcctcttaaggtcattttcttggtgaacagtggctcagaagccaatgagctggccatgctgatggccagggcgcactcaaacaacatagacatcatttctttcagaggagcctaccatggatgcagtccttacacacttggcttgacaaacgtagggayctacaagatggaactccctggtgggacaggttgccaaccaacaatgtgtccagatgtttttcgtggcccttggggaggaagccactgtcgagattctccagtgcaaacaatcaggaagtgcagctgtgcaccagactgctgccaagctaaagatcagtatattgagcaattcaaagatacgctgagcacatctgtggccaagtcaattgctggatttttcgcagaacctattcaaggtgtgaatggagttgtccagtacccaaaggggtttctaaaggaagcctttgagctggtgcgagcaaggggaggcgtgtgcattgcagatgaagtgcaracaggatttggaaggttgggctctcacttctggggcttccaaacccacgatgtcctgcctgacattgtcaccatggctaaagggattgggaatggctttcccatggcagcagtcataaccactccagagattgccaaatctttggcgaaatgcctgcagcacttcaacacctttggagggaaccccatggcctgtgccattggatctgctgtgcttgaggtgattaaagaagaaaatctacaggaaaacagtcaagaagttgggacctacatgttactaaagtttgctaagctgcgggatgaatttgaaattgttggagacgtccgaggcaaaggyctcatgataggcatagaaatggtgcaggataagataagctgtcggcctcttccccgtgaagaagtaaatcagatccatgaggactgcaagcacatgggactcctcgttggcagaggcagcattttttctcagacatttcgcattgcgccctcaatgtgcatcactaaacsagaagttgattttgcaktagaagtatttcgttctgccttaacccaacacatggaaagaagagctaagtaacattgtcagaaataaataaaaccacaagtctcaagaatttgccacktatgttcaagggtgaatttgaagaatttcagaaccactggtatccagagaaagcctgcagctctccacaggagctgtaaaagtcatggttgactgcctaccaaccatatttgttagcagagcccctcttatcttgagaactccattcttcagggaaaggatctccctagctcagagaataaatcctaattagtttatgttaggtatggtaatttgattcccctttgcagtgattggtttatgcatgaatatgtgatgtatttttgtccagtgaatcttgaagaaaaatcttttggtggaggtgccttcagggaaagttttcttcaccctcactcttcagttcaagaagagatgtcttcttgttgcgctgagaacaccatatgttcatgacgagattcctggcaccatgtcagccggcttgtagtcatgaggacaaccctttttggtgaggttggaagatggatggaagccaagtgcttagtgatgtcaaagaagcactcacttaagcattcctggagccaccctacctcagggcctcttgatatttgaggtaataaattcattgttctgtataaggcttttttatttttcactgttacggtcaaaagcatactgagaaatgaggcagaaaatactcc

SEQ ID NO: 1222 - DNA, 2570 bp, Homo sapiens
ggcatctggagtagcactgagatcttccggtggcgggaactgcagtcatggatcatattacggtacccaaggtagaaaacgtgaaattggtggatcgttatgtgagtaagaaaccagctaatgggattctttatcttactgcaacccacctgatctatgtggaggcttcaggtgcagcccggaaagaaacatggattgcactccatcacattgccactgtggagaagttacccatcactagcctgggttgtcccctgaccctccgctgcaagaatttccgggtggcccactttgttttagattctgaccttgtgtgccatgaggtttatatttcactgctcaagctttctcagccagcattacctgaagatctttatgctttttcttataatcccaaatcctcaaaagagatgagggaaagtggatggaaactgattgacccaatatcagactttgggcgtatgggaatacccaacagaaactggaccataacagatgccaacagaaactatgagatatgcagcacctaccctcctgaaatagtggttcctaaatctgttaccttgggaacggtggttggaagttcaaagttcagaagtaaagaacgtgtccctgtgctctcctacctctacaaagagaacaatgctgccatttgccgctgtagccagcctctctctggattttacactcgctgtgtagatgatgagctcttgttggaggccattagccaaacaaacccagggagccagtttatgtatgttgtagacacaagaccaaagtatgccaacattcgcttcagattcatgggcattgagaacatccatgtaatgcggagcagtctgcagaaactcttggaagtttgtgaattgaaaactccaacaatgagtgaatttcttagcggcctggagagctcagggtggttaagacacattaaagctattatggatgctggaattttcattacaaaggcagtgaaggtagaaaaggccagtgtcttagtccattgttctgatggatgggaccgcacagcacaagtctgctcagtggctagcatcctcctagatccattttataggacattcaaaggactcatgatcttgatagagaaggaatggatatccatgggccacaagttttcccaaaggtgtggccacctcgatggggactctaaagaagtgtcccctatcttcacccagttcctagactgtatctggcaattaatggaacagtttccctgtgcctttgagtttaatgaaaacttcctgctggagattcatgaccatgttttctcctgccagtttggaaacttccttggtaactgccagaaggatcgggaagatctaagagtctatgagaaaacacattctgtgtggcctttcttggttcagaggaaaccagacttcaggaaccctctctayaaaggcttcactatgtatggggtactcaatcctagtactgtgccctacaacattcagttctggtgtgggatgtataaccgctttgacaaagggctgcagcccaagcagagtatgctagagagcctcctggaaattaagaaacagagagcaatgctggagacagatgtgcatgaactagaaaagaaactaaaagtccgtgatgagccaccagaagagatctgtacctgctctcaattaggaaacatattatcccagcatctgggaagtcctttgaccaatcctcttggctttatgggtatcaatggagacctgaataccctgatggagaatggcaccctatccagggaaggaggcctccgagctcagatggatcaagtaaaaagccagggtgcagacctccaccataactgttgtgagaytgtgggcagccttagggccataaatatctctggggatgtgggcatctctgaggccatgggcatctctggagacatgtgcacctttgaggctacrggcttctccaaagacttaggaatctgtggggccatggacatctctgaggccactggcatctctggaaacttgggtatttctgaggccaggggtttctctggggacatgggcatcttgggggacacaggcatctccaaggccagcaccaaggaggcagactactccaagcatcagtgagttagttactcatcttccatgctaggtatacctacagcagctacaatgattcttgtcccagagagggctatgctgcttttccaattggtttaagtgggtgaagccagggcacccctctccccacttaagtctggaagggaattactttactgattaagtgaccaatatgttcatattaagcagtacagagtgtaggcaagagaaagaatatgttattgttctaaaatgggatttaactatagaaatgttgcctctcagctgagacacatattaagctggttctactgtctgttttccttaatgatcgacctgccctattttctatcctcactgcagtaatgtgaaagtgaagtggaaatattgtcacaatggtcaataatgacccttttgagggtatggagagatggtatacagcaggtaactgtgaattgcagaataaattgaaagaaaattttactttca

SEQ ID NO: 1223 - DNA, 2624 bp, Homo sapiens
ggcatctggagtagcactgagatcttccggtggcgggaactgcagtcatggatcatattacggtacccaaggtagaaaacgtgaaattggtggatcgttatgtgagtaagaaaccagctaatgggattctttatcttactgcaacccacctgatctatgtggaggcttcaggtgcagcccggaaagaaacatggattgcactccatcacattgccactgtggagaagttacccatcactagcctgggttgtcccctgaccctccgctgcaagaatttccgggtggcccactttgttttagattctgaccttgtgtgccatgaggtttatatttcactgctcaagctttctcagccagcattacctgaagatctttatgctttttcttataatcccaaatcctcaaaagagatgagggaaagtggatggaaactgattgacccaatatcagactttgggcgtatgggaatacccaacagaaactggaccataacagatgccaacagaaactatgagatatgcagcacctaccctcctgaaatagtggttcctaaatctgttaccttgggaacggtggttggaagttcaaagttcagaagtaaagaacgtgtccctgtgctctcctacctctacaaagagaacaatgctgccatttgccgctgtagccagcctctctctggattttacactcgctgtgtagatgatgagctcttgttggaggccattagccaaacaaacccagggagccagtttatgtatgttgtagacacaagaccaaagttgaatgccatggccaaccgagcagctgggaaggggtatgaaaatgaagacaactatgccaacattcgcttcagattcatgggcattgagaacatccatgtaatgcggagcagtctgcagaaactcttggaagtttgtgaattgaaaactccaacaatgagtgaatttcttagcggcctggagagctcagggtggttaagacacattaaagctattatggatgctggaattttcattacaaaggcagtgaaggtagaaaaggccagtgtcttagtccattgttctgatggatgggaccgcacagcacaagtctgctcagtggctagcatcctcctagatccattttataggacattcaaaggactcatgatcttgatagagaaggaatggatatccatgggccacaagttttcccaaaggtgtggccacctcgatggggactctaaagaagtgtcccctatcttcacccagttcctagactgtatctggcaattaatggaacagtttccctgtgcctttgagtttaatgaaaacttcctgctggagattcatgaccatgttttctcctgccagtttggaaacttccttggtaactgccagaaggatcgggaagatctaagagtctatgagaaaacacattctgtgtggcctttcttggttcagaggaaaccagacttcaggaaccctctctayaaaggcttcactatgtatggggtactcaatcctagtactgtgccctacaacattcagttctggtgtgggatgtataaccgctttgacaaagggctgcagcccaagcagagtatgctagagagcctcctggaaattaagaaacagagagcaatgctggagacagatgtgcatgaactagaaaagaaactaaaagtccgtgatgagccaccagaagagatctgtacctgctctcaattaggaaacatattatcccagcatctgggaagtcctttgaccaatcctcttggctttatgggtatcaatggagacctgaataccctgatggagaatggcaccctatccagggaaggaggcctccgagctcagatggatcaagtaaaaagccagggtgcagacctccaccataactgttgtgagaytgtgggcagccttagggccataaatatctctggggatgtgggcatctctgaggccatgggcatctctggagacatgtgcacctttgaggctacrggcttctccaaagacttaggaatctgtggggccatggacatctctgaggccactggcatctctggaaacttgggtatttctgaggccaggggtttctctggggacatgggcatcttgggggacacaggcatctccaaggccagcaccaaggaggcagactactccaagcatcagtgagttagttactcatcttccatgctaggtatacctacagcagctacaatgattcttgtcccagagagggctatgctgcttttccaattggtttaagtgggtgaagccagggcacccctctccccacttaagtctggaagggaattactttactgattaagtgaccaatatgttcatattaagcagtacagagtgtaggcaagagaaagaatatgttattgttctaaaatgggatttaactatagaaatgttgcctctcagctgagacacatattaagctggttctactgtctgttttccttaatgatcgacctgccctattttctatcctcactgcagtaatgtgaaagtgaagtggaaatattgtcacaatggtcaataatgacccttttgagggtatggagagatggtatacagcaggtaactgtgaattgcagaataaattgaaagaaaattttactttca

SEQ ID NO: 1224 - DNA, 2292 bp, Homo sapiens
ctggagtagcactgagatcttccggtggcgggaactgcagtcatggatcatattacggtagaaaacgtgaaattggtggatcgttatgtgagtaagaaaccagctaatgggattctttatcttactgcaacccacctgatctatgtggaggcttcaggtgcagcccggaaagaaacatggattgcactccatcacattgccactgtggagaagttacccatcactagcctgggttgtcccctgaccctccgctgcaagaatttccgggtggcccactttgttttagattctgaccttgtgtgccatgaggtttatatttcactgctcaagctttctcagccagcattacctgaagatctttatgctttttcttataatcccaaatcctcaaaagagatgagggaaagtggatggaaactgattgacccaatatcagactttgggcgtatgggaatacccaacagaaactggaccataacagatgccaacagaaactatgagtatgccaacattcgcttcagattcatgggcattgagaacatccatgtaatgcggagcagtctgcagaaactcttggaagtttgtgaattgaaaactccaacaatgagtgaatttcttagcggcctggagagctcagggtggttaagacacattaaagctattatggatgctggaattttcattacaaaggcagtgaaggtagaaaaggccagtgtcttagtccattgttctgatggatgggaccgcacagcacaagtctgctcagtggctagcatcctcctagatccattttataggacattcaaaggactcatgatcttgatagagaaggaatggatatccatgggccacaagttttcccaaaggtgtggccacctcgatggggactctaaagaagtgtcccctatcttcacccagttcctagactgtatctggcaattaatggaacagtttccctgtgcctttgagtttaatgaaaacttcctgctggagattcatgaccatgttttctcctgccagtttggaaacttccttggtaactgccagaaggatcgggaagatctaagagtctatgagaaaacacattctgtgtggcctttcttggttcagaggaaaccagacttcaggaaccctctctayaaaggcttcactatgtatggggtactcaatcctagtactgtgccctacaacattcagttctggtgtgggatgtataaccgctttgacaaagggctgcagcccaagcagagtatgctagagagcctcctggaaattaagaaacagagagcaatgctggagacagatgtgcatgaactagaaaagaaactaaaagtccgtgatgagccaccagaagagatctgtacctgctctcaattaggaaacatattatcccagcatctgggaagtcctttgaccaatcctcttggctttatgggtatcaatggagacctgaataccctgatggagaatggcaccctatccagggaaggaggcctccgagctcagatggatcaagtaaaaagccagggtgcagacctccaccataactgttgtgagaytgtgggcagccttagggccataaatatctctggggatgtgggcatctctgaggccatgggcatctctggagacatgtgcacctttgaggctacrggcttctccaaagacttaggaatctgtggggccatggacatctctgaggccactggcatctctggaaacttgggtatttctgaggccaggggtttctctggggacatgggcatcttgggggacacaggcatctccaaggccagcaccaaggaggcagactactccaagcatcagtgagttagttactcatcttccatgctaggtatacctacagcagctacaatgattcttgtcccagagagggctatgctgcttttccaattggtttaagtgggtgaagccagggcacccctctccccacttaagtctggaagggaattactttactgattaagtgaccaatatgttcatattaagcagtacagagtgtaggcaagagaaagaatatgttattgttctaaaatgggatttaactatagaaatgttgcctctcagctgagacacatattaagctggttctactgtctgttttccttaatgatcgacctgccctattttctatcctcactgcagtaatgtgaaagtgaagtggaaatattgtcacaatggtcaataatgacccttttgagggtatggagagatggtatacagcaggtaactgtgaattgcagaataaattgaaagaaaattttactttca

SEQ ID NO: 1225 - DNA, 2556 bp, Homo sapiens
ctggagtagcactgagatcttccggtggcgggaactgcagtcatggatcatattacggtagaaaacgtgaaattggtggatcgttatgtgagtaagaaaccagctaatgggattctttatcttactgcaacccacctgatctatgtggaggcttcaggtgcagcccggaaagaaacatggattgcactccatcacattgccactgtggagaagttacccatcactagcctgggttgtcccctgaccctccgctgcaagaatttccgggtggcccactttgttttagattctgaccttgtgtgccatgaggtttatatttcactgctcaagctttctcagccagcattacctgaagatctttatgctttttcttataatcccaaatcctcaaaagagatgagggaaagtggatggaaactgattgacccaatatcagactttgggcgtatgggaatacccaacagaaactggaccataacagatgccaacagaaactatgagatatgcagcacctaccctcctgaaatagtggttcctaaatctgttaccttgggaacggtggttggaagttcaaagttcagaagtaaagaacgtgtccctgtgctctcctacctctacaaagagaacaatgctgccatttgccgctgtagccagcctctctctggattttacactcgctgtgtagatgatgagctcttgttggaggccattagccaaacaaacccagggagccagtttatgtatgttgtagacacaagaccaaagtatgccaacattcgcttcagattcatgggcattgagaacatccatgtaatgcggagcagtctgcagaaactcttggaagtttgtgaattgaaaactccaacaatgagtgaatttcttagcggcctggagagctcagggtggttaagacacattaaagctattatggatgctggaattttcattacaaaggcagtgaaggtagaaaaggccagtgtcttagtccattgttctgatggatgggaccgcacagcacaagtctgctcagtggctagcatcctcctagatccattttataggacattcaaaggactcatgatcttgatagagaaggaatggatatccatgggccacaagttttcccaaaggtgtggccacctcgatggggactctaaagaagtgtcccctatcttcacccagttcctagactgtatctggcaattaatggaacagtttccctgtgcctttgagtttaatgaaaacttcctgctggagattcatgaccatgttttctcctgccagtttggaaacttccttggtaactgccagaaggatcgggaagatctaagagtctatgagaaaacacattctgtgtggcctttcttggttcagaggaaaccagacttcaggaaccctctctayaaaggcttcactatgtatggggtactcaatcctagtactgtgccctacaacattcagttctggtgtgggatgtataaccgctttgacaaagggctgcagcccaagcagagtatgctagagagcctcctggaaattaagaaacagagagcaatgctggagacagatgtgcatgaactagaaaagaaactaaaagtccgtgatgagccaccagaagagatctgtacctgctctcaattaggaaacatattatcccagcatctgggaagtcctttgaccaatcctcttggctttatgggtatcaatggagacctgaataccctgatggagaatggcaccctatccagggaaggaggcctccgagctcagatggatcaagtaaaaagccagggtgcagacctccaccataactgttgtgagaytgtgggcagccttagggccataaatatctctggggatgtgggcatctctgaggccatgggcatctctggagacatgtgcacctttgaggctacrggcttctccaaagacttaggaatctgtggggccatggacatctctgaggccactggcatctctggaaacttgggtatttctgaggccaggggtttctctggggacatgggcatcttgggggacacaggcatctccaaggccagcaccaaggaggcagactactccaagcatcagtgagttagttactcatcttccatgctaggtatacctacagcagctacaatgattcttgtcccagagagggctatgctgcttttccaattggtttaagtgggtgaagccagggcacccctctccccacttaagtctggaagggaattactttactgattaagtgaccaatatgttcatattaagcagtacagagtgtaggcaagagaaagaatatgttattgttctaaaatgggatttaactatagaaatgttgcctctcagctgagacacatattaagctggttctactgtctgttttccttaatgatcgacctgccctattttctatcctcactgcagtaatgtgaaagtgaagtggaaatattgtcacaatggtcaataatgacccttttgagggtatggagagatggtatacagcaggtaactgtgaattgcagaataaattgaaagaaaattttactttca

SEQ ID NO: 1226 - DNA, 744 bp, Homo sapiens
tcgcccttacagcagagcgcctaaaaccgctacggtggctctgctggggacaaattattcacgtcccactgttctgcaaacccaatccgggaggtatgacctggctgggacagtttaggaagatggccacgaaggcacctgggggagtagatatatgtwtttgagaatgagaggagtaaatcgctggacgaccatgagcaggaagaaaattaggcctccacctcccaaccagtggccctgagttggcaacttagacagcgcgcgccagcgccaggagccccgccttgggggcgtggccgcgcgctggtcggctggggcggggcctgcttctggcctcatctagccccgccccaggcgagggcgccgcacccacaccgcgctgcgcagttttgttctgctccagctgttcgaaggtgatccagaygcaagatggctgtcctctctaaggaatatggttttgtgcttctaactkgtgctgccagctttataatggtggcccacctagccatcaatgtttcyaaggcccgcaagaagtacaaagtggagtggacacttccattaagattctcacacactcaatttctrttcttctattaagggaaatcttaaaaggatgtggtatttgatgactcttaggaaggctctatttccctacagtatctttgtaatgcatctgaaatccaccattgatgcttaacgtcaatgaaaagcacggagtttggcgcaaagctgcctctttccctt

SEQ ID NO: 1227 - DNA, 1512 bp, Homo sapiens
tcgcccttacagcagagcgcctaaaaccgctacggtggctctgctggggacaaattattcacgtcccactgttctgcaaacccaatccgggaggtatgacctggctgggacagtttaggaagatggccacgaaggcacctgggggagtagatatatgtwtttgagaatgagaggagtaaatcgctggacgaccatgagcaggaagaaaattaggcctccacctcccaaccagtggccctgagttggcaacttagacagcgcgcgccagcgccaggagccccgccttgggggcgtggccgcgcgctggtcggctggggcggggcctgcttctggcctcatctagccccgccccaggcgagggcgccgcacccacaccgcgctgcgcagttttgttctgctccagctgttcgaaggtgatccagaygcaagatggctgtcctctctaaggaatatggttttgtgcttctaactkgtgctgccagctttataatggtggcccacctagccatcaatgtttcyaaggcccgcaagaagtacaaagtggagtatcctatcatgtacagcacggacyctgaaaatgggcacatcttcaactgcattcagcgagcccaccagaacacgttggaagtgtatcctcccttcttattttttctagctgttggaggtgtttaccacccgcttctggcctgggcttggcctggattgttggacgagttctttatgcttatggctattacacgggagaacccagcaagcgtagtcgaggagccctggggtccatcgccctcctgggcttggtgggcacaactgtgtgctctgctttccagcatcttggttgggttaaaagtggcttgggcagtggacccaaatgctgccattaaagaattataggggtttaaaaactctcattcattttaaatgacttacctttatttccakttacattttttttytaaatataataaaaacttacctggcatcagcctcatacctaaaactcctgactcttaccactcatttccgtttgagtctgtatctgaaatcagtagcctagtcctactagatgagaaaggagccacaagtattgtgccctctcctcacccttccagcagatgcttctgtagtatgtgaggttgagaaaaagtctgattgtggtgatgtaggtatagtcatgccacagtgatgaaaaattaaagaaaaatcttctagctctcaggatatgcattatcacttgctacagatactccaaggccaaaggaatgcttgagcctaaaagatcaagaccagcctgggcaacatagcaaaaccccatctctacaaaaaaatatacaacagttagccaggcatgatggcacatgtctgcagtcccagctacttgggaggctraggtgggaggatcacttgagcccaggatgtcaaggctgcagtgagttatgatcacactgctgcactccagcgtgggtgacagagcaagaccctgtctcaaataaataaaaattaagtttctattaa

SEQ ID NO: 1228 - DNA, 1615 bp, Homo sapiens
tcgcccttacagcagagcgcctaaaaccgctacggtggctctgctggggacaaattattcacgtcccactgttctgcaaacccaatccgggaggtatgacctggctgggacagtttaggaagatggccacgaaggcacctgggggagtagatatatgtwtttgagaatgagaggagtaaatcgctggacgaccatgagcaggaagaaaattaggcctccacctcccaaccagtggccctgagttggcaacttagacagcgcgcgccagcgccaggagccccgccttgggggcgtggccgcgcgctggtcggctggggcggggcctgcttctggcctcatctagccccgccccaggcgagggcgccgcacccacaccgcgctgcgcagttttgttctgctccagctgttcgaaggtgatccagggacagatcttccatcctcctaacatayagttagcttccactctccaaatattccaccagcaacattgatgaatattgaagactatggactgtgagaygcaagatggctgtcctctctaaggaatatggttttgtgcttctaactkgtgctgccagctttataatggtggcccacctagccatcaatgtttcyaaggcccgcaagaagtacaaagtggagtatcctatcatgtacagcacggacyctgaaaatgggcacatcttcaactgcattcagcgagcccaccagaacacgttggaagtgtatcctcccttcttattttttctagctgttggaggtgtttaccacccgcgtatagcttctggcctgggcttggcctggattgttggacgagttctttatgcttatggctattacacgggagaacccagcaagcgtagtcgaggagccctggggtccatcgccctcctgggcttggtgggcacaactgtgtgctctgctttccagcatcttggttgggttaaaagtggcttgggcagtggacccaaatgctgccattaaagaattataggggtttaaaaactctcattcattttaaatgacttacctttatttccakttacattttttttytaaatataataaaaacttacctggcatcagcctcatacctaaaactcctgactcttaccactcatttccgtttgagtctgtatctgaaatcagtagcctagtcctactagatgagaaaggagccacaagtattgtgccctctcctcacccttccagcagatgcttctgtagtatgtgaggttgagaaaaagtctgattgtggtgatgtaggtatagtcatgccacagtgatgaaaaattaaagaaaaatcttctagctctcaggatatgcattatcacttgctacagatactccaaggccaaaggaatgcttgagcctaaaagatcaagaccagcctgggcaacatagcaaaaccccatctctacaaaaaaatatacaacagttagccaggcatgatggcacatgtctgcagtcccagctacttgggaggctraggtgggaggatcacttgagcccaggatgtcaaggctgcagtgagttatgatcacactgctgcactccagcgtgggtgacagagcaagaccctgtctcaaataaataaaaattaagtttctattaa

SEQ ID NO: 1229 - DNA, 1605 bp, Homo sapiens
tcgcccttacagcagagcgcctaaaaccgctacggtggctctgctggggacaaattattcacgtcccactgttctgcaaacccaatccgggaggtatgacctggctgggacagtttaggaagatggccacgaaggcacctgggggagtagatatatgtwtttgagaatgagaggagtaaatcgctggacgaccatgagcaggaagaaaattaggcctccacctcccaaccagtggccctgagttggcaacttagacagcgcgcgccagcgccaggagccccgccttgggggcgtggccgcgcgctggtcggctggggcggggcctgcttctggcctcatctagccccgccccaggcgagggcgccgcacccacaccgcgctgcgcagttttgttctgctccagctgttcgaaggtgatccagtaataaagcatcttgctccctaaggcttcacaccatgaaatagccacagtgctgggggccgtcccaacgtgttctttcttccacagaygcaagatggctgtcctctctaaggaatatggttttgtgcttctaactkgtgctgccagctttataatggtggcccacctagccatcaatgtttcyaaggcccgcaagaagtacaaagtggagtatcctatcatgtacagcacggacyctgaaaatgggcacatcttcaactgcattcagcgagcccaccagaacacgttggaagtgtatcctcccttcttattttttctagctgttggaggtgtttaccacccgcgtatagcttctggcctgggcttggcctggattgttggacgagttctttatgcttatggctattacacgggagaacccagcaagcgtagtcgaggagccctggggtccatcgccctcctgggcttggtgggcacaactgtgtgctctgctttccagcatcttggttgggttaaaagtggcttgggcagtggacccaaatgctgccattaaagaattataggggtttaaaaactctcattcattttaaatgacttacctttatttccakttacattttttttytaaatataataaaaacttacctggcatcagcctcatacctaaaactcctgactcttaccactcatttccgtttgagtctgtatctgaaatcagtagcctagtcctactagatgagaaaggagccacaagtattgtgccctctcctcacccttccagcagatgcttctgtagtatgtgaggttgagaaaaagtctgattgtggtgatgtaggtatagtcatgccacagtgatgaaaaattaaagaaaaatcttctagctctcaggatatgcattatcacttgctacagatactccaaggccaaaggaatgcttgagcctaaaagatcaagaccagcctgggcaacatagcaaaaccccatctctacaaaaaaatatacaacagttagccaggcatgatggcacatgtctgcagtcccagctacttgggaggctraggtgggaggatcacttgagcccaggatgtcaaggctgcagtgagttatgatcacactgctgcactccagcgtgggtgacagagcaagaccctgtctcaaataaataaaaattaagtttctattaa

SEQ ID NO: 1230 - DNA, 1519 bp, Homo sapiens
tcgcccttacagcagagcgcctaaaaccgctacggtggctctgctggggacaaattattcacgtcccactgttctgcaaacccaatccgggaggtatgacctggctgggacagtttaggaagatggccacgaaggcacctgggggagtagatatatgtwtttgagaatgagaggagtaaatcgctggacgaccatgagcaggaagaaaattaggcctccacctcccaaccagtggccctgagttggcaacttagacagcgcgcgccagcgccaggagccccgccttgggggcgtggccgcgcgctggtcggctggggcggggcctgcttctggcctcatctagccccgccccaggcgagggcgccgcacccacaccgcgctgcgcagttttgttctgctccagctgttcgaaggtgatccagaygcaagatggctgtcctctctaaggaatatggttttgtgcttctaactkgtgctgccagctttataatggtggcccacctagccatcaatgtttcyaaggcccgcaagaagtacaaagtggagtatcctatcatgtacagcacggacyctgaaaatgggcacatcttcaactgcattcagcgagcccaccagaacacgttggaagtgtatcctcccttcttattttttctagctgttggaggtgtttaccacccgcgtatagcttctggcctgggcttggcctggattgttggacgagttctttatgcttatggctattacacgggagaacccagcaagcgtagtcgaggagccctggggtccatcgccctcctgggcttggtgggcacaactgtgtgctctgctttccagcatcttggttgggttaaaagtggcttgggcagtggacccaaatgctgccattaaagaattataggggtttaaaaactctcattcattttaaatgacttacctttatttccakttacattttttttytaaatataataaaaacttacctggcatcagcctcatacctaaaactcctgactcttaccactcatttccgtttgagtctgtatctgaaatcagtagcctagtcctactagatgagaaaggagccacaagtattgtgccctctcctcacccttccagcagatgcttctgtagtatgtgaggttgagaaaaagtctgattgtggtgatgtaggtatagtcatgccacagtgatgaaaaattaaagaaaaatcttctagctctcaggatatgcattatcacttgctacagatactccaaggccaaaggaatgcttgagcctaaaagatcaagaccagcctgggcaacatagcaaaaccccatctctacaaaaaaatatacaacagttagccaggcatgatggcacatgtctgcagtcccagctacttgggaggctraggtgggaggatcacttgagcccaggatgtcaaggctgcagtgagttatgatcacactgctgcactccagcgtgggtgacagagcaagaccctgtctcaaataaataaaaattaagtttctattaa

SEQ ID NO: 1231 - DNA, 1998 bp, Homo sapiens
ctctagaatcgagttgtccgctccgagccccggacggacactgatccgcgggctcgtcttggcctttcccaggagacccctgtgcggtgcggagggggcggcggccccgactctgacccgcgccgggggtgggccatggcggagatcagcgacctggaccggcagatcgagcagctgcgtcgctgcgagctcatcaaggagagcgaagtcaaggccctgtgcgctaaggccagagagatcttggtagaggagagcaacgtgcagagggtggactcgccagtcacagtgtgcggcgacatccatggacaattctatgacctcaaagagctgttcagagtaggtggcgacgtccctgagaccaactacctcttcatgggggactttgtggaccgtggcttctatagcgtcgaaacgttcctcctgctgctggcacttaaggtggcagtcccyggcttctgcacccccaacctgggcgacctcgggccgggcctgtcttagtccrttccgccctcatctcctatcgtgaccagccccaccttggagctgtgtcactggtgatggaccgattctgcttttgggggtggtcagagacttgatgggggttgaggccagcggggcagcattctgggaggggcagaggctcactgttgcgaatgtggcaggtcattgatgccactggtgggagaggcagtgtggggccagatgacaaagggcctgggtgccttgctagggacccggtctgtgtctggtaggtgaaagaagagccattaggttcatagttgagggaatgggtcagctttacattctctggaggggtcgtgtgggcctgggaggtggctgatgccacacgattcaggcaagaggtgccaggagtgtgctgggcagtggttgtgaggatggcaggctggcgggcacgaggaggtcagagarggatgtgtggagagaccgtctaggcgccagccctggcttggtggccacccccaggttcgctatcctgatcgcatcacactgatccggggcaaccatgagagtcgccagatcacgcaggtctatggcttctacgatgagtgcctgcgcaagtacggctcggtgactgtgtggcgctactgcactgagatctttgactacctcagcctgtcagccatcatcgatggcaagatcttctgcgtgcacgggggcctctccccctccatccagaccctggatcagattcggacaatcgaccgaaagcaagaggtgcctcatgatgggcccatgtgtgacctcctctggtctgacccagaagacaccacaggctggggcgtgagcccccgaggagccggctacctatttggcagtgacgtggtggcccagttcaacgcagccaatgacattgacatgatctgccgtgcccaccaactgktgatggaaggttacaagtggcacttcaatgagacggtgctcactgtgtggtcggcacccaactactgctaccggtgagccggctgggccgggctgggatgggcgggcatctgagccgagctgctcctgaccctgctgccccgccttccagctgtgggaatgtggcagccatcttggagctggacgagcatctccagaaagatttcatcatctttgaggctgctccccaagagacacggggcatcccctccaagaagcccgtggccgactacttcctgtgaccccgcccggcccctgccccctccaacccttytggccctcgcaccactgtgactctgccatcttcctcagacggaggctgggcgtggggggggctgtcctggctctgctgtcccccaagagggtgcttcgagggtgaggacttctctggagaggcctggagacctagctccatgttcctcctcctctctccccmcttgaaccatgaagtttccaataatttttttttctttttttccttcttttttctgtttgtttttagataaaaattttgagaaaaaaaatgaaaaaattctaataaaagaagaaaaatggttt

SEQ ID NO: 1232 - DNA, 1395 bp, Homo sapiens
ggcggcggcggcggcggcggcggtcgaaagcggagtgaaagagggaggcagggagccggagagccggaaccggagtcgcagcggcggtaatagagacccctgtgcggtgcggagggggcggcggccccgactctgacccgcgccgggggtgggccatggcggagatcagcgacctggaccggcagatcgagcagctgcgtcgctgcgagctcatcaaggagagcgaagtcaaggccctgtgcgctaaggccagagagatcttggtagaggagagcaacgtgcagagggtggactcgccagtcacagtgtgcggcgacatccatggacaattctatgacctcaaagagctgttcagagtaggtggcgacgtccctgagaccaactacctcttcatgggggactttgtggaccgtggcttctatagcgtcgaaacgttcctcctgctgctggcacttaaggttcgctatcctgatcgcatcacactgatccggggcaaccatgagagtcgccagatcacgcaggtctatggcttctacgatgagtgcctgcgcaagtacggctcggtgactgtgtggcgctactgcactgagatctttgactacctcagcctgtcagccatcatcgatggcaagatcttctgcgtgcacgggggcctctccccctccatccagaccctggatcagattcggacaatcgaccgaaagcaagaggtgcctcatgatgggcccatgtgtgacctcctctggtctgacccagaagacaccacaggctggggcgtgagcccccgaggagccggctacctatttggcagtgacgtggtggcccagttcaacgcagccaatgacattgacatgatctgccgtgcccaccaactgktgatggaaggttacaagtggcacttcaatgagacggtgctcactgtgtggtcggcacccaactactgctaccgctgtgggaatgtggcagccatcttggagctggacgagcatctccagaaagatttcatcatctttgaggctgctccccaagagacacggggcatcccctccaagaagcccgtggccgactacttcctgtgaccccgcccggcccctgccccctccaacccttytggccctcgcaccactgtgactctgccatcttcctcagacggaggctgggcgtggggggggctgtcctggctctgctgtcccccaagagggtgcttcgagggtgaggacttctctggagaggcctggagacctagctccatgttcctcctcctctctccccmcttgaaccatgaagtttccaataatttttttttctttttttccttcttttttctgtttgtttttagataaaaattttgagaaaaaaaatgaaaaaattctaataaaagaagaaaaatggttt

SEQ ID NO: 1233 - DNA, 1344 bp, Homo sapiens
ggcggcggcggcggcggcggcggtcgaaagcggagtgaaagagggaggcagggagccggagagccggaaccggagtcgcagcggcggtaatagagacccctgtgcggtgcggagggggcggcggccccgactctgacccgcgccgggggtgggccatggcggagatcagcgacctggaccggcagatcgagcagctgcgtcgctgcgagctcatcaaggagagcgaagtcaaggccctgtgcgctaaggccagagagatcttggtagaggagagcaacgtgcagagggtggactcgccagtcacagtgtgcggcgacatccatggacaattctatgacctcaaagagctgttcagagtaggtggcgacgtccctgagaccaactacctcttcatgggggactttgtggaccgtggcttctatagcgtcgaaacgttcctcctgctgctggcacttaaggttcgctatcctgatcgcatcacactgatccggggcaaccatgagagtcgccagatcacgcaggtctatggcttctacgatgagtgcctgcgcaagtacggctcggtgactgtgtggcgctactgcactgagatctttgactacctcagcctgtcagccatcatcgatggcaagatcttctgcgtgcacgggggcctctccccctccatccagaccctggatcagattcggacaatcgaccgaaagcaagaggtgcctcatgatgggcccatgtgtgacctcctctggtctgacccagaagacaccacaggctggggcgtgagcccccgaggagccggctacctatttggcagtgacgtggtggcccagttcaacgcagccaatgacattgacatgatctgccgtgcccaccaactgktgatggaaggttacaagtggcacttcaatgagacggtgctcactgtgtggtcggcacccaactactgctaccgctgtgggaatgtggcagccatcttggagctggacgagcatctccagaaagatttcatcatctttgaggctgctccccaagagacacggggccccctgccccctccaacccttytggccctcgcaccactgtgactctgccatcttcctcagacggaggctgggcgtggggggggctgtcctggctctgctgtcccccaagagggtgcttcgagggtgaggacttctctggagaggcctggagacctagctccatgttcctcctcctctctccccmcttgaaccatgaagtttccaataatttttttttctttttttccttcttttttctgtttgtttttagataaaaattttgagaaaaaaaatgaaaaaattctaataaaagaagaaaaatggt

SEQ ID NO: 1234 - DNA, 1420 bp, Homo sapiens
ttgcttccgcggcggggccggaagtaggagcggcggcggcggcggcggcggcggtcgaaagcggagtgaaagagggaggcagggagccggagagccggaaccggagtcgcagcggcggagacccctgtgcggtgcggagggggcggcggccccgactctgacccgcgccgggggtgggccatggcggagatcagcgacctggaccggcagatcgagcagctgcgtcgctgcgagctcatcaaggagagcgaagtcaaggccctgtgcgctaaggccagagagatcttggtagaggagagcaacgtgcagagggtggactcgccagtcacagtgtgcggcgacatccatggacaattctatgacctcaaagagctgttcagagtaggtggcgacgtccctgagaccaactacctcttcatgggggactttgtggaccgtggcttctatagcgtcgaaacgttcctcctgctgctggcacttaaggttcgctatcctgatcgcatcacactgatccggggcaaccatgagagtcgccagatcacgcaggtctatggcttctacgatgagtgcctgcgcaagtacggctcggtgactgtgtggcgctactgcactgagatctttgactacctcagcctgtcagccatcatcgatggcaagatcttctgcgtgcacgggggcctctccccctccatccagaccctggatcagattcggacaatcgaccgaaagcaagaggtgcctcatgatgggcccatgtgtgacctcctctggtctgacccagaagacaccacaggctggggcgtgagcccccgaggagccggctacctatttggcagtgacgtggtggcccagttcaacgcagccaatgacattgacatgatctgccgtgcccaccaactgktgatggaaggttacaagtggcacttcaatgagacggtgctcactgtgtggtcggcacccaactactgctaccgctgtgggaatgtggcagccatcttggagctggacgagcatctccagaaagatttcatcatctttgaggctgctccccaagagacacggggcatcccctccaagaagcccgtggccgactacttcctgtgaccccgcccggcccctgccccctccaacccttytggccctcgcaccactgtgactctgccatcttcctcagacggaggctgggcgtggggggggctgtcctggctctgctgtcccccaagagggtgcttcgagggtgaggacttctctggagaggcctggagacctagctccatgttcctcctcctctctccccmcttgaaccatgaagtttccaataatttttttttctttttttccttcttttttctgtttgtttttagataaaaattttgagaaaaaaaatgaaaaaattctaataaaagaagaaaaatggttt

SEQ ID NO: 1235 - DNA, 1303 bp, Homo sapiens
gagacccctgtgcggtgcggagggggcggcggccccgactctgacccgcgccgggggtgggccatggcggagatcagcgacctggaccggcagatcgagcagctgcgtcgctgcgagctcatcaaggagagcgaagtcaaggccctgtgcgctaaggccagagagatcttggtagaggagagcaacgtgcagagggtggactcgccagtcacagtgtgcggcgacatccatggacaattctatgacctcaaagagctgttcagagtaggtggcgacgtccctgagaccaactacctcttcatgggggactttgtggaccgtggcttctatagcgtcgaaacgttcctcctgctgctggcacttaaggttcgctatcctgatcgcatcacactgatccggggcaaccatgagagtcgccagatcacgcaggtctatggcttctacgatgagtgcctgcgcaagtacggctcggtgactgtgtggcgctactgcactgagatctttgactacctcagcctgtcagccatcatcgatggcaagatcttctgcgtgcacgggggcctctccccctccatccagaccctggatcagattcggacaatcgaccgaaagcaagaggtgcctcatgatgggcccatgtgtgacctcctctggtctgacccagaagacaccacaggctggggcgtgagcccccgaggagccggctacctatttggcagtgacgtggtggcccagttcaacgcagccaatgacattgacatgatctgccgtgcccaccaactgktgatggaaggttacaagtggcacttcaatgagacggtgctcactgtgtggtcggcacccaactactgctaccgctgtgggaatgtggcagccatcttggagctggacgagcatctccagaaagatttcatcatctttgaggctgctccccaagagacacggggcatcccctccaagaagcccgtggccgactacttcctgtgaccccgcccggcccctgccccctccaacccttytggccctcgcaccactgtgactctgccatcttcctcagacggaggctgggcgtggggggggctgtcctggctctgctgtcccccaagagggtgcttcgagggtgaggacttctctggagaggcctggagacctagctccatgttcctcctcctctctccccmcttgaaccatgaagtttccaataatttttttttctttttttccttcttttttctgtttgtttttagataaaaattttgagaaaaaaaatgaaaaaattctaataaaagaagaaaaatggttt

SEQ ID NO: 1236 - DNA, 2623 bp, Homo sapiens
gcctctctccctggccaggccccaggtctcgcagccagggatggagatggggggagggggaacctagagttctttgtagtgcctccctcagactctaacacactcagcctggccccctcctcctattgcaaccccctcccccgctcctcccggccaggccagctcagtcttcccagcccccattccacgtggaccagccagggcgggggtagggaaagaggacaggaagagggggagccagttctgggaggcggggggaaggaggttggtggcgactccctcgctcgccctcactgccggcggtcccaactccaggcaccatgttccccgcgggcccccccagccacagcctcctccggctccccctgctgcagttgctgctactggtggtgcaggccgtggggagggggctgggccgcgccagcccggccgggggccccctggaagatgtggtcatcgagaggtaccacatccccagggcctgtccccgggaagtgcagatgggggattttgtgcgctaccactacaacggcacttttgaagatggcaagaagtttgattcaagctatgatcgcaacaccttggtggccatcgtggtgggtgtggggcgcctcatcactggcatggaccgaggcctcatgggcatgtgtgtcaacgagcggcgacgcctcattgtgcctccccacctgggctatgggagcatcggcctggcggggctcattccaccggatgccaccctctacttcgatgtggttctgctggatgtgtggaacaaggaagacaccgtgcaggtgagcacattgctgcgcccgccccactgcccccgcatggtccaggacggcgactttgtccgctaccactacaatggcaccctgctggacggcacctccttcgacaccagctacagtargggcggcacttatgacacctacgtcggctctggttggctgatcaagggcatggaccaggggctgctgggcatgtgtcctggagagagaaggaagattatcatccctccattcctggcctatggcgagaaaggctatgggacrgtgatccccccacaggcctcgctggtctttcacgtcctcctgattgacgtgcacaacccgaaggacgctgtccagctagagacgctggagctcccccccggctgtgtccgcagagccggggccggggacttcatgcgctaccactacaatggctccttgatggacggcaccctcttcgattccagctactcccgcaaccacacctacaatacctatatcgggcagggttacatcatccccgggatggaccaggggctgcagggtgcctgcatgggggaacgccggagaattaccatccccccgcacctcgcctatggggagaatggaactggagacaagatccctggctctgccgtgctaatcttcaacgtccatgtcattgacttccacaaccctgcggatgtggtggaaatcaggacactgtcccggccatctgagacctgcaatgagaccaccaagcttggggactttgttcgataccattacaactgttctttgctggacggcacccagctgttcacctcgcatgactacggggccccccaggaggcgactctcggggccaacaaggtgatcgaaggcctggacacgggcctgcagggcatgtgtgtgggagagaggcggcagctcatcgtgcccccgcacctggcccacggggagagtggagcccggggagtcccaggcagtgctgtgctgctgtttgaggtggagctggtgtcccgggaggatgggctgcccacaggctacctgtttgtgtggcacaaggaccctcctgccaacctgtttgaagacatggacctcaacaaggatggcgaggtccctccggaggagttctccaccttcatcaaggctcaagtgagtgagggcaaaggacgcctcatgcctgggcaggaccctgagaaaaccataggagacatgttccagaaccaggaccgcaaccaggacggcaagatcacagtcgacgagctcaagctgaagtcagatgaggacgaggagcgggtccacgaggagctctgaggggcagggagcctggccaggcctgagacacagaggcccactgcgagggggacagtggcggtgggactgacctgctgacagtcaccctccctctgctgggatgaggtccaggagccaactaaaacaatggcagaggagacatctctggtgttcccaccaccctagatgaaaatccacagcacagacctctaccgtgtttctcttccatccctaaaccacttccttaaaatgtttggatttgcaaagccaatttggggcctgtggagcctggggttggatagggccatggctggtcccccaccatacctcccctccacatcactgacacagctgagcttgttatccatctccccaaactttctctttctttgtacttcttgtcatccccactcccagcccctwttcctctatgtgtgagggaagctgcttgggtgggtgttagggctatgaaatcttggatttggggctgaggggtgggagggagggcagagctctgcacactcaaaggctaaactggtgtcagtccttttttcctttgttccaaataaaagatt

SEQ ID NO: 1237 - DNA, 2806 bp, Homo sapiens
gcctctctccctggccaggccccaggtctcgcagccagggatggagatggggggagggggaacctagagttctttgtagtgcctccctcagactctaacacactcagcctggccccctcctcctattgcaaccccctcccccgctcctcccggccaggccagctcagtcttcccagcccccattccacgtggaccagccagggcgggggtagggaaagaggacaggaagagggggagccagttctgggaggcggggggaaggaggttggtggcgactccctcgctcgccctcactgccggcggtcccaactccaggcaccatgttccccgcgggcccccccagccacagcctcctccggctccccctgctgcagttgctgctactggtggtgcaggccgtggggagggggctgggccgcgccagcccggccgggggccccctggaagatgtggtcatcgagaggtaccacatccccagggcctgtccccgggaagtgcagatgggggattttgtgcgctaccactacaacggcacttttgaagatggcaagaagtttgattcaagctatgatcgcaacaccttggtggccatcgtggtgggtgtggggcgcctcatcactggcatggaccgaggcctcatgggcatgtgtgtcaacgagcggcgacgcctcattgtgcctccccacctgggctatgggagcatcggcctggcggggctcattccaccggatgccaccctctacttcgatgtggttctgctggatgtgtggaacaaggaagacaccgtgcaggtgagcacattgctgcgcccgccccactgcccccgcatggtccaggacggcgactttgtccgctaccactacaatggcaccctgctggacggcacctccttcgacaccagctacagtargggcggcacttatgacacctacgtcggctctggttggctgatcaagggcatggaccaggggctgctgggcatgtgtcctggagagagaaggaagattatcatccctccattcctggcctatggcgagaaaggctatgggacrgtgatccccccacaggcctcgctggtctttcacgtcctcctgattgacgtgcacaacccgaaggacgctgtccagctagagacgctggagctcccccccggctgtgtccgcagagccggggccggggacttcatgcgctaccactacaatggctccttgatggacggcaccctcttcgattccagctactcccgcaaccacacctacaatacctatatcgggcagggttacatcatccccgggatggaccaggggctgcagggtgcctgcatgggggaacgccggagaattaccatccccccgcacctcgcctatggggagaatggaactgactccatcggtttcctccagggcagcgccccacttcgccccttccgcagtggagaagggcagccaagtttggggagggagggtggttatggaaaaacagaaccagcatacccccaggacccagctgtgctgggagcctcagtgtcctcacctgtcaagtgggcaagccatgctgatccgcagggagacaagatccctggctctgccgtgctaatcttcaacgtccatgtcattgacttccacaaccctgcggatgtggtggaaatcaggacactgtcccggccatctgagacctgcaatgagaccaccaagcttggggactttgttcgataccattacaactgttctttgctggacggcacccagctgttcacctcgcatgactacggggccccccaggaggcgactctcggggccaacaaggtgatcgaaggcctggacacgggcctgcagggcatgtgtgtgggagagaggcggcagctcatcgtgcccccgcacctggcccacggggagagtggagcccggggagtcccaggcagtgctgtgctgctgtttgaggtggagctggtgtcccgggaggatgggctgcccacaggctacctgtttgtgtggcacaaggaccctcctgccaacctgtttgaagacatggacctcaacaaggatggcgaggtccctccggaggagttctccaccttcatcaaggctcaagtgagtgagggcaaaggacgcctcatgcctgggcaggaccctgagaaaaccataggagacatgttccagaaccaggaccgcaaccaggacggcaagatcacagtcgacgagctcaagctgaagtcagatgaggacgaggagcgggtccacgaggagctctgaggggcagggagcctggccaggcctgagacacagaggcccactgcgagggggacagtggcggtgggactgacctgctgacagtcaccctccctctgctgggatgaggtccaggagccaactaaaacaatggcagaggagacatctctggtgttcccaccaccctagatgaaaatccacagcacagacctctaccgtgtttctcttccatccctaaaccacttccttaaaatgtttggatttgcaaagccaatttggggcctgtggagcctggggttggatagggccatggctggtcccccaccatacctcccctccacatcactgacacagctgagcttgttatccatctccccaaactttctctttctttgtacttcttgtcatccccactcccagcccctwttcctctatgtgtgagggaagctgcttgggtgggtgttagggctatgaaatcttggatttggggctgaggggtgggagggagggcagagctctgcacactcaaaggctaaactggtgtcagtccttttttcctttgttccaaataaaagatt

SEQ ID NO: 1238 - DNA, 2875 bp, Homo sapiens
gcctctctccctggccaggccccaggtctcgcagccagggatggagatggggggagggggaacctagagttctttgtagtgcctccctcagactctaacacactcagcctggccccctcctcctattgcaaccccctcccccgctcctcccggccaggccagctcagtcttcccagcccccattccacgtggaccagccagggcgggggtagggaaagaggacaggaagagggggagccagttctgggaggcggggggaaggaggttggtggcgactccctcgctcgccctcactgccggcggtcccaactccaggcaccatgttccccgcgggcccccccagccacagcctcctccggctccccctgctgcagttgctgctactggtggtgcaggccgtggggagggggctgggccgcgccagcccggccgggggccccctggaagatgtggtcatcgagaggtaccacatccccagggcctgtccccgggaagtgcagatgggggattttgtgcgctaccactacaacggcacttttgaagatggcaagaagtttgattcaagctatgatcgcaacaccttggtggccatcgtggtgggtgtggggcgcctcatcactggcatggaccgaggcctcatgggcatgtgtgtcaacgagcggcgacgcctcattgtgcctccccacctgggctatgggagcatcggcctggcggggctcattccaccggatgccaccctctacttcgatgtggttctgctggatgtgtggaacaaggaagacaccgtgcaggtgagcacattgctgcgcccgccccactgcccccgcatggtccaggacggcgactttgtccgctaccactacaatggcaccctgctggacggcacctccttcgacaccagctacagtargggcggcacttatgacacctacgtcggctctggttggctgatcaagggcatggaccaggggctgctgggcatgtgtcctggagagagaaggaagattatcatccctccattcctggcctatggcgagaaaggctatgggacrgtgatccccccacaggcctcgctggtctttcacgtcctcctgattgacgtgcacaacccgaaggacgctgtccagctagagacgctggagctcccccccggctgtgtccgcagagccggggccggggacttcatgcgctaccactacaatggctccttgatggacggcaccctcttcgattccagctactcccgcaaccacacctacaatacctatatcgggcagggttacatcatccccgggatggaccaggggctgcagggtgcctgcatgggggaacgccggagaattaccatccccccgcacctcgcctatggggagaatggaactggagacaagatccctggctctgccgtgctaatcttcaacgtccatgtcattgacttccacaaccctgcggatgtggtggaaatcaggacactgtcccggccatctgagacctgcaatgagaccaccaagcttggggactttgttcgataccattacaactgttctttgctggacggcacccagctgttcacctcgcatgactacggggccccccaggaggcgactctcggggccaacaaggtgatcgaaggcctggacacgggcctgcagggcatgtgtgtgggagagaggcggcagctcatcgtgcccccgcacctggcccacggggagagtggagcccggggagtcccaggcagtgctgtgctgctgtttgaggtggagctggtgtcccgggaggatgggctgcccacaggctacctgtttgtgtggcacaaggaccctcctgccaacctgtttgaagacatggacctcaacaaggatggcgaggtccctccggaggagttctccaccttcatcaaggctcaagtgagtgagggcaaaggacgcctcatgcctgggcaggaccctgagaaaaccataggagacatgttccagaaccaggaccgcaaccaggacggcaagatcacagtcgacgagctcaagctgaagtcagatgaggacgaggagcgggtccacgaggagctctgaggggcagggagcctggccaggcctgagacacagaggcccactgcgagggggacagtggcggtgggactgacctgctgacagtcaccctccctctgctgggatgaggtccaggagccaactaaaacaatggcagaggagacatctctggtgttcccaccaccctagatgaaaatccacagcacagacctctaccgtgtttctcttccatccctaaaccacttccttaaaatgtttggatttgcaaagccaatttggggcctgtggagcctggggttggatagggccatggctggtcccccaccatacctcccctccacatcactgacacagctgagcttgttatccatctccccaaactttctctttctttgtacttcttgtcatccccactcccagcccctwttcctctatgtgacagctssctaggacccctctgccttcctccccaatcctgactggctcctagggaaggggaaggctcctggagggcagccctacctctcccatgccctttgccctcctccctcgcctccagtggaggctgagctgaccctgggctgctggaggccagactgggctgtagttagcttttcatccctaaagaaggcyttccctaaggaaccatagaagagaggaagaaaacaaagggcatgtgtgagggaagctgcttgggtgggtgttagggctatgaaatcttggatttggggctgaggggtgggagggagggcagagctctgcacactcaaaggctaaactggtgtcagtccttttttcctttgttccaaataaaagattaaaccaatggc

SEQ ID NO: 1239 - DNA, 3970 bp, Homo sapiens
cagcccgcccgggtgcccgctccgccccccgggctatgtaaagcggccgggctcgggtygtgccaccgctggactcccgtgtccctccgcgcaggcgggcggccccggagcgctggtgccggcagaggcggcgacggtggcgcccctcctcatcatgaggcttctcccgaaaaagccacacattcctgcccaagatcttcttccgcaagatgtcatcctcaggggccaaggacaagcctgagctgcagtttcccttccttcaggatgaggacacagtggccacgctgctagagtgcaagacgctcttcatcttgcgcggcctgccaggaagcggcaagtccacgctggcacgggtcatcgtggacaagtaccgtgatggcaccaagatggtgtcggctgacgcttacaagatcacccccggcgctcgaggagccttctccgaggagtacaagcggctcgatgaggacctggctgcctactgccgccgccgggacatcagaattcttgtgcttgatgacaccaaccacgaacgggaacggctggagcagctctttgaaatggccgaccagtaccagtaccaggtggtgctggtggagcccaagacggcgtggcggctggactgtgcccagctcaaggagaagaaccagtggcagctgtcggctgatgacctgaagaagctgaagcctgggctggagaaggacttcctgccgctctacttcggctggttcctgaccaagaagagctctgagaccctccgcaaagccggccrggtcttcctggaagagctggggaaccacaaggccttcaagaaggagctgcgacaattcgtccctggggatgagcccagggagaagatggacttggtcacctactttggaaagagacccccaggcgtgctgcattgcacaaccaagttttgtgactacgggaaggctcccggggcagaggagtacgctcaacaagatgtgttaaagaaatcttactccaaggccttcacgctgaccatctctgccctctttgtgacacccaagacgactggggcccgggtggagttaagcgagcagcaactgcagttgtggccgagtgatgtggacaagctgtcacccactgacaacctgcygcgggggagccgcgcccacatcaccctcggctgtgcagctgacgtagaggccgtgcagacgggccttgacctcttagagattctgcggcaggagaaggggggcagccgaggcgaggaggtgggygagctaagccggggcaagctctattccttgggcaatgggcgctggatgctgaccctggccaagaacatggaggtcagggccatcttcacgggrtactacgggaaaggcaaacctgtgcccacgcaaggtagccggaaggggggygccttgcagtcctgcaccatcatatgagtgttctcaccaccacttatgcccctrgaagggaaggggagagggaaacgtgccctctgtttgatccttgttttgtgacattttttttttttttttttttactcaaagttaacctacctgtaactttttaaaaacttgtaaaataactgaccctcccttcctgtccgccctcttcccctctaatgctcacrctcccaacacaaggtgggcagggaggcaccattcaggaacctggaccaaagctracgaggctgggccaagccagggatggggccacagccagaaccccgagccctacttccaggttcyggttagctcagccccagcccagcccagctgctctgcccagagctgggtgagtggggagacacctcagagccccgcaaaacccactgaccggaggcaaaaggcagtggggctgggggtagttttccatggtgcctctggaggcctctgggcctcctctaacaggggctggtgggcaccaagagccaatggagtagacccctggctggtaagggccaagtcccaccggttgcttctgggaaggggtttctaacactagtctgtgtgctgtggttcctggggtgccctccactgcccyctgttcagtaacagggccttgctaatcgggttgtcactcaacaaaagtgctttggatttaagttactatcctggctttgcccaacctcagcaacctgtaagactgataatgaaataaatcatgttaatcctagctgtgtgcagtctctcttacccttctgtgcccagctcagtcttccctagggctgggtgtattaggactggctttgtcccacagcttggggccatcggtcctgtctcccctctgctggccgggcacagctgtggtgaggttgggcagctgaacagtgttggctttcatgaggaggcagaaagcagaggctggcctcagactcatacagaaggtgggggttggctgggtacgagggatgtggagcacaaaagcctctcatcccccattaaccagggcaccaagcccacaggtgtccccagcccactggatcagaaagagttcagtaagaccggaagctcctggtaygggtttctcccagttctctagggaaggccacctgcaggtcactgaaacttcaagcaccagggaagatctaacatttgagtcccttccaggccatcagaggcctagtcagccacatgggaaacttccaagacctgactcaggcatcattccaccatggctaaggcaccagccggggaagacttgaaagaaaggggcaggagctcagatgaagagaaatcctaagttacctttctaggtcaaggcctgtccctggccatctctgaacttcagctagagcttcaagtctgtgcctggagctcctgggaaggctactcaccttgaacaccacgcttgacaggacagcatggtgcatgccgctgcatccgtgagcagtgtgtctcctgcatgcagaaagggagcagagaaggccaggggcttttgctaaaaatagtggccagaccagagctctggagccacctgtcccacctcaaatgggtctgggggtcaggaggcagggttttatctctgtctaccatctccctcgaacccacactgcaacaggaactgtgagagtctttgtaagtaaactgccctgtctaggtcagtacccacctgagctttggacgcacacagcttttagtacccacctgagctttggacacacacagcttctagtgatttctggggccccaccgtaaagtgagcatgctttctgaactcgcttctctgtgactgatgttaggctgggcccagaggcacagccggggcctgcctagcactcacatgctggacaggtctgggagaggcagagtgccccacctgcmactaggctgggtgcccacagcccgcatgcagcagcttgctgcaccccaagtccaggtcgggctcagctctggctcacagactggagacaatgcagatgccagagcaaagggccaggaagggtcaaaacattttattctctttttttttttcttttttaataaagttaaacagtaaaacaaaaattcacaagctgcctccctgtccacccccgcctccctcccctgccctcggtcttcggcattggttccctttgctccaccccactcacagagacacagggcatccaactgagaaaacgaaactgctctaagcacacggagacgtgatgaagggaggaggtgaactgtttccacattcaagattaaactgagtgaatctgcattttctgggttctgggtggttgcccttcattagccaaattgaaaaaagaaattccctggaccagatgctgaaagagaaaagaggggttggtagttggctatggattttctaaggaagatcactttgctctgattatggaaaagtcttcaagggctgcttcaaactcaaacacagagagaaactctatgggtatcaaacagctcaggctgtttttgggtgcaagagggagcacgtgactgtattatacatgggtagcttctgacctcagcattatctatatagtaccttt

SEQ ID NO: 1240 - DNA, 4497 bp, Homo sapiens
cccgcccccagcccgcccgggtgcccgctccgccccccgggctatgtaaagcggccgggctcgggtygtgccaccgctggactcccgtgtccctccgcgcaggcgggcggccccggagcgctggtgccggcagaggcggcgacggtggcgcccctcctcatcatgaacagaggcttctcccgaaaaagccacacattcctgcccaagatcttcttccgcaagatgtcatcctcaggggccaaggacaagcctgagctgcagtttcccttccttcaggatgaggacacagtggccacgctgctagagtgcaagacgctcttcatcttgcgcggcctgccaggaagcggcaagtccacgctggcacgggtcatcgtggacaagtaccgtgatggcaccaagatggtgtcggctgacgcttacaagatcacccccggcgctcgaggagccttctccgaggagtacaagcggctcgatgaggacctggctgcctactgccgccgccgggacatcagaattcttgtgcttgatgacaccaaccacgaacgggaacggctggagcagctctttgaaatggccgaccagtaccagtaccaggtggtgctggtggagcccaagacggcgtggcggctggactgtgcccagctcaaggagaagaaccagtggcagctgtcggctgatgacctgaagaagctgaagcctgggctggagaaggacttcctgccgctctacttcggctggttcctgaccaagaagagctctgagaccctccgcaaagccggccrggtcttcctggaagagctggggaaccacaaggccttcaagaaggagctgcgacaattcgtccctggggatgagcccagggagaagatggacttggtcacctactttggaaagagacccccaggcgtgctgcattgcacaaccaagttttgtgactacgggaaggctcccggggcagaggagtacgctcaacaagatgtgttaaagaaatcttactccaaggccttcacgctgaccatctctgccctctttgtgacacccaagacgactggggcccgggtggagttaagcgagcagcaactgcagttgtggccgagtgatgtggacaagctgtcacccactgacaacctgcygcgggggagccgcgcccacatcaccctcggctgtgcagctgacgtagaggccgtgcagacgggccttgacctcttagagattctgcggcaggagaaggggggcagccgaggcgaggaggtgggygagctaagccggggcaagctctattccttgggcaatgggcgctggatgctgaccctggccaagaacatggaggtcagggccatcttcacgggrtactacgggaaaggcaaacctgtgcccacgcaaggtagccggaaggggggygccttgcagtcctgcaccatcatatgagtgttctcaccaccacttatgcccctrgaagggaaggggagagggaaacgtgccctctgtttgatccttgttttgtgacattttttttttttttttttttactcaaagttaacctacctgtaactttttaaaaacttgtaaaataactgaccctcccttcctgtccgccctcttcccctctaatgctcacrctcccaacacaaggtgggcagggaggcaccattcaggaacctggaccaaagctracgaggctgggccaagccagggatggggccacagccagaaccccgagccctacttccaggttcyggttagctcagccccagcccagcccagctgctctgcccagagctgggtgagtggggagacacctcagagccccgcaaaacccactgaccggaggcaaaaggcagtggggctgggggtagttttccatggtcacagagaactagtggtggctctgagaaggggaggacctctgggctttgattccatctccttgtcttttttctttgtttttagagacagggtcctgctatttcccaagctggagtgcagtggtgcgatcatggctcactgcagcctcgaactcctgggctcaagcaatcctcctgagtgatcccatttcttaatcagtgtagccccaagaaggctggggctatttaccagggtagaaaaaggagcttacctcccacctttggtcctaagtccctgccccctccccttcacaccataactaggtaacagtttgataactagggaagaaagcagaacagttaagcagccgccacatccccgctggctgggggcctcactccaggaaggggctggactggctgtcctttccagtggcctggctccgctgtgtggatggggagatcggggccagaggcagaaccctggtgaggaagctccagtcctgctctctacccagcccatcttgcctccatggtgcctctggaggcctctgggcctcctctaacaggggctggtgggcaccaagagccaatggagtagacccctggctggtaagggccaagtcccaccggttgcttctgggaaggggtttctaacactagtctgtgtgctgtggttcctggggtgccctccactgcccyctgttcagtaacagggccttgctaatcgggttgtcactcaacaaaagtgctttggatttaagttactatcctggctttgcccaacctcagcaacctgtaagactgataatgaaataaatcatgttaatcctagctgtgtgcagtctctcttacccttctgtgcccagctcagtcttccctagggctgggtgtattaggactggctttgtcccacagcttggggccatcggtcctgtctcccctctgctggccgggcacagctgtggtgaggttgggcagctgaacagtgttggctttcatgaggaggcagaaagcagaggctggcctcagactcatacagaaggtgggggttggctgggtacgagggatgtggagcacaaaagcctctcatcccccattaaccagggcaccaagcccacaggtgtccccagcccactggatcagaaagagttcagtaagaccggaagctcctggtaygggtttctcccagttctctagggaaggccacctgcaggtcactgaaacttcaagcaccagggaagatctaacatttgagtcccttccaggccatcagaggcctagtcagccacatgggaaacttccaagacctgactcaggcatcattccaccatggctaaggcaccagccggggaagacttgaaagaaaggggcaggagctcagatgaagagaaatcctaagttacctttctaggtcaaggcctgtccctggccatctctgaacttcagctagagcttcaagtctgtgcctggagctcctgggaaggctactcaccttgaacaccacgcttgacaggacagcatggtgcatgccgctgcatccgtgagcagtgtgtctcctgcatgcagaaagggagcagagaaggccaggggcttttgctaaaaatagtggccagaccagagctctggagccacctgtcccacctcaaatgggtctgggggtcaggaggcagggttttatctctgtctaccatctccctcgaacccacactgcaacaggaactgtgagagtctttgtaagtaaactgccctgtctaggtcagtacccacctgagctttggacgcacacagcttttagtacccacctgagctttggacacacacagcttctagtgatttctggggccccaccgtaaagtgagcatgctttctgaactcgcttctctgtgactgatgttaggctgggcccagaggcacagccggggcctgcctagcactcacatgctggacaggtctgggagaggcagagtgccccacctgcmactaggctgggtgcccacagcccgcatgcagcagcttgctgcaccccaagtccaggtcgggctcagctctggctcacagactggagacaatgcagatgccagagcaaagggccaggaagggtcaaaacattttattctctttttttttttcttttttaataaagttaaacagtaaaacaaaaattcacaagctgcctccctgtccacccccgcctccctcccctgccctcggtcttcggcattggttccctttgctccaccccactcacagagacacagggcatccaactgagaaaacgaaactgctctaagcacacggagacgtgatgaagggaggaggtgaactgtttccacattcaagattaaactgagtgaatctgcattttctgggttctgggtggttgcccttcattagccaaattgaaaaaagaaattccctggaccagatgctgaaagagaaaagaggggttggtagttggctatggattttctaaggaagatcactttgctctgattatggaaaagtcttcaagggctgcttcaaactcaaacacagagagaaactctatgggtatcaaacagctcaggctgtttttgggtgcaagagggagcacgtgactgtattatacatgggtagcttctgacctcagcattatctatatagtaccttt

SEQ ID NO: 1241 - DNA, 2422 bp, Homo sapiens
ttycggcaagcctcgaggctcrcggggtttatgcacactaacttcactgagccagggagcacggaagttgtgccactgtgcaacttgggttttctttatcctgcagtctttacctcagcagaaccgcacaccacagactccctccagctctttgtgtgtggctctctcagggtccaacaagagcaarctgtgggtctgtgagtgtttatgtgtgcttttattcacttcacacttattgaaaagtgtgtatgtgagagggtggggtgtgtgtgtcaaagagagtgaggaagagaaggagagagagatcaaytgattctgcagcctcagctccagcatccctcagttgggagcttccaaagccgggtgatcacttggggtgcatagctcggagatgcagtccccctggaaaatccttacggtggcgcctctattcttgctcctgtctcttcagtcctcrgcctctccagccaacratgaccagtccaggcccagcctctcraatgggcacacctgtgtagggtgtgtgctggtggtgtctgtaatagaacagcttgctcaagttcacaactcgacggtccaggcctcgatggagagactgtgcagctacctgcctgaaaaactgttcttgaaaaccacctgctatttagtcattgacaagtttggatcagacatcataaaactgcttagcgcagatatgaatgctgatgtggtatgtcacactctggagttttgtaaacagaacactggccaaccattgtgtcatctctaccctcttcccaaggagacatggaaatttacactacagaaggcaagacaaattgtcaagaagtccccgattctgaaatattmtagaagtggttctgacatttgttcactcccggttttgrccaagatctgccagaaaattaaattagctatggaacagtctgtgccattcaaagatgtggattcagacaaatacagcgttttcccaacactgcggggctatcactggcgggggagagactgtaatgacagcgacgagtcagtgtacccaggtagaaggccgaacaactgggatgtccatcaggattcaaactgtaatggcatttggggtgtcgatccwaaagatggagttccatatgagaagaaattctgtgaaggttcacagcccaggggaatcattttgctgggagactcagctggggstcattttcacatctctcctgaatggatcacagcrtcgcagatgtctttgaactctttcatcaatctaccaacagcccttaccaacgagcttgactggccccaactctctggtgctacaggatttctggaytccactgttggaattaaagaaaaatctatttaccttcgcttatggaaaagaaaccactgtaatcacagggactaccagaatatttcaagaaatggtgcatcttcccgaaacctgaagaaatttatagaaagcttgtctagaaacaaggtgttggactatcccgccatcgttatatatgccatgattggaaatgatgtctgcagtgggaagagtgacccagtcccagccatgaccactcctgagaaactctactccaacgtcatgcagactctgaagcatctaaattcccacctgcccaatggcagccatgttattttgtatggcttaccagatggaacctttctctgggataatttgcacaacagatatcatcctctcggccagctaaataaagacatgacctatgcgcagttgtactccttcctgaactgcctccaggtcagcccctgccacggctggatgtcttccaacaagacgttgcggactctcacttcagagagagcagagcaactctccaacacactgaaaaaaattgcagccagtgagaaatttacaaayttcaatcttttctacatggattttgccttccatgaaatcatacaggagtggcagaagagaggcggacagccctggcagctcatcgagcccgtggatggattccaccccaacgaggtggctttgctgttgttggcggatcatttctggaaaaaggtgcagctccagtggccccaaatcctgggaaaggagaatccgttcaacccccagattaaacaggtgtttggagaccaaggcgggcactgagcctctcaggagcatgcacccctggggagcacagggaggcagaggcttgggtaaactcattccacaaaccctatgggggctgccacgtcacaggcccaaaggactcttcttcagcagcatctttgcaaaatgtctttctctcaatgaagagcatatctggacgactgtgcaatgctgtgtgctcccgggatcagtaacccttcygctgttcctgaaataacctttcataaagtgctttgggtgccattccaaacaagagagtatctgtgccctttacagctaattgttctaaaaggagtttct

SEQ ID NO: 1242 - DNA, 993 bp, Homo sapiens
gctggtgaattaccagatctcctcaagtgcagcaaccagatccagttggaagtgcatcttttggaggcagaaaacaaagccatggccactggggcctttactcagggccagctgaaggtgcggctgactgcacagacgtcactggggcctttgtctgacttctacacactccctgtggggatccgcactgtggctgtcactgagagccagttcttcatcaacgggaaacctttttatttccacagcatcaacaagcacgaggatgcggacctgcgtttgtgctcctgggtcstcgttggggctgcttctggtcaccttccacttttgccttccatcctagggaagggcttcractggctgctgctggtgaaggacttcaacctgcttcactggcttggtgccaacgccttctgcaccagccactacccctacgcgggggaagtgctgcagatgtgtgaccgctatgggattgtggtcattgatgagtgtcccgcygtgggcctggtgctggtgcagcttttcaacaatgtgtctgtgcatcaacacatgtgggtgatggaggaactggtgtgcagggacaagaaccaccccgccgtggtgatgtggtctgtggccaacaagcctgcatcctacctggaacctgccggctactacttcagatatgttgctttgtcttggggtttttttacatgtgaattcctgaacctcatccagcccctcgtcccctccccagccagctcacactcgtttgtcacagctcctgggactcccattgacatacagggtccacctctgatgttcactgaagagtaccagaagagtctgccagagcagtaccatctgggtctggatcaaaaacgcagaaaatacgtggttggagagcttatcgggaattctgccgatttcacgactatgcagtgttgccttgccaattctggccattttgattataagaatattggaaacaaaggagggaagctggcttactccatg

SEQ ID NO: 1243 - DNA, 3408 bp, Homo sapiens
aaatccttccttccccggggtagaagtccagggtgagaaattggttccgaactcaaaggaacccartgccgggccacagccgggtcacgtggccggcggccccccatgacgtgctggctgcggggcgtcacggcgacgttcgggcgacctgccgagtggccaggctacctcagtcacctgtgtggtcgcagtgctgccatggacctgggacccatgcgcaagagttaccgcggggaccgagaggcatttgaggagactcatctgacctcycttgacccagtgaaacagtttgctgcctggtttgaggaggctgttcagtgtcctgacataggggaagccaatgccatgtgtctggctacctgcaccagagatggaaaaccctctgctcgcatgttgctgctgaagggcttcgggaaagatggcttccgcttcttcactaacttcgagagtcraaaaggaaaagagctggactctaatccctttgcttcccttgtcttctactgggagccacttaaccgtcaggtgcgtgtggaaggccctgtgaagaaactgcctgaggaggaggctgagtgctacttccactcccgcccsaagagcagccagattggggctgtggtcagccaccagagttctgtgatccctgatcgggagtatctragaaagaaaaatgaggaactggaacagctctaccaggatcaagaggtgcccaagccaaaatcctggggtggctatgtcctgtaccctcaggtgatggagttctggcaaggtcaaaccaaccgcctgcatgaccggatagtctttcggcggggcctacccacaggagattcccctttggggcccatgacccaccgcggggaggaagactggctctatgagagacttgcaccttaactctgggacctgctggcccagagtggagctagggctaggtgtcaagagagggtgtgggattgggacccaggcccttctttctaaactcaacccatttccctccctaccccttatcttcaggactcttcagagctaatcctctaagttctctgtactcagttggttctcagttagctggtcaagtggagtgtaatggtggcgtagagaatcacaaatggaaaataattccataattatttttttgaccttgcctatgattgattaggatagctccctctaggggtagcagccggtgtgactccctttctggtgacagacagggccccagcagccctgtctgttaccatgtgagtcatactggccaaagcttagtcctagcatatgcacctgagccaacctggccaatcagattgttttgtcaataatttgaaatttgaactggagagatccagaaccttgggagtcattaaagccaagtcattcatagcagccaggaaacaataggaaccaaaagcctctgcctgctgctattgcaattcccaggatctctccttccctggatccctccctcccaggtctgggctgtgcagttcctccccctgccttaaaacaccccactatctctgtaaagtctctctctctcttttttttttttttacttaatctagctagaatctatttctgttgattacaacttaactaactcatttacggataggacttttttttttctttttttcttttttcttttcttttttttttttgagatggagtctcactctgtcacccaggctggagtgcagtggtgtgatcttggctcactgmaacctctgcctcccaggttcaagcaattctcctgcctcagcctcccaagtagctgggactacaggcacacgccaccacrcccaactaatttttgtatttttagtagagatggggtttcaccatgttggccaggattgtctccatctcttgaccttgtgatccacccacctcagcctcccaaagtgctgggattacaggcatgagccaccacacccagcgagacggggtttcattatgttggccaggctggtctccaactcctgacctaaagtgatctgcccgccttggcctcccaaagtgctgggattacagacatgagccaccacgcttggccgggatagtatatttttatagcacttcccctactgattgctgccttctctgtggctacaagggacccacagaattacagggaagttacagggaagcaggtttcatctcaatattgggagagatttcaaacaatcacacctgcctgagaaggagtgggctgtcactaggaatttttattcccagtccgtcaggaattttgtagaagggcttcatgtgctggtaccaataggacaggaagattttaatcagctttactatctatgtttttttatggaaactgtgtgtatgtatacatacattttccaaaaagaaaaattaaatgattatagagattatgtttttcagactactcacgtatctgcttttcttactccccacctctgctgataattcctagttcattggtttttcccccacactggaattacctggggagcttaaaaaaccctgatgcctgggtcccaccctcagagatgattgaaccagcctggccagcatggcaaaaccctgtctctactatgatatgaatgcagcctgggcactgggaaatttaaaaactccccagataattctgtgcagccaaggttgagacctcctagtctagagctttgctatacacagggtggtccacaagccaggagcatcagcatcacttggcagcgccttagagattcagaccccagacccactgaatctgaccctgcattttcactagaccccaggtsatcagctgcactagactcaacctctaaaccaagacctcccaccctcacagtctatgatcctttagtgaccctcagctgagtcctgtgctgaactgtgtttgttctccttgagcacatgcccgctraccagggacagactggatgagcaagcaacctgctggctatggagaagagccaggctgggtaaatgtttgctgtgactaagccaggatcaaagaactgcctgttgcttgcactggctggcactgagcttgccactctgtgaactgtgcttccttcccctgcatggacctgtgcctcagtcactattatccgcaggccttctccaagggcagccctctccttgtttatccctcttaagcctgcgtgcaggaaggcacattaaccctgtggccccctgcaggcaggagggtgttgggtgcccttacctaccttgccctttttcttgtaccgtaggctgtgccgtttatgagtaagtgatgtgtgtctgtgtgtgtgtctagaagtgctgcactcaccttgtgttattggaggttgtgtaaccccctagctttgagcctggtctcagatgttccttttccgttctctgtccagccgttaccgcccccagtctgtaataaaagcctatcagccg

SEQ ID NO: 1244 - DNA, 1771 bp, Homo sapiens
aaatccttccttccccggggtagaagtccagggtgagaaattggttccgaactcaaaggaacccartgccgggccacagccgggtcacgtggccggcggccccccatgacgtgctggctgcggggcgtcacggcgacgttcgggcgacctgccgagtggccaggctacctcagtcacctgtgtggtcgcagtgctgccatggacctgggacccatgcgcaagagttaccgcggggaccgagaggcatttgaggagactcatctgacctcycttgacccagtgaaacagtttgctgcctggtttgaggaggctgttcagtgtcctgacataggggaagccaatgccatgtgtctggctacctgcaccagagatggaaaaccctctgctcgcatgttgctgctgaagggcttcgggaaagatggcttccgcttcttcactaacttcgagagtcraaaaggaaaagagctggactctaatccctttgcttcccttgtcttctactgggagccacttaaccgtcaggtgcgtgtggaaggccctgtgaagaaactgcctgaggaggaggctgagtgctacttccactcccgcccsaagagcagccagattggggctgtggtcagccaccagagttctgtgatccctgatcgggagtatctragaaagaaaaatgaggaactggaacagctctaccaggatcaagaggtgcccaagccaaaatcctggggtggctatgtcctgtaccctcaggtgatggagttctggcaaggtcaaaccaaccgcctgcatgaccggatagtctttcggcggggcctacccacaggagattcccctttggggcccatgacccaccgcggggaggaagactggctctatgagagacttgcaccttaactctgggacctgctggcccagagtggagctagggctaggtgtcaagagagggtgtgggattgggacccaggcccttctttctaaactcaacccatttccctccctaccccttatcttcaggactcttcagagctaatcctctaagttctctgtactcagttggttctcagttagctggtcaagtggagtgtaatggtggcgtagagaatcacaaatggaaaataattccataattatttttttgaccttgcctatgattgattaggatagctccctctaggggtagcagccggtgtgactccctttctggtgacagacagggccccagcagccctgtctgttaccatgtgagtcatactggccaaagcttagtcctagcatatgcacctgagccaacctggccaatcagattgttttgtcaataatttgaaatttgaactggagagatccagaaccttgggagtcattaaagccaagtcattcatagcagccaggaaacaataggaaccaaaagcctctgcctgctgctattgcaattcccaggatctctccttccctggatccctccctcccaggtctgggctgtgcagttcctccccctgccttaaaacaccccactatctctgtaaagtctctctctctcttttttttttttttacttaatctagctagaatctatttctgttgattacaacttaactaactcatttacggataggacttttttttttctttttttcttttttcttttcttttttttttttgagatggagtctcactctgtcacccagctactcaggaggctgaagcaggagaatgaatcgcttgaacccgggaggcggaggttgcagtgagctgagatcgcgccactgaacttcag

SEQ ID NO: 1245 - DNA, 2091 bp, Homo sapiens
accaaggcccagtccccttcacctgtctccatcataagcgtcaccagcctgtctgacaaactgcccagcaaagttattgacattggcctggccgcctggggatgcaaggccctgaacattgtagagaatgagatgccaggcctgatgcacatgtgggagctgtactcggcctccaagccactagagggcamccacagtgccagctgcctgcacatgaccatggagatggccatccacattgggtccctcatcaccctgggtgccccagcagcaacatcttcctcaccctggaycatgtgttggctgccattgccaaggctggcattccagtttacacctggaagggcaaaagaaygcagagtacccatggtgcatcgagcagtcactgtaattcagggatgggctctcaacattattctggaggatgggggtgaccttgccaacctcttccacaccaagtactcacagctcttgctgggcatctgaggcacctccaaggagaccatgacgkgtccacaacccacacaggatgatggtcaatgggatcctgaaggtgcytgccatcaatgtcaatgactccctcaccaagagtgagttcaacaagctctatggctgctgggagtccctcatagatggcatcaagtgggccacagtggtgatgattgccggcaaggtagcgatggtagcaggctatggcaatgtgggcaagggctgtgcccaggccctgtggggtttcggggcccacgtcatcatcaccaagatcgaccccatcaatgcactgcaggctgccatggagggctatgaggtgaccaccatggatgaagcctgtcagragggcaacatctttatcaccaccacagcctgtgtcaacatcatccttggccggcactttgaacagatgaaggatgatgccattgtatgtaacactggacactttgaggtggagrtcaatgtcaagtggctcagtgagaacccttggagaaggtggccatcaagccccaggtggccgggtactggatgaagaatgggcgccacaccatcctgctggctgagggtcggctggtcagcctgggttgtgccatgggccaccctggctttgtgatgagtgactcatcaaccaggtgactgcacagaatgagctgtgaatccacccagagaagtaccccattgaggttcatgtcctacccaagaagctggatgaggcagtggctgaagcccacctgggcaagctgatcatgaaattgaccaagctgactgagaaacaggcccagtacctggggcatctcccctgattgccccttcaaggctgatcactaccgctactgagagccaggcctgcatttcaccttccagctgctgttcttgcccasgccctgcctctccttcttaagagcgaatggcaccaactttgtgattggtttgtcagcatcccccatggactccccagggccgttcactcagtttttggcttctgctgcacccctcatactattccaagtgwgtcaggggaactgagagtcccctcctcaagcctggtcatggtggaagtatgagggagacagccacagggaactgtgagctcaatggtcttggaactgctcactaagtcagtccttccttaacctggatgtcagcagtggagtcgcaaagcccacgtactttaccatctaggccttcacctggcctgtggacttataccctgtgcttggtttatggttcagtcattcctcagcccgtgacagatgagaaggaactgtattgaagggcaaggaggaactgtttcaattttcctgagagcttggcttaatgctggaccttctcttaaacctcgtaacaatgagattggtactttcagtccctgtttcacagggattagaatacactcttaagggacaactgagaaagaacagagaagtgacagccagaggttgagaggggccagaaaagcataaaagcaggcacagatcagccaccactttgtaacaagagggttcctatcacaaccttgggtcaaaaagagaataatttggcttataatgtttataatgttaaaagaaagcaggaaggtaggtaaataaaaatctcaatgcc

SEQ ID NO: 1246 - DNA, 435 bp, Homo sapiens
atggattatggccgagtaaatgatatcatgcgaaagttgataggagacagacctgacacatacatagacacaaaagcgttggcagaatatgttgtacaacaagaaggagcaaagctaaatgtggagattaggaatcctctcgaacaggccttcagatggcccaatgtaaatctaacctccaatcaccttttatatcattactggattgctgtaagccataaggcctcagcattcctggatgatatctacctcaggatgactggargaagcccaaggatgatgaaaacaataattcatcttcacaaagctgtgatgttacttgagtatttcacaagtaattcttgggtttggaatacggacaatgtcaatatgttaatgaatcaactaaacyttgaagataaaaagactttcaatattgatgtacggcagttacat

SEQ ID NO: 1247 - DNA, 1851 bp, Homo sapiens
ttccygcccttgaacatcagactccaatttcttcagttctgggactctgactggcttccttgctcctcagcctgcagatggcctattgtgagacctcacgttgtcatatggattggagaggtcaataagagtcagcgcctttaaaaagaaatctactcactcttctgtgtgcataaggccgagcagaggttcttcgtctcaagaggaactgacttctgttgagcactcaacacgccacagagaccagccatcttgcaacctcacctcacagcatggagagaggagaccaacctaagagaaccaggaatgaaaacattttcaactgcttatacaaaaaccctgaggcaacttttaagctgatttgctttccctggatgggaggtggctccactcattttgccaaatggggccaagatactcatgatttgctggaagagacagcatctcaccatgttgccaaggctggtctcaaactccggcgctcaagtgatcctcctgcttcagcctacycatgtgctggcgtgagccaccgtaggcgtgagccaccgtgcctggccaaaattcttggtctattctggattctaattttttttatgcactccttaaggcttcctggaagagaaagcagagttgaagaacctcttgaaaatgacatctcccagttagttgatgaagttgtttgtgctctgcagccagtcatccaggataaaccatttgcattttttggccacagtatgggatcctacattgcttttaggactgcactaggtctraaagaaaacaatcaaccagaaccattgcatttatttttgtcaagtgcaactcctgtacattcaaaggcctggcatcgcattcccaaagatgatgaattgtcagaagaacaaataagtcattaccttatggaatttggaggcacccccaagcattttgctgaagccaaggaatttgtgaaacaatgtagtcccatcataagggcagatctgaacattgttagaagttgcacctctaacgtaccatctaaggctgttctttcctgtgacttgacatgttttgttggatctgaagacatagcaaaggacatggaagcctggaaagatgtaaccagtggaaatgctaaaatttaccagcttccagggggtcacttttatcttctggatcctgcraaygagaaattaatcaagaactacataatcaagtgtctagaagtatcatcgatatccaatttttagatattttccctttcacttttaaaataatcaaagtaatatcatactcttctcagttattcagatatagctcagttttattcagattggaaattacacattttctactgtcagggagattcgttacataaatatatttacgtatctggggacaaaggtcaagccagtaaagaatacttctggcagcactttgggaggccaaggcgggcggatcacgaggtcaggagatcgagaccgtcctggctaacaccgtgaaaccccatctctactaaaaatacacaaaattagcygggcgtggtggtgggcacctgtagtcccagctactcgggaggctgaggcaggagaatggtgtgaacctgggaggyggagcttgcagtgaaccgagatcgctccactgcactccagcctgggtgacagatccagactctgtctcaaaaaaaaaaaaaaaaaaatacttctggcagagtcttttatcttcctattaaaatctcasttgattctcctttatgggaagtttgtcgacaaaattcatgattagtaaattatccattttttccttcagttagtttaatggtgaagatgattaacaggggaaatgcttgaagtaaatgattgtttcaatggc

SEQ ID NO: 1248 - DNA, 1692 bp, Homo sapiens
ttccygcccttgaacatcagactccaatttcttcagttctgggactctgactggcttccttgctcctcagcctgcagatggcctattgtgagacctcacgttgtcatatggattggagaggtcaataagagtcagcgcctttaaaaagaaatctactcactcttctgtgtgcataaggccgagcagaggttcttcgtctcaagaggaactgacttctgttgagcactcaacacgccacagagaccagccatcttgcaacctcacctcacagcatggagagaggagaccaacctaagagaaccaggaatgaaaacattttcaactgcttatacaaaaaccctgaggcaacttttaagctgatttgctttccctggatgggaggtggctccactcattttgccaaatggggccaagatactcatgatttgctggaagtgcactccttaaggcttcctggaagagaaagcagagttgaagaacctcttgaaaatgacatctcccagttagttgatgaagttgtttgtgctctgcagccagtcatccaggataaaccatttgcattttttggccacagtatgggatcctacattgcttttaggactgcactaggtctraaagaaaacaatcaaccagaaccattgcatttatttttgtcaagtgcaactcctgtacattcaaaggcctggcatcgcattcccaaagatgatgaattgtcagaagaacaaataagtcattaccttatggaatttggaggcacccccaagcattttgctgaagccaaggaatttgtgaaacaatgtagtcccatcataagggcagatctgaacattgttagaagttgcacctctaacgtaccatctaaggctgttctttcctgtgacttgacatgttttgttggatctgaagacatagcaaaggacatggaagcctggaaagatgtaaccagtggaaatgctaaaatttaccagcttccagggggtcacttttatcttctggatcctgcraaygagaaattaatcaagaactacataatcaagtgtctagaagtatcatcgatatccaatttttagatattttccctttcacttttaaaataatcaaagtaatatcatactcttctcagttattcagatatagctcagttttattcagattggaaattacacattttctactgtcagggagattcgttacataaatatatttacgtatctggggacaaaggtcaagccagtaaagaatacttctggcagcactttgggaggccaaggcgggcggatcacgaggtcaggagatcgagaccgtcctggctaacaccgtgaaaccccatctctactaaaaatacacaaaattagcygggcgtggtggtgggcacctgtagtcccagctactcgggaggctgaggcaggagaatggtgtgaacctgggaggyggagcttgcagtgaaccgagatcgctccactgcactccagcctgggtgacagatccagactctgtctcaaaaaaaaaaaaaaaaaaatacttctggcagagtcttttatcttcctattaaaatctcasttgattctcctttatgggaagtttgtcgacaaaattcatgattagtaaattatccattttttccttcagttagtttaatggtgaagatgattaacaggggaaatgcttgaagtaaatgattgtttcaatggc

SEQ ID NO: 1249 - DNA, 1742 bp, Homo sapiens
ggattggagaggtcaataagagtcagcgcctttaaaaagaaatctactcactcttctgtgtgcataaggccgagcagaggttcttcgtctcaagaggaactgacttctgttgagcactcaacacgccacagagaccagccatcttgcaacctcacctcacagcatggagagaggagaccaacctaagagaaccaggaatgaaaacattttcaactgcttatacaaaaaccctgaggcaacttttaagctgatttgctttccctggatgggaggtggctccactcattttgccaaatggggccaagatactcatgatttgctggaagagacagcatctcaccatgttgccaaggctggtctcaaactccggcgctcaagtgatcctcctgcttcagcctacycatgtgctggcgtgagccaccgtaggcgtgagccaccgtgcctggccaaaattcttggtctattctggattctaattttttttatgcactccttaaggcttcctggaagagaaagcagagttgaagaacctcttgaaaatgacatctcccagttagttgatgaagttgtttgtgctctgcagccagtcatccaggataaaccatttgcattttttggccacagtatgggatcctacattgcttttaggactgcactaggtctraaagaaaacaatcaaccagaaccattgcatttatttttgtcaagtgcaactcctgtacattcaaaggcctggcatcgcattcccaaagatgatgaattgtcagaagaacaaataagtcattaccttatggaatttggaggcacccccaagcattttgctgaagccaaggaatttgtgaaacaatgtagtcccatcataagggcagatctgaacattgttagaagttgcacctctaacgtaccatctaaggctgttctttcctgtgacttgacatgttttgttggatctgaagacatagcaaaggacatggaagcctggaaagatgtaaccagtggaaatgctaaaatttaccagcttccagggggtcacttttatcttctggatcctgcraaygagaaattaatcaagaactacataatcaagtgtctagaagtatcatcgatatccaatttttagatattttccctttcacttttaaaataatcaaagtaatatcatactcttctcagttattcagatatagctcagttttattcagattggaaattacacattttctactgtcagggagattcgttacataaatatatttacgtatctggggacaaaggtcaagccagtaaagaatacttctggcagcactttgggaggccaaggcgggcggatcacgaggtcaggagatcgagaccgtcctggctaacaccgtgaaaccccatctctactaaaaatacacaaaattagcygggcgtggtggtgggcacctgtagtcccagctactcgggaggctgaggcaggagaatggtgtgaacctgggaggyggagcttgcagtgaaccgagatcgctccactgcactccagcctgggtgacagatccagactctgtctcaaaaaaaaaaaaaaaaaaatacttctggcagagtcttttatcttcctattaaaatctcasttgattctcctttatgggaagtttgtcgacaaaattcatgattagtaaattatccattttttccttcagttagtttaatggtgaagatgattaacaggggaaatgcttgaagtaaatgattgtttcaatggc

SEQ ID NO: 1250 - DNA, 3188 bp, Homo sapiens
cattgcccctgtaacctgtcaaagaagagctaagggagctttcggggttggcttcttggaggctgctttctcctttacttggaaggcttcgctagtgatggacccatacatgattcagatgagcagcaaaggcaacctcccctcaattctggacgtgcatgtcaacgttggtgggagaagctctgtgccgggaaaaatgaaaggcagaaaggccaggtggtctgtgaggccctcagacatggccaagaaaactttcaaccccatcygagccattgtggacaacatgaaggtgaaaccaaatccaaacaaaaccatgatttccctgtccattggggaccctactgtgtttggaaacctgcctacagaccctgaagttacccaggcaatgaaagatgccctggactcgggcaaatataatggctatgccccatccatcggcttcctatccagtygggaggagattgcttcttattaccactgtcctgaggcacccctagaagctaaggacgtcattctgacaagtggctgcagccaagctattgacctttgtttagctgtgttggccaacccagggcaaaacatcctggttccaagacctggtttctctctctacaagactctggctgagtctatgggaattgaggtcaaactctacaatttgttgccagagaaatcttgggaaattgacctgaaacaactggaatatctaattgatgaaaagacagcttgtctcattgtcaataatccatcaaacccctgtgggtcagtgttcagcaaacgtcatcttcagaagattctggcagtggctgcacggcagtgtgtccccatcttagctgatgagatctatggagacatggtgttttcggattgcaaatatgaaccactggccaccctcagcaccgatgtccccatcctgtcctgtggagggctggccaagcgctggctggttcctggctggaggttgggctggatcctcattcatgaccgaagagacatttttggcaatgagatccgagatgggctggtgaagctgagtcagcgcattttgggaccctgtaccattgtccagggagctctgaaaagcatcctatgtcgcaccccgggagagttttaccacaacactctgagcttcctcaagtccaatgctgatctctgttatggggcgttggctgccatccctggactccggccagtccgcccttctggggctatgtacctcatggttggaattgagatggaacatttcccagaatttgagaacgatgtggagttcacggagcggttagttgctgagcagtctgtccactgcctcccagcaacgtgctttkagtacccgaatttcatccgagtggtcatcacagtccccgaggtgatgatgctggaggcgtgcagcyrgatccaggagttctgtgagcagcactaccattgtgctgaaggcagccaggaggagtgtgataaataggcctgcatccattctcctgaggatgtgtcccatctagggaaggctggactaggccttgcggctcctcagggactcaggtggccctactgggagaggggcctcaaatgcaccatgtcaagggttcaagattgttcctgcttttccccaagtacaaccacacccacactcagatcctcctcattcacatcgcagattctcccttgctctgcgctgctagagtgactcactaattcattaatctgcctccctctcgtaagatttccttctttttttcttgaaagtaccaggtgaacaaagtttaccagaaagcagttgagacaagaaaataagagctcaggatgagggaaaagaaaaagattgagagaatttgtgcccccaaccatttcctcagactctaagaaagaacacgctctctccaggcaggtctgaagctcaactctcttattgcctcacttcaggtatacctcactttacacaatagaattataactggaaagaagttggggacacatgtatttggtgattacattttaaacacattaggaaaagttgctatttgaactttttattgatttttggggggagtaaagaattattttgtgatgcaaataaatatcctttaattgatcgacttgccaaatttagatttgtgtgcatcaggctttcttttttttctttttttagagaagttcaatataagcttttcttttctttgtttctttctttctttattttgagatggagtcttgctctgtcgcccatgctggagtgcagtggcgcgatctcggctcactgcaacctccacctcctgggttcaagcgattctcttgcctcaacctcccaagcagttgggactacaggcgtgagccaccatgcccggctaatttttgtatttttagtagagacagggtttcaccatgttagccaggctggtctcaaactcctgacctcaggcaatctgcccgcctgggtctcctaaagtactgggattacaggcgtgagccacctcgcccagcggcatcaggctttcttaaagtgagagcacgcctgtactagagcaagcaggaatcagagaccttccagaaatactactgtgtaagggccagaaatatcttcacttgtcattgttatataatcattattacttttgctgtaatgttaatattgatttattaatatatattatcttttcatacattttctaagaaacatttatattgataagatcttttattttgccaagggcataaattattgtttttctttttttttttttaataaatttcaccaagtatggctcttctgtgatgtgtttttttctccgtttgggaatttctaatcccaggcactcctcagtctcattgtttcattacctatgaggtttcatttacttctttgtaaatgtactgacttttggagttacttaagaaccacagttcctaaaacattttatttgggagctcaacttctggcttcctacttaccaagaggcagtaagttataacctctkgcctttgtctttacattttcaactttctggatccctaacctctggtcccaagttactacscttgcctatatccactaaccactcactaggtcacaaagttgatggctctggcttgacccagtgaatgagaagtgtcctagatgttttktttttwgaggaacttcaggtctcaaccctgccagtcacacccaattaatgtccttcacaaaaataaac

SEQ ID NO: 1251 - DNA, 2475 bp, Homo sapiens
cattgcccctgtaacctgtcaaagaagagctaagggagctttcggggttggcttcttggaggctgctttctcctttacttggaaggcttcgctagtgatggacccatacatgattcagatgagcagcaaaggcaacctcccctcaattctggacgtgcatgtcaacgttggtgggagaagctctgtgccgggaaaaatgaaaggcagaaaggccaggtggtctgtgaggccctcagacatggccaagaaaactttcaaccccatcygagccattgtggacaacatgaaggtgaaaccaaatccaaacaaaaccatgatttccctgtccattggggaccctactgtgtttggaaacctgcctacagaccctgaagttacccaggcaatgaaagatgccctggactcgggcaaatataatggctatgccccatccatcggcttcctatccagtygggaggagattgcttcttattaccactgtcctgaggcacccctagaagctaaggacgtcattctgacaagtggctgcagccaagctattgacctttgtttagctgtgttggccaacccagggcaaaacatcctggttccaagacctggtttctctctctacaagactctggctgagtctatgggaattgaggtcaaactctacaatttgttgccagagaaatcttgggaaattgacctgaaacaactggaatatctaattgatgaaaagacagcttgtctcattgtcaataatccatcaaacccctgtgggtcagtgttcagcaaacgtcatcttcagaagattctggcagtggctgcacggcagtgtgtccccatcttagctgatgagatctatggagacatggtgttttcggattgcaaatatgaaccactggccaccctcagcaccgatgtccccatcctgtcctgtggagggctggccaagcgctggctggttcctggctggaggttgggctggatcctcattcatgaccgaagagacatttttggcaatgagatccgagatgggctggtgaagctgagtcagcgcattttgggaccctgtaccattgtccagggagctctgaaaagcatcctatgtcgcaccccgggagagttttaccacaacactctgagcttcctcaagtccaatgctgatctctgttatggggcgttggctgccatccctggactccggccagtccgcccttctggggctatgtacctcatggttggaattgagatggaacatttcccagaatttgagaacgatgtggagttcacggagcggttagttgctgagcagtctgtccactgcctcccagcaacgtgctttkagtacccgaatttcatccgagtggtcatcacagtccccgaggtgatgatgctggaggcgtgcagcyrgatccaggagttctgtgagcagcactaccattgtgctgaaggcagccaggaggagtgtgataaataggcctgcatccattctcctgaggatgtgtcccatctagggaaggctggactaggccttgcggctcctcagggactcaggtggccctactgggagaggggcctcaaatgcaccatgtcaagggttcaagattgttcctgcttttccccaagtacaaccacacccacactcagatcctcctcattcacatcgcagattctcccttgctctgcgctgctagagtgactcactaattcattaatctgcctccctctcgtaagatttccttctttttttcttgaaagtaccaggtgaacaaagtttaccagaaagcagttgagacaagaaaataagagctcaggatgagggaaaagaaaaagattgagagaatttgtgcccccaaccatttcctcagactctaagaaagaacacgctctctccaggcaggtctgaagctcaactctcttattgcctcacttcaggtatacctcactttacacaatagaattataactggaaagaagttggggacacatgtatttggtgattacattttaaacacattaggaaaagttgctatttgaactttttattgatttttggggggagtaaagaattattttgtgatgcaaataaatatcctttaattgatcgacttgccaaatttagatttgtgtgcatcaggctttcttttttttctttttttagagaagttcaatataagcttttcttttctttgtttctttctttctttattttgagatggagtcttgctctgtcgcccatgctggagtgcagtggcgcgatctcggctcactgcaacctccacctcctgggttcaagcgattctcttgcctcaacctcccaagcagttgggactacaggcgtgagccaccatgcccggctaatttttgtatttttaagacagggtttcaccatgttgcccaggctggtcttgaactcctgagttcaagtgatctgcccaccttggcctcccaaagtgctgggattacaggcatgagccaccacacccagcc

SEQ ID NO: 1252 - DNA, 3146 bp, Homo sapiens
cattgcccctgtaacctgtcaaagaagagctaagggagctttcggggttggcttcttggaggctgctttctcctttacttggaaggcttcgctagtgatggacccatacatgattcagatgagcagcaaaggcaacctcccctcaattctggacgtgcatgtcaacgttggtgggagaagctctgtgccgggaaaaatgaaaggcagaaaggccaggtggtctgtgaggccctcagacatggccaagaaaactttcaaccccatcygagccattgtggacaacatgaaggtgaaaccaaatccaaacaaaaccatgatttccctgtccattggggaccctactgtgtttggaaacctgcctacagaccctgaagttacccaggcaatgaaagatgccctggactcgggcaaatataatggctatgccccatccatcggcttcctatccagtygggaggagattgcttcttattaccactgtcctgaggcacccctagaagctaaggacgtcattctgacaagtggctgcagccaagctattgacctttgtttagctgtgttggccaacccagggcaaaacatcctggttccaagacctggtttctctctctacaagactctggctgagtctatgggaattgaggtcaaactctacaatttgttgccagagaaatcttgggaaattgacctgaaacaactggaatatctaattgatgaaaagacagcttgtctcattgtcaataatccatcaaacccctgtgggtcagtgttcagcaaacgtcatcttcagaagattctggcagtggctgcacggcagtgtgtccccatcttagctgatgagatctatggagacatggtgttttcggattgcaaatatgaaccactggccaccctcagcaccgatgtccccatcctgtcctgtggagggctggccaagcgctggctggttcctggctggaggttgggctggatcctcattcatgaccgaagagacatttttggcaatgagatccgagatgggctggtgaagctgagtcagcgcattttgggaccctgtaccattgtccagggagctctgaaaagcatcctatgtcgcaccccgggagagttttaccacaacactctgagcttcctcaagtccaatgctgatctctgttatggggcgttggctgccatccctggactccggccagtccgcccttctggggctatgtacctcatggttggaattgagatggaacatttcccagaatttgagaacgatgtggagttcacggagcggttagttgctgagcagtctgtccactgcctcccagcaacgtgctttkagtacccgaatttcatccgagtggtcatcacagtccccgaggtgatgatgctggaggcgtgcagcyrgatccaggagttctgtgagcagcactaccattgtgctgaaggcagccaggaggagtgtgataaataggcctgcatccattctcctgaggatgtgtcccatctagggaaggctggactaggccttgcggctcctcagggactcaggtggccctactgggagaggggcctcaaatgcaccatgtcaagggttcaagattgttcctgcttttccccaagtacaaccacacccacactcagatcctcctcattcacatcgcagattctcccttgctctgcgctgctagagtgactcactaattcattaatctgcctccctctcgtaagatttccttctttttttcttgaaagtaccaggtgaacaaagtttaccagaaagcagttgagacaagaaaataagagctcaggatgagggaaaagaaaaagattgagagaatttgtgcccccaaccatttcctcagactctaagaaagaacacgctctctccaggcaggtctgaagctcaactctcttattgcctcacttcaggtatacctcactttacacaatagaattataactggaaagaagttggggacacatgtatttggtgattacattttaaacacattaggaaaagttgctatttgaactttttattgatttttggggggagtaaagaattattttgtgatgcaaataaatatcctttaattgatcgacttgccaaatttagatttgtgtgcatcaggctttcttttttttctttttttagagaagttcaatataagcttttcttttctttgtttctttctttctttattttgagatggagtcttgctctgtcgcccatgctggagtgcagtggcgcgatctcggctcactgcaacctccacctcctgggttcaagcgattctcttgcctcaacctcccaagcagttgggactacaggcgtgagccaccatgcccggctaatttttgtatttttagtagagacagggtttcaccatgttagccaggctggtctcaaactcctgacctcaggcaatctgcccgcctgggtctcctaaagtactgggattacaggcgtgagccacctcgcccagcggcatcaggctttcttaaagtgagagcacgcctgtactagagcaagcaggaatcagagaccttccagaaatactactgtgtaagggccagaaatatcttcacttgtcattgttatataatcattattacttttgctgtaatgttaatattgatttattaatatatattatcttttcatacattttctaagaaacatttatattgataagatcttttattttgccaagggcataaattattgtttttctttttttttttttaataaatttcaccaagtatggctcttctgtgatgtgtttttttctccgtttgggaatttctaatcccaggcactcctcagtctcattgtttcattacctatgaggtttcatttacttctttgtaaatgtactgacttttggagttacttaagaaccacagttcctaaaacattttatttgggagctcaacttctggcttcctacttaccaagaggcagtaagttataacctctkgcctttgtctttacattttcaactttctggatccctaacctctggtcccaagttactacscttgcctatatccactaaccactcactaggtcacaaagttgatggctctggcttgacccagtgaatgagaagtgtcctagatgttttktttttwttttttttttcgcaaatctt

SEQ ID NO: 1253 - DNA, 1534 bp, Homo sapiens
gcggccgccccgggcaccgcggtgctgctggtcacggccaacgtgggctcgctcttcgacgacccagaaaacctgcagaagaactggcttcgggaattttaccaggtcgtgcacacacacargccgcacttcatggccttgcactgtcaggagtttggagggaagaactacgaggcctccatgtcccacgtggacaagttcgtcaaagaactattgtcgagtgatgcgatgaaagaatataacagggctcgagtctacctggatgaaaactacaaatcccaggagcacttcacggcactaggaagcttttattttcttcatgagtccttaaaaaacatctaccagtttgactttaaagctaagaagtatagaaaggtcgctggcaaagagatctactcggataccttagagagcacgcccatgctggagaaggagaagtttccgcaggactacttccccgagtgcaaatggtcaagaaaaggcttcatccggacgaggtggtgcattgcagactgtgcctttgacttggtgaatatccatcttttccatgatgcttccaatctggtcgcctgggaaacaagcccttccgtgtactcgggaatccggcacaaggcactgggctacgtgctggacagaatcatygatcagcgattcgagaaggtttcctactttgtatttggtgatttcaacttccggctrgattccaagtcygtcgtggagacgctctgcacaaaagccaccatgcagacggtccgggccgccgacaccaatgaagtggtgaagctcatatttcgtgagtcggacaacgaccggaaggttatgctccagttagaaaagaaactcttcgactacttcaaccaggaggttttccgagacaacaacggcaccgcgctcttggagtttgacaaggagttgtctgtctttaaggacagactgtaygaactggacatctcgttccctcccagctacccgtacagtgaggacgcccgccagggtgagcagtacatgaacacccggtgcccagcctggtgtgaccgcatcctcatgtccccgtctgccaaggagctggtgctgcggtcggagagcgaggagaaggttgtcacctatgaccacattgggcccaacgtctgcatgggagaccacaagcccgtgttcctggccttccgaatcatgcccggggcaggtaaacctcatgcccatgtgcacaagtgttgtgtcgtgcagtgacgtggtgggaagagatgccagcgccacgagaggacacttcgtgagcctccctgtagccgtggaccgaatacgcactcttgaaagctgcatcgagaacccgcccaagcgccacctgctagacggccagccccacacttcgcttcagcctccggaccattccggagcagccycacatacctcactgtctcgtctgtctatgtgacattaagtagaaatattggtttttttttttttttttaaataagtcacagtcctgtttttttaatgattgccagtggaggggcttcttcagcacagagacccccca

SEQ ID NO: 1254 - DNA, 2749 bp, Homo sapiens
ccagaaaacctgcagaagaactggcttcgggaattttaccaggtcgtgcacacacacargccgcacttcatggccttgcactgtcaggagtttggagggaagaactacgaggcctccatgtcccacgtggacaagttcgtcaaagaactattgtcgagtgatgcgatgaaagaatataacagggctcgagtctacctggatgaaaactacaaatcccaggagcacttcacggcactaggaagcttttattttcttcatgagtccttaaaaaacatctaccagtttgactttaaagctaagaagtatagaaaggtcgctggcaaagagatctactcggataccttagagagcacgcccatgctggagaaggagaagtttccgcaggactacttccccgagtgcaaatggtcaagaaaaggcttcatccggacgaggtggtgcattgcagactgtgcctttgacttggtgaatatccatcttttccatgatgcttccaatctggtcgcctgggaaacaagcccttccgtgtactcgggaatccggcacaaggcactgggctacgtgctggacagaatcatygatcagcgattcgagaaggtttcctactttgtatttggtgatttcaacttccggctrgattccaagtcygtcgtggagacgctctgcacaaaagccaccatgcagacggtccgggccgccgacaccaatgaagtggtgaagctcatatttcgtgagtcggacaacgaccggaaggttatgctccagttagaaaagaaactcttcgactacttcaaccaggaggttttccgagacaacaacggcaccgcgctcttggagtttgacaaggagttgtctgtctttaaggacagactgtaygaactggacatctcgttccctcccagctacccgtacagtgaggacgcccgccagggtgagcagtacatgaacacccggtgcccagcctggtgtgaccgcatcctcatgtccccgtctgccaaggagctggtgctgcggtcggagagcgaggagaaggttgtcacctatgaccacattgggcccaacgtctgcatgggagaccacaagcccgtgttcctggccttccgaatcatgcccggggcaggtaaacctcatgcccatgtgcacaagtgttgtgtcgtgcagtgacgtggtgggaagagatgccagcgccacgagaggacacttcgtgagcctccctgtagccgtggaccgaatacgcactcttgaaagctgcatcgagaacccgcccaagcgccacctgctagacggccagccccacacttcgcttcagcctccggaccattccggagcagccycacatacctcactgtctcgtctgtctatgtgacattaagtagaaatattggtttttttttttttttttaaataagtcacagtcctgttgtcaaaactctaatagacagcaaagagggtctgtaccgtagacttcacagttttcagtttttaatgattgccagtggaggggcttcttcagcacagagaccccccactgtgtccagggaccccctctgccaggtggaggtgtgtccaggggctggggaagccgagacgggcactccctctgccggccggcagcgtggccctgagcatggcaagggggtctgtctctgccgatgctccttccgcggcactgactctgcgccgtgtcacatggtttttgaatcacactgcagctgctttccatttttatatatatataaatatatataaatatatactttttaaaaataatttataaatcttaccaaaacttatgctaaatatactttccagtatgaacgcacaggagagtcccatcagcaggcggcattggagtctaggagctcagctgtgtgtccatcaacacacaaattcgtaaaaaacacacatggcctcgccatcgtgggtaaaatcggccccacagcacgtctgcaccagcgggccgttactcccatgccgttcttctgtgtaatattaagaactgaatgtgaagtttatagctagcctgggtgtaccttttaagaattttgtaaaccgtttgtctgtcttttgttactgttttatggtgccaagtatcctacgttacaacaataatatcatgggagaaatagaaatagcctagtttgcttccaatagaaactgcttttaacatgggctgtatataaaaatattaaagagaaacaaaactgtacatttcctcattgctccgctacagacaacccatgtcataaccttgttgcaaatatttttctcctatagcagtaagtacagcattagaaggtgattagagagtctgttkatgaaacacaaatgtatgttttattgattttactttagaacactacagagttcctggaccgggtgaaggcattagctgggtgtttgtgtgggataaatactaccactgcaagtgactgctgtccgctgcggaatctgttcttggtggaagcacaggtccgtgtcgctgctgtggttgccgctgtccgcggttcaacacggagtccgccccgcgggtttcagctgttggtcgttctgaggggcctttggaagtgaccggtctggttcctaagcaataaaattgaccgtggtgaaaatagtcccgtgttgctttttcttcctttcccttctcctgccacctttgaaatgctaactcaggggagcggcctcctgtatagcctgttatttgagatcaagctcattagaaatcctggaatttcactgtatcacacgc

SEQ ID NO: 1255 - DNA, 2824 bp, Homo sapiens
atggcggggaaggcggccgccccgggcaccgcggtgctgctggtcacggccaacgtgggctcgctcttcgacgacccagaaaacctgcagaagaactggcttcgggaattttaccaggtcgtgcacacacacargccgcacttcatggccttgcactgtcaggagtttggagggaagaactacgaggcctccatgtcccacgtggacaagttcgtcaaagaactattgtcgagtgatgcgatgaaagaatataacagggctcgagtctacctggatgaaaactacaaatcccaggagcacttcacggcactaggaagcttttattttcttcatgagtccttaaaaaacatctaccagtttgactttaaagctaagaagtatagaaaggtcgctggcaaagagatctactcggataccttagagagcacgcccatgctggagaaggagaagtttccgcaggactacttccccgagtgcaaatggtcaagaaaaggcttcatccggacgaggtggtgcattgcagactgtgcctttgacttggtgaatatccatcttttccatgatgcttccaatctggtcgcctgggaaacaagcccttccgtgtactcgggaatccggcacaaggcactgggctacgtgctggacagaatcatygatcagcgattcgagaaggtttcctactttgtatttggtgatttcaacttccggctrgattccaagtcygtcgtggagacgctctgcacaaaagccaccatgcagacggtccgggccgccgacaccaatgaagtggtgaagctcatatttcgtgagtcggacaacgaccggaaggttatgctccagttagaaaagaaactcttcgactacttcaaccaggaggttttccgagacaacaacggcaccgcgctcttggagtttgacaaggagttgtctgtctttaaggacagactgtaygaactggacatctcgttccctcccagctacccgtacagtgaggacgcccgccagggtgagcagtacatgaacacccggtgcccagcctggtgtgaccgcatcctcatgtccccgtctgccaaggagctggtgctgcggtcggagagcgaggagaaggttgtcacctatgaccacattgggcccaacgtctgcatgggagaccacaagcccgtgttcctggccttccgaatcatgcccggggcaggtaaacctcatgcccatgtgcacaagtgttgtgtcgtgcagtgacgtggtgggaagagatgccagcgccacgagaggacacttcgtgagcctccctgtagccgtggaccgaatacgcactcttgaaagctgcatcgagaacccgcccaagcgccacctgctagacggccagccccacacttcgcttcagcctccggaccattccggagcagccycacatacctcactgtctcgtctgtctatgtgacattaagtagaaatattggtttttttttttttttttaaataagtcacagtcctgttgtcaaaactctaatagacagcaaagagggtctgtaccgtagacttcacagttttcagtttttaatgattgccagtggaggggcttcttcagcacagagaccccccactgtgtccagggaccccctctgccaggtggaggtgtgtccaggggctggggaagccgagacgggcactccctctgccggccggcagcgtggccctgagcatggcaagggggtctgtctctgccgatgctccttccgcggcactgactctgcgccgtgtcacatggtttttgaatcacactgcagctgctttccatttttatatatatataaatatatataaatatatactttttaaaaataatttataaatcttaccaaaacttatgctaaatatactttccagtatgaacgcacaggagagtcccatcagcaggcggcattggagtctaggagctcagctgtgtgtccatcaacacacaaattcgtaaaaaacacacatggcctcgccatcgtgggtaaaatcggccccacagcacgtctgcaccagcgggccgttactcccatgccgttcttctgtgtaatattaagaactgaatgtgaagtttatagctagcctgggtgtaccttttaagaattttgtaaaccgtttgtctgtcttttgttactgttttatggtgccaagtatcctacgttacaacaataatatcatgggagaaatagaaatagcctagtttgcttccaatagaaactgcttttaacatgggctgtatataaaaatattaaagagaaacaaaactgtacatttcctcattgctccgctacagacaacccatgtcataaccttgttgcaaatatttttctcctatagcagtaagtacagcattagaaggtgattagagagtctgttkatgaaacacaaatgtatgttttattgattttactttagaacactacagagttcctggaccgggtgaaggcattagctgggtgtttgtgtgggataaatactaccactgcaagtgactgctgtccgctgcggaatctgttcttggtggaagcacaggtccgtgtcgctgctgtggttgccgctgtccgcggttcaacacggagtccgccccgcgggtttcagctgttggtcgttctgaggggcctttggaagtgaccggtctggttcctaagcaataaaattgaccgtggtgaaaatagtcccgtgttgctttttcttcctttcccttctcctgccacctttgaaatgctaactcaggggagcggcctcctgtatagcctgttatttgagatcaagctcattagaaatcctggaatttcactgtatcacacgc

SEQ ID NO: 1256 - DNA, 1546 bp, Homo sapiens
atggcggggaaggcggccgccccgggcaccgcggtgctgctggtcacggccaacgtgggctcgctcttcgacgacccagaaaacctgcagaagaactggcttcgggaattttaccaggtcgtgcacacacacargccgcacttcatggccttgcactgtcaggagtttggagggaagaactacgaggcctccatgtcccacgtggacaagttcgtcaaagaactattgtcgagtgatgcgatgaaagaatataacagggctcgagtctacctggatgaaaactacaaatcccaggagcacttcacggcactaggaagcttttattttcttcatgagtccttaaaaaacatctaccagtttgactttaaagctaagaagtatagaaaggtcgctggcaaagagatctactcggataccttagagagcacgcccatgctggagaaggagaagtttccgcaggactacttccccgagtgcaaatggtcaagaaaaggcttcatccggacgaggtggtgcattgcagactgtgcctttgacttggtgaatatccatcttttccatgatgcttccaatctggtcgcctgggaaacaagcccttccgtgtactcgggaatccggcacaaggcactgggctacgtgctggacagaatcatygatcagcgattcgagaaggtttcctactttgtatttggtgatttcaacttccggctrgattccaagtcygtcgtggagacgctctgcacaaaagccaccatgcagacggtccgggccgccgacaccaatgaagtggtgaagctcatatttcgtgagtcggacaacgaccggaaggttatgctccagttagaaaagaaactcttcgactacttcaaccaggaggttttccgagacaacaacggcaccgcgctcttggagtttgacaaggagttgtctgtctttaaggacagactgtaygaactggacatctcgttccctcccagctacccgtacagtgaggacgcccgccagggtgagcagtacatgaacacccggtgcccagcctggtgtgaccgcatcctcatgtccccgtctgccaaggagctggtgctgcggtcggagagcgaggagaaggttgtcacctatgaccacattgggcccaacgtctgcatgggagaccacaagcccgtgttcctggccttccgaatcatgcccggggcaggtaaacctcatgcccatgtgcacaagtgttgtgtcgtgcagtgacgtggtgggaagagatgccagcgccacgagaggacacttcgtgagcctccctgtagccgtggaccgaatacgcactcttgaaagctgcatcgagaacccgcccaagcgccacctgctagacggccagccccacacttcgcttcagcctccggaccattccggagcagccycacatacctcactgtctcgtctgtctatgtgacattaagtagaaatattggtttttttttttttttttaaataagtcacagtcctgtttttttaatgattgccagtggaggggcttcttcagcacagagacccccca

SEQ ID NO: 1257 - DNA, 2556 bp, Homo sapiens
cctgcatttccgccctggccctgccctccccgacagccccggctgccggcaggactgaaaactggatatttggtccccatggactttctggtcaccctgtgaagtggacttaactttttcttgaatcatgtggaaggattctgaagtcaaaagtttttaagactctcaggcttactgtggatctggattctaaggcaacacttccttgaagaaacaagcttacagctctgcccggatggccctagtcttcgtgtacggcaccctgaagcggggtcagcccaaccacagggtcctgcgggacggcgcccacggctccgcagcctttcgggcgcgcggccgcacgctggagccctacccgttggtgatcgcgggggagcacaacatcccgtggctgctgcacctgcccggctcggggcgcctcgtggagggcgaggtctacgcggtagacgagcggatgctgcgctttctggatgacttcgagagttgcccggccctgtaccagcgcacggtgctgcgggtacagctgctggaggaccgggccccgggcgcagaggagccgccagcgcccaccgcggtgcagtgcttcgtgtacagcagggccaccttcccgccggagtgggcccagctcccgcaccatgacagctacgactccgaggggcygcacgggctgcgctacaacccccgggagaacagataagggggacgggcagggtgggcctaggtttgagagccctggggctccaagatgcgcccagcccatgctgggtgaaggcggaagccgaacagggccctttccaatgaatctgccggaaaggaaccaatctttcagtggcagctgattttacaaataatgttgagatacgaatagcaaggtgcttccctcccatctttctacctggtaagaaaaatttaggattttaactcccctaaatgacatttagagaactcgtgttatgcctaattcttcttcctcctcgtgttgtttctgctgttggctctgctttgagctcaagataaatatttaggatcagtgtaaagacttggtgttgccgctagattttagcagccctactatactgattctggcctgtaacccctgagaaagccgattttacacggctgggtagaatttgtagaaaagatccacagggcaagcatgctgtatatcagagtgcgtatagcaccattcttcctaattttcagatcaagcttcacagcaaatattaaagattatttaaatttgaagtcgatgttttgggaaatcagatataaaagtgttggtactgtgtttgacccccacgttttttggtatacttatttggtagaaggttctttacattctgatctagcaaaataatgaacacccacttgctggtagacacagctgagcgcccggacttcaagtggaagtttatctgagcccagatctcagtagccagaccccgtccctgccccctgaagggagagcatttgggggtgagtcctttcaaagaagagccaatgcattagtaatttgttcttcaggcctgacagaagcttagcttccaaatacaaacagcacttaaaataattttagcaaggcacgaagtaccaattactacccacctccatctgataattgtcagcatcgattcaactcggtgcacggctcttgcttctgcttcccagcaaagtctgaaatgtattccaaggatttcagaaccaaatgaaaatgcagctgctgtgatctttagtaacctcattctctgttgggagagctcacttactcttcaacttaatggcagactgtgatcgctaactgcatctggcacaaaaacatgatcattatttttagcttcttttgcttaattggaaacttgcttcacaaaaaacacaaaaaggctacgctgggtctcagctgatgagctcgtggcggccctgtgcttgatgagggcggtgaggcagcccaagctccttgtgactgccctggcttgtgcaatggggaagggaccaggcagcgcgctcatcctcaaaacaaacaaaaacagtggagacagcacccccggccaaccaggaagcttcagggtgacctccaggggagtcagccaccaacagtacacccacatagagacacagcaggaaagggattgccaaaatctgcatttgcagtctctggtccttaggaagttttgaaaatcagcaccaggagtgagggcctcacttctagaagtagtaaggcaatcagatgaaaaaatggcaagtgctaatttaataaagcaaggcagagaactgactgacatttatatcaatctcttaaaaggatcacaaagaaatgctggtagtctactggcagagcctgtcgcctatgtgtacattgtcttcattcaaagaaagggcaaactaatatttagacaaatgctcagttttattgatttaattttgacactagggaatctcacagcagaagtacaaatcatatgtacaagtatttatatyaatgaaaatttccattggtgattttttggcagaatattggtcttgactctgtggaataaatgacracgtaaacgtagctgc

SEQ ID NO: 1258 - DNA, 5665 bp, Homo sapiens
tttcgttatgtgatatccctctacaggatgagttttaatggatgctggtgctaacatcgtatgaaattgaggtaggaggcgggactctgacaccagaccagattgaggactagctaatcatcatactttacataaggaatccgtaggattggagagttgattgtttcaaataaggctggtttccttatttggttatttccttagaataataactccaaatctgattatttccttagaatacattcttatgagtagaactgcagctcaaactaaatttggtgctgtccagtggtatggcgatggacttcagaacatcctccactcttgccctcaccccacaagaaccctttactcgggatccattctcacgcagtcttyctccccgaccgccccgcgcgtccgctcggcgggatgacaaagaccgcctcgggtggggtggtgagcagtaccggcctcctccagcagggggcgctgtgggatccgccgctgtcygggacgaaccagcaagccgctctcggtccacacacgctctgtctgcctgccccgagtcccccgggaggccgcggggttyggggaagtgtttctaggagacggcgctcaccggctgcacctgcgccgttgacgccaccggggccggcagacagacccgcggcgctggctggtggagggagttcccgcttgctctctstcgctgtcaccgccctgtttctgtagccgtatggtacgcctgtgagaccggctgccggctgacgtctccttgcgatggagcatatccggacgaccaaggtcgaacaagtaaaattacttgaccgattcagtaccagcaacaagtcattaacaggaacactgtatcttacggctacacatctattatttatcgactctcatcaaaaagaaacctggatattacaccaccatattgcctcagtagagaaacttgctttgactacttctggatgcccccttgtgatacagtgcaagaacttcagaactgtgcatttcattgttcccagagaaagagattgccatgatatttacaactctttgctwcaactgtcaaaacaagcaaaatatgaagatctctatgcattttcttataatcccaaacaaaatgattcagaacgactacaaggctggcagctcattgatctcrctgaggaatataagaggatgggagtgccaaactcacactggcagttgtctgatgccaaccgggactacaagatttgtgaaacttaccccagagaactttatgttccccggatagcaagcaaaccaataattgttggtagttccaagttccggagcaagggaagattcccagttctttcctactatcatcaagataaggaggctgccatttgtcgatgtagtcagccactctctggattcagtgccaggtgcctggaggatgaacatttgcttcaagccattagtaaagccaatccagtcaatcgctatatgtacgtcatggataccaggccaaaactgaatgcaatggccaacagagcagctggaaaaggttatgaaaatgaagacaactattccaatattagatttcagtttgttggaattgaaaatattcatgtcatgaggtccagccttcagaaattattggaagtcaatggcactaaagggctttctgtcaatgatttctactccggtttggagagctcgggatggcttcgccatatcaaagctgttatggatgctgcartcttcttggccaaagcaataacagttgaaaatgcaagtgtgttggtgcattgttccgatggttgggataggacttcccaggtttgttccctgggttctcttttattggattcctactacaggacaatcaaaggattcatggttttaatagaaaaggattggatctcttttggacataaattttcagagaggtgtggccagttggatggtgacccaaaggaagtctcaccagtgtttactcagttcttggaatgtgtgtggcatttgaccgaacagtttccacaagcctttgaattcagtgaagcatttcttcttcagatccatgagcatattcattcatgccagtttggaaacttccttggaaattgtcagaaggaaagagaagagctcaagttgaaggagaagacttattccctgtggccatttcttttggaagaccaaaagaagtacttaaatcctctctacagttccgaatctcacagatttacagttttggagccaaatacagtatctttcaattttaagttttggaggaacatgtaccatcartttgatcgaacactgcatcctaggcagtctgtatttaatataattatgaatatgaatgagcaaaataaacaattagagaaagatattaaagacctagaatctaaaattaaacaacgcaaaaataagcaaacagatggcatcctcaccaaggaattgttacattcagttcatcctgaatcacctaacctcaaaacttccctgtgttttaaagagcagactctgctacccgtaaatgatgctcttcgaactatagagggcagcagcccggcagataatcgttayagtgaatatrcagaagagttttctaaatcagaacctgctgtggtcagcttagagtatggtgtggcaagaatgacttgttagactcatagagttttttctgcaatgattgcagtacaagaaaaggattattgtgaggatggtctgtaagcataaccaaaaggaatttgtctaataacaattttagggtttaacagtaggctaatagttgaaggaaggataataactrcccttgtgagagaaatawgtcattttaattgcatttccagcaaggaatgacattcagttctgtaagaaatgagtggtatttgatgtatttactcaaaacacaatttgcactgtacactagtgaattgacgtttatgatttatgttaattcagccaaacataaataaccttccttaagtacaatttaacttcaagaaaacaaaatttgacaacatagtttcttaataaatgatatggcatgtactttcaattatgtagctttgtaactatgaatatttacatattttgccttttagtgatatttaatgttaaagtgccatgaaaaatatttctaagaaagccttaaattcccagtggattctttacccttaagttttacagcctacaacaagattttttgttttgtttttcttctggtcagccttgttttgtttgtaaagaattgtgctctcattactgctgggggtgcatgctacaatacttctatataaacacttgtagaagtacactgttcacgtttagcctgccccacttttgtattcaaaattaatgaaactgaaggtttattctgatcataatttgtttagtgctacatttgataatttattatttacagcttagaatattgatttcttgaatacgtataagcacatttgactgtcttttatatatggattactgcattccattgattcttattttgtggttggctttatttctttcacaactgtgtaagtttaaagagctaaagctctaaaactgttctgagaaacaatgaatagtacatgtatatgtatatttttaaactgccttattgctcaatgagttgctgttcctggagtatctaactttcagtttactcaaaaacttttgggtaaataaaaaagggaagtacagatagtttaggttgtgcatggttgcatgaattttgaagtcattyctatgtggagcattatttttcttcttgttaaatatagaaaaaaaaagagattctagtacaaagttactgtttaacaaaagcaacataaactctgggaaagatttcattttgccatgttatatttactgtttattctgtgtactagtacatatctttaaattaccaaaaaacaagaaacaaaacataaaaaccccaaaactatcacttggaattagcaatatcacccaactggctttaaaattgaaaatttaaataacatggtggcatgaagtacaattcgagtattaggcaatttgcatagtgttcctcatgctactttctgttacacctctattatattagttttgaatataaacatctttttcagaccaaaaaaaactttattgtatgagagcttatcttatcctgtttatttttccaatgcttttctgtaatacattatgtaatttaaaaaatattcctttttaaacagcaacagaaatgcactataaaatatagtatgtgattaaccaatcctgcttccatatttaagcactgggaatggaaacttaatctctgtgactacaaagggaagtttttgtgccttggtgttccagtcactgattgtggttttagaatcttctgtggctgacttcttgtattcaactctggtttattatcttaatcttcaacttcagacatayatttgtgtgtttatatgctcacaggtggactgagaaatcagttacatcttaagtgacctacagggtatatgttggcaaaagcagactgtgtatatgtcttataaagttgaatttatgttcagtgtgtttggaagtgtatagcatgtaaattatttcatatatgatttaaaggtaattaaatgttcacattttactttgaatgtttttcttctggataaaacaaatggaatcaagttgtagttgttttttttttcttctcacctaggcaagtagacttgcccattacattaacataacagcataaggtttgaggagtttattttccaaaagtttgttgataaataatacctgtttcatacaaaaataatttccagaatatttaaaataggtatagtgggctaaaaggcccatcagatgtaggtaataatgtcattaagttttcattttgttcctgtcacttgcttatattacaatcactatttttttgtgcccttgccaacttgatggaaggcagggtccattgagtacaaacattcgaggtgaaatgtctctccaaaggcagatctggatgtaaatatgaggaagaaaataactggctgacaagaggataattttattgagggtgttttgaaaaggtcagctaggctagaagtagctcagggaatcttgagtaaagatgaagggaactcttttaaaacaaattcaatttatttggtcgggtagcagagcagggaggtggtgtcagtcaagcctgttttgaaacattttttgcagaaggtcagctttaaaatattgaaaaatttccagttgacatgctaagttggattaaatgctgatcatttataaaactatatagttgctgcaaaagtaattggggcttttgccattgaaagtgatgacaaaaaccgcaattacttttgcaccaacctaatactacagttgcagacttttattagtgacgctgatcttcattagtcaagttttagttattttgttggcttttccatgtagaattccaagtgacattaacatactttgattaattaaagaaaatttggagactgtttaagatatatgtctagatatcaatgtaaactataagctttaggaacttacatctagaagaaagcctggaatctagaataattatctcaaaaaaaagtatatataccattgtacttgatataagaaaatgtaaacatgaaaccttgacattttaataaacagtatttgtgctactctagttatttctaggaaagtaaaatatcca

SEQ ID NO: 1259 - DNA, 3627 bp, Homo sapiens
atgagcatattcattcatgccagtttggaaacttccttggaaattgtcagaaggaaagagaagagctcaagttgaaggagaagacttattccctgtggccatttcttttggaagaccaaaagaagtacttaaatcctctctacagttccgaatctcacagatttacagttttggagccaaatacagtatctttcaattttaagttttggaggaacatgtaccatcartttgatcgaacactgcatcctaggcagtctgtatttaatataattatgaatatgaatgagcaaaataaacaattagagaaagatattaaagacctagaatctaaaattaaacaacgcaaaaataagcaaacagatggcatcctcaccaaggaattgttacattcagttcatcctgaatcacctaacctcaaaacttccctgtgttttaaagagcagactctgctacccgtaaatgatgctcttcgaactatagagggcagcagcccggcagataatcgttayagtgaatatrcagaagagttttctaaatcagaacctgctgtggtcagcttagagtatggtgtggcaagaatgacttgttagactcatagagttttttctgcaatgattgcagtacaagaaaaggattattgtgaggatggtctgtaagcataaccaaaaggaatttgtctaataacaattttagggtttaacagtaggctaatagttgaaggaaggataataactrcccttgtgagagaaatawgtcattttaattgcatttccagcaaggaatgacattcagttctgtaagaaatgagtggtatttgatgtatttactcaaaacacaatttgcactgtacactagtgaattgacgtttatgatttatgttaattcagccaaacataaataaccttccttaagtacaatttaacttcaagaaaacaaaatttgacaacatagtttcttaataaatgatatggcatgtactttcaattatgtagctttgtaactatgaatatttacatattttgccttttagtgatatttaatgttaaagtgccatgaaaaatatttctaagaaagccttaaattcccagtggattctttacccttaagttttacagcctacaacaagattttttgttttgtttttcttctggtcagccttgttttgtttgtaaagaattgtgctctcattactgctgggggtgcatgctacaatacttctatataaacacttgtagaagtacactgttcacgtttagcctgccccacttttgtattcaaaattaatgaaactgaaggtttattctgatcataatttgtttagtgctacatttgataatttattatttacagcttagaatattgatttcttgaatacgtataagcacatttgactgtcttttatatatggattactgcattccattgattcttattttgtggttggctttatttctttcacaactgtgtaagtttaaagagctaaagctctaaaactgttctgagaaacaatgaatagtacatgtatatgtatatttttaaactgccttattgctcaatgagttgctgttcctggagtatctaactttcagtttactcaaaaacttttgggtaaataaaaaagggaagtacagatagtttaggttgtgcatggttgcatgaattttgaagtcattyctatgtggagcattatttttcttcttgttaaatatagaaaaaaaaagagattctagtacaaagttactgtttaacaaaagcaacataaactctgggaaagatttcattttgccatgttatatttactgtttattctgtgtactagtacatatctttaaattaccaaaaaacaagaaacaaaacataaaaaccccaaaactatcacttggaattagcaatatcacccaactggctttaaaattgaaaatttaaataacatggtggcatgaagtacaattcgagtattaggcaatttgcatagtgttcctcatgctactttctgttacacctctattatattagttttgaatataaacatctttttcagaccaaaaaaaactttattgtatgagagcttatcttatcctgtttatttttccaatgcttttctgtaatacattatgtaatttaaaaaatattcctttttaaacagcaacagaaatgcactataaaatatagtatgtgattaaccaatcctgcttccatatttaagcactgggaatggaaacttaatctctgtgactacaaagggaagtttttgtgccttggtgttccagtcactgattgtggttttagaatcttctgtggctgacttcttgtattcaactctggtttattatcttaatcttcaacttcagacatayatttgtgtgtttatatgctcacaggtggactgagaaatcagttacatcttaagtgacctacagggtatatgttggcaaaagcagactgtgtatatgtcttataaagttgaatttatgttcagtgtgtttggaagtgtatagcatgtaaattatttcatatatgatttaaaggtaattaaatgttcacattttactttgaatgtttttcttctggataaaacaaatggaatcaagttgtagttgttttttttttcttctcacctaggcaagtagacttgcccattacattaacataacagcataaggtttgaggagtttattttccaaaagtttgttgataaataatacctgtttcatacaaaaataatttccagaatatttaaaataggtatagtgggctaaaaggcccatcagatgtaggtaataatgtcattaagttttcattttgttcctgtcacttgcttatattacaatcactatttttttgtgcccttgccaacttgatggaaggcagggtccattgagtacaaacattcgaggtgaaatgtctctccaaaggcagatctggatgtaaatatgaggaagaaaataactggctgacaagaggataattttattgagggtgttttgaaaaggtcagctaggctagaagtagctcagggaatcttgagtaaagatgaagggaactcttttaaaacaaattcaatttatttggtcgggtagcagagcagggaggtggtgtcagtcaagcctgttttgaaacattttttgcagaaggtcagctttaaaatattgaaaaatttccagttgacatgctaagttggattaaatgctgatcatttataaaactatatagttgctgcaaaagtaattggggcttttgccattgaaagtgatgacaaaaaccgcaattacttttgcaccaacctaatactacagttgcagacttttattagtgacgctgatcttcattagtcaagttttagttattttgttggcttttccatgtagaattccaagtgacattaacatactttgattaattaaagaaaatttggagactgtttaagatatatgtctagatatcaatgtaaactataagctttaggaacttacatctagaagaaagcctggaatctagaataattatctcaaaaaaaagtatatataccattgtacttgatataagaaaatgtaaacatgaaaccttgacattttaataaacagtatttgtgctactctagttatttctaggaaagtaaaatatcca

SEQ ID NO: 1260 - DNA, 1233 bp, Homo sapiens
cgggaactgctcctcccgccagccgctgctttaagaggctgctccgcggtagcgagcggggccggagccgcagcccgaacgagcggaccgagccgaccgggcagstgcacggctgcggggacggcagcggcatgaccggccaccacggctggggctacggccaggacgacggcccctcgcattggcacaagctgtatcccattgcccagggagatcgccaatcacccatcaatatcatctccagccaggctgtgtactctcccagcctgcaaccactggagctttcctatgaggcctgcatgtccctcagcatcaccaacaatggccactctgtccaggtagacttcaatgacagcgatgaccgaaccgtggtgactgggggccccctggaagggccctaccgcctcaagcagtttcacttccactggggcaagaagcacgatgtgggttctgagcacacggtggacggcaagtccttccccagcgagctgcatctggttcactggaatgccaagaagtacagcacttttggggaggcggcctcagcacctgatggcctggctgtggttggtgtttttttggagacaggagacgagcaccccagcatgaatcgtctgacagatgcgctctacatggtccggttcaagggcaccaaagcccagttcagctgcttcaaccccaagtgcctcctgcctgccagccggcactactggacctacccgggctctctgacgactcccccactcagtgagagtgtcacctggattgtgctccgggagcccatctgcatctctgaaaggcagatggggaagttccggagcctgctttttacctcggaggacgatgagaggatccacatggtgaacaacttccggccaccacagccactgaagggccgcgtggtaaaggcctccttccgggcctgagctgcccatctgcctagccggccactagggcaccatcttctcaagggcttccatgtcagcagacaccaaaccatctgaggcttcctccctggggggtgctggggaccctccttcagccagtttgctccttggtcaccctggaggcttctggatgggacccttgagtctggggcacccttcagctgccctggggacaggaaggacaggagctaagcagggtccaagcctggggctgcctctgctctccaagacccaaagaccctgggaacctcctctggtcttccccactggcagtggcagcagcccc

SEQ ID NO: 1261 - DNA, 890 bp, Homo sapiens
cgggaactgctcctcccgccagccgctgctttaagaggctgctccgcggtagcgagcggggccggagccgcagcccgaacgagcggaccgagccgaccgggcagstgcacggctgcggggacggcagcggcatgaccggccaccacggctggggctacggccaggacgacggcccctcgcattggcacaagctgtatcccattgcccagggagatcgccaatcacccatcaatatcatctccagccaggctgtgtactctcccagcctgcaaccactggagctttcctatgaggcctgcatgtccctcagcatcaccaacaatggccactctgtccaggtagacttcaatgacagcgatgaccgaaccgtggtgactgggggccccctggaagggccctaccgcctcaagcagtttcacttccactggggcaagaagcacgatgtgggttctgagcacacggtggacggcaagtccttccccagcgagctgcatctggttcactggaatgccaagaagtacagcacttttggggaggcggcctcagcacctgatggcctggctgtggttggtgtttttttggagacaggagacgagcaccccagcatgaatcgtctgacagatgcgctctacatggtccggttcaagtgcctcctgcctgccagccggcactactggacctacccgggctctctgacgactcccccactcagtgagagtgtcacctggattgtgctccgggagcccatctgcatctctgaaaggcagatggggaagttccggagcctgctttttacctcggaggacgatgagaggatccacatggtgaacaacttccggccaccacagccactgaagggccgcgtggtaaaggcctccttccgggcctga

SEQ ID NO: 1262 - DNA, 1914 bp, Homo sapiens
tatttagatcttcacagactggatgttaagcaagtggaaaggcagaacagcctccactcgcggtgcacggggaagagtgggcggcggacgtggttttgggcctgggacccaggtgttcctctaggcccagggcgggcatcgctgcccatccgtcccacaggtggttctgaggcgtctctcaacagccatatggcggacaccagaacccgggtgtaacagtgacccgtttctgtgtgggtccccactcccagggagggcaggagagcgccgggggcgtaacccccctcccccacgctggcaccagagtgtgagcagaatcggcttaaggcagctcccagtccccatcgcccccaaggtcgaaagaatcgggacaggaaatgggtcgggggaccgagtttgggccggaatgttcagagcgtgtccgtcctgctctttaaaggccctctctccatcccagaaccaaagccgagcgcccccagcgctcgctgcggtctcgcgcccgggtaacggccgatggccgcccccgycccagccgcagccggggaggaaatcccgcgcctcggaagaggcgcttcgggctcgggcgggttccggaagccgaggggccgggagtaggtgggcgcataggggctcctgggaggcgggaccaagacgcgcgttaccgggaggccaggcccggcgctgcaccctccgcggcccggggcctgaggccgggctcccgcgacttcccggcccaaagcagcgcagcgcccgggcggcccagccccgcagcggccacagcagcatagccgggcgagcggatccagaggcccgggsttccttcytgtgcgagtcggcgcggacgactgctagtccagccgttgggcgccgcctggatcccggcgcctggcccttaaagagacccggtcgcatttcatctcagcaagaggagaaatactcgaagggagaggttcgccgctggcagccagaagccttaccactgctaggacgctggcagaacgcacccataacttggcaacactcggaggatggatggcaaataataccagcgactgaagggttaattaatgattgcagattaattgaacaccttctgtaatcagacacctggcacacactcatgatgtcacttattcctcccaacaaccctgcaaatagataactgtctctcccattctccgagcttgtcctcagagaattaggtaacttgttcaaaatggtcagaagcaacagatataactccttgctctactctttccccccttctcactactgcacttgactagtctttttaaaacataaattttttggccaggcacggtggctcacgcctgtaatcccagcactttgggaggccaaggaaggcagatcacctgaggccagaagttcgagaccagccttggccaacatggcgaaaccccatcgctactaaaaatgcaaaaattagctgggtgtggtggggggcacccgtattcccagctactcaggaggctgaggcaggaaaatcgcttgaacctgggaggcagagattgcagtgagccgagatcactgcactgcactccagcctgagcaacagagggacacttcgttccccccgccaaaaaaaaaatttttttttaatgatcagaagcggctgggcgcggtggctcgggcctgtaatcccagcactttcggaggccgaggaaggtagatcacttgaggtcatgagttcaagaccagcctgaccaacatggccaaaaactgtctctactaaaaatacaaaaattagccgggcgtggtagcgcacgcctgtaatcccagctactcaggaggctcaggcacgagaatcgcttgagtctgggaggcggaggttgcagtgagctgagatcgtggccactgcaatccagcctgggcgatagagtgagactacgtctc

SEQ ID NO: 1263 - DNA, 2780 bp, Homo sapiens
ggaccgcctgggtgaggtgaggacctggtggccgcagttgtggcactgtgcgcaggcgctgaactgaccggacggagcgggcggctgtggcctcgccagctggtgagaagcgggcgagggtccgaggtttaaaaatatccttttttgctgaaggaacacatttgctggtatagtttcagaatgtcaagtactgtgtcctactggatcttaaattctacaaggaacagcattgccacattgcaagggggtagacgcttatactccaggtatgtctcaaataggaataaattaaaatggaggctcttttcccgggtgccacccaccctaaacagttccccatgtggtggctttactctgtgcaaagcctacagacacacatcaacagaggaagatgattttcacttgcaactcagccctgagcagataaatgaagtgcttcgagctggcgagacaacccacaagattcttgaccttgaaagcagagtcccaaattcagtgttgcggtttgagagcaaccagctggctgccaattccccagtggaggaccggcgaggtgtagcctcctgcctgcaaaccaatggactgatgtttggcatcttcgatggacatggtggtcatgcatgtgcccaagcagtgagcgagaggctcttctactatgtggcagtgtccctgatgtcccaccagaccctggagcacatggagggagctatggaaagcatgaaacccttgctgcccatcctgcattggctcaagcacccaggggacagtatctacaaggatgtcacatctgtgcatcttgaccacctccgtgtctattggcaggaactgcttgatttgcacatggaaatgggactaagcattgaagaagcattaatgtactccttccagagactggattctgacatctcgctggaaatccaggcccccctggaagatgaggtgacaaggaacctgtcactccaggttgctttctctggggcaacagcttgcatggcccatgttgatggaattcacttgcacgtggcaaatgctggtgactgccgagccatccttggtgtccaagaggacaatggcatgtggtcttgtctgccccttacacgtgaccacaatgcctggaaccaggccgagctgtcccggctaaagagggagcaccctgagtcagaggacaggacgatcatcatggaggacaggctactgggcgtcctcatcccctgcagggcctttggggatgttcagctgaagtggagtaaagagttgcagcgcagcattctggagaggggcttcaataccgaggccctcaacatttaccagttcacacccccacactactacactccaccctacctgactgctgagcctgaggtcacataccacaggctgaggccccaggataagttccttgtgctggcctcagatggcctgtgggacatgctgagcaatgaggacrtggtaaggctggtggtggggcacctggctgaggcagattggcacaagacagacctggcccagagacccgccaacttggggctcatgcagagcctgctgctgcagaggaaagccagcgggctccacgaggctgaccaaaatgcagccacgcggctgatcagacatgccatcgggaacaatgagtatggggagatggaggcagagcggctggcggcgatgctgacattgccagaggacttggcgaggatgtacagggatgatatcactgtcactgtggtgtattttaactcagaatcaatcggtgcatattacaaggggggttaagaatctcccatcctattgtcaaggttaacataaatgctcttctaaaatgtttcacttactcctaaactagctatccaaaccttactattaaaagcgcaggcagatttaatttgctaaatagactaacaggaggaaaaaaacaaacagcctagctttaaaaaacagtgaaatagcagtgatttcatgtccctgtatgttctgattaagtcttatatgcagagaggacagagcataaagtctatagaattggcttgggcttgtgtagccccagtcatttgataaagatgttgttaaactgtgtcagcctgagccttcaaagggtaaatttaatcatgattctgagaataaagaacttcaggagcttcttaggtcttgccacaaaaatctgcaaatttgataattctcctgaattcacaatcatggacttgtagactatgaagagatattttatttgtttgtcttttatttaaattactaaggtctaggtttacaaagcatactacaggacccttttctatgcaatatcctaacttttttttttgtgattatgcttgtgagaaattttgtaatactacattctagttctgttttcgtttattttaaaactgaatccttaaacttgcaaacacgcctactgtaagcatgcttggaatgacttgttttggttttcagctrataggatctatgcctctggaccagctgaacttactggtgcagctttttgtgccctctactgagtcccattccagaaactttgagccatgctaggaggtaactagtctatgccttaactcctgacctttcctgcattagtaaaatttcctcctgggctgagcctttgggggttgattcacagcatttaagctttctgattatacctctcaaacattcttctgtcaattccacacaatccttctacctctgctatgctgaacccctcattcaccctgcacctgccaactgcaaaatattgtctgaaagaatctttcacatgttcctgcttcctatgg

SEQ ID NO: 1264 - DNA, 2499 bp, Homo sapiens
aaaaacggtggcaacacgctgggtttgctttacaacgcctgggaagctttgtygtttgcaataaattttaatwcttgtctgtttcggtctgcactgcctttatgagctgtaacactcacggggtaggtttgcagcttcactcctgaagccagtaagacaacgaacccactgggagaaacaaacaactccagacgcgccgacttaagagctrtaatactcgctgtgacggtctgcagsttcactcctgagccagcgagaccacgaacccaccagaaggaagaaactccgaacacatctgaacatcagaaggaacagactccggacacgccgcctttaagaactgtaacactcaccgcgagggtgggcggtttcattcctgaagtcagtgagaccaagaaccaaccaattccggacacacttggactcgacagactctaaggtccagccggccggtgagcgcctggggaccgcagaggtgagagtcgcgcccgggagtccgccgcctgcgccaggatggagttcgtgaaatgcctyggccaccccgaagagttctacaacctggtgcgcttccggatcgggggcaagcggaaggtgatgcccaagatggaccaggactcgctcagcagcagcctgaaaacttgctacargtatctcaatcagaccagtcgcagtttcgcagctgttatccaggcgctggatggggaaatgcgcaaygcagtgtgcatattttatctggttctccgagctctggacacactggaagatgacatgaccatcagtgtggaaaagaaggtcccgctgttacacaactttcactctttcytttmccaaccagactggcggttcatggagagcaaggagaaggatcgccaggtgctggaggacttcccaacgatctcccttgagtttagaaatctggctgagaaataccaaacagtgattgccgacatttgccggagaatgggcattgggatggcagagtttttggataagcatgtgacctctgaacaggagtgggacaagtactgccactatgttgctgggctggtcggaattggcctttcccgtcttttctcagcctcagagtttgaagaccccttagttggtgaagatacagaacgtgccaactctatgggcctgtttytgcagaaaacaaacatcatccgtgactatctggaagaccagcaaggaggaagagagttctggcctcaagaggtttggagcaggtatgttaagaagttaggggattttgctaagccggagaatattgacttggccgtgcagtgcctgaatgaacttataaccaatgcactgcaccacatcccagatgtcatcacctacctttcgagactcagaaaccagagtgtgtttaacttctgtgctattccacaggtgatggccattgccactttggctgcctgttataataaccagcaggtgttcaaaggggcagtgaagattcggaaagggcaagcagtgaccctbatgatggatgccaccaatatgccagctgtcaaagccatcatatatcagtatatggaagagatttatcatagaatccccgactcagacccatcttctagcaaaacaaggcagatcatctccaccatccggacgcagaatcttcccaactgtcagctgatttcccgaagccactactcccccatctacctgtcgtttgtcatgcytttggctgccctgagctggcagtacctgaccactctctcccaggtaacagaagactatgttcagactggagaacactgatcccaaatttgtccatagggtgcctcatcccagcaacctgtccttgtgggtgatgatcactgtgmtgcttgyggctcatggcagagcattcagtgccmcggtttaggtgaagtcgctgcatatgtgactgtcatgagatcctacttagtatgatcctggctagaatgataattaaaagtatttaatttgaagcaccatttgaatgttcgtamtagtagaaaatgatgtgaattttctttctgttcggctcctatttttctcatcattttgttttctttaattgggttgaatggagtagatagaaatatttatggtttaggtaacagttagatgtttcctaagaatgcaaactgccttttccacacaaaggctgggaataaaattctgggtattctcstattctcatttaaaggagtttagctttcagagagaaacagcaggattgcttttgaccttttagaagattggtctccagtaaaggtggacatttttgagatttttataataaagaatttaattgctctgcatttgtcaagtacagttcgcttgaaagcctgcctgactgtggaaaagatggagctcaagaatggagttgatggcccagcgtggtggctcatgcctgtaatcccagcactttgggaggctgaggcggtcggatcacgacattaggggatcgagaccatcctggctaacacggtgaaaccccgtctctactaaaaaaaaaaaaaatta

SEQ ID NO: 1265 - DNA, 2804 bp, Homo sapiens
aaaaacggtggcaacacgctgggtttgctttacaacgcctgggaagctttgtygtttgcaataaattttaatwcttgtctgtttcggtctgcactgcctttatgagctgtaacactcacggggtaggtttgcagcttcactcctgaagccagtaagacaacgaacccactgggagaaacaaacaactccagacgcgccgacttaagagctrtaatactcgctgtgacggtctgcagsttcactcctgagccagcgagaccacgaacccaccagaaggaagaaactccgaacacatctgaacatcagaaggaacagactccggacacgccgcctttaagaactgtaacactcaccgcgagggtgggcggtttcattcctgaagtcagtgagaccaagaaccaaccaattccggacacacttggactcgacagactctaaggtccagccggccggtgagcgcctggggaccgcagaggtgagagtcgcgcccgggagtccgccgcctgcgccaggatggagttcgtgaaatgcctyggccaccccgaagagttctacaacctggtgcgcttccggatcgggggcaagcggaaggtgatgcccaagatggaccaggactcgctcagcagcagcctgaaaacttgctacargtatctcaatcagaccagtcgcagtttcgcagctgttatccaggcgctggatggggaaatgcgcaaygcagtgtgcatattttatctggttctccgagctctggacacactggaagatgacatgaccatcagtgtggaaaagaaggtcccgctgttacacaactttcactctttcytttmccaaccagactggcggttcatggagagcaaggagaaggatcgccaggtgctggaggacttcccaacgatctcccttgagtttagaaatctggctgagaaataccaaacagtgattgccgacatttgccggagaatgggcattgggatggcagagtttttggataagcatgtgacctctgaacaggagtgggacaagtactgccactatgttgctgggctggtcggaattggcctttcccgtcttttctcagcctcagagtttgaagaccccttagttggtgaagatacagaacgtgccaactctatgggcctgtttytgcagaaaacaaacatcatccgtgactatctggaagaccagcaaggaggaagagagttctggcctcaagaggtttggagcaggtatgttaagaagttaggggattttgctaagccggagaatattgacttggccgtgcagtgcctgaatgaacttataaccaatgcactgcaccacatcccagatgtcatcacctacctttcgagactcagaaaccagagtgtgtttaacttctgtgctattccacaggtgatggccattgccactttggctgcctgttataataaccagcaggtgttcaaaggggcagtgaagattcggaaagggcaagcagtgaccctbatgatggatgccaccaatatgccagctgtcaaagccatcatatatcagtatatggaagagatttatcatagaatccccgactcagacccatcttctagcaaaacaaggcagatcatctccaccatccggacgcagaatcttcccaactgtcagctgatttcccgaagccactactcccccatctacctgtcgtttgtcatgcytttggctgccctgagctggcagtacctgaccactctctcccaggtaacagaagactatgttcagactggagaacactgatcccaaatttgtccatagctgaagtccaccataaagtggatttactttttttctttaaggatggatgttgtgttctctttatttttttcctactactttaatccctaaaagaacgctgtgtggctgggaccttwaggaaagtgaaatgcaggtgagaagaacctaaacatgaaaggaaagggtgcctcatcccagcaacctgtccttgtgggtgatgatcactgtgmtgcttgyggctcatggcagagcattcagtgccmcggtttaggtgaagtcgctgcatatgtgactgtcatgagatcctacttagtatgatcctggctagaatgataattaaaagtatttaatttgaagcaccatttgaatgttcgtamtagtagaaaatgatgtgaattttctttctgttcggctcctatttttctcatcattttgttttctttaattgggttgaatggagtagatagaaatatttatggtttaggtaacagttagatgtttcctaagaatgcaaactgccttttccacacaaaggctgggaataaaattctgggtattctcstattctcatttaaaggagtttagctttcagagagaaacagcaggattgcttttgaccttttagaagattggtctccagtaaaggtggacatttttgagatttttataataaagaatttaattgctctgcatttgtcaagtacagttcgcttgaaagcctgcctgactgtggaaaagatggagctcaagaatggagttgatggcccagcgtggtggctcatgcctgtaatcccagcactttgggaggctgaggcggtcggatcacgacattaggggatcgagaccatcctggctaacacggtgaaaccccgtctctactaaaaaaaaaaaaaattagccaggcgtggtggcgggtgcctgtagttccagctactcgggaggctgaggcaggagaatggcttaaacccgggaggcggagcttgcagtgagctcagatcgcgccactgcactccagtctgggcaacagagcgagactccat

SEQ ID NO: 1266 - DNA, 2365 bp, Homo sapiens
gtccagccggccggtgagcgcctggggaccgcagaggtgagagtcgcgcccgggagtccgccgcctgcgccaggatggagttcgtgaaatgcctyggccaccccgaagagttctacaacctggtgcgcttccggatcgggggcaagcggaaggtgatgcccaagatggaccaggactcgctcagcagcagcctgaaaacttgctacargtatctcaatcagaccagtcgcagtttcgcagctgttatccaggcgctggatggggaaatgcgcaaygcagtgtgcatattttatctggttctccgagctctggacacactggaagatgacatgaccatcagtgtggaaaagaaggtcccgctgttacacaactttcactctttcytttmccaaccagactggcggttcatggagagcaaggagaaggatcgccaggtgctggaggacttcccaacgatctcccttgagtttagaaatctggctgagaaataccaaacagtgattgccgacatttgccggagaatgggcattgggatggcagagtttttggataagcatgtgacctctgaacaggagtgggacaagtactgccactatgttgctgggctggtcggaattggcctttcccgtcttttctcagcctcagagtttgaagaccccttagttggtgaagatacagaacgtgccaactctatgggcctgtttytgcagaaaacaaacatcatccgtgactatctggaagaccagcaaggaggaagagagttctggcctcaagaggtttggagcaggtatgttaagaagttaggggattttgctaagccggagaatattgacttggccgtgcagtgcctgaatgaacttataaccaatgcactgcaccacatcccagatgtcatcacctacctttcgagactcagaaaccagagtgtgtttaacttctgtgctattccacaggtgatggccattgccactttggctgcctgttataataaccagcaggtgttcaaaggggcagtgaagattcggaaagggcaagcagtgaccctbatgatggatgccaccaatatgccagctgtcaaagccatcatatatcagtatatggaagagatttatcatagaatccccgactcagacccatcttctagcaaaacaaggcagatcatctccaccatccggacgcagaatcttcccaactgtcagctgatttcccgaagccactactcccccatctacctgtcgtttgtcatgcytttggctgccctgagctggcagtacctgaccactctctcccaggtaacagaagactatgttcagactggagaacactgatcccaaatttgtccatagctgaagtccaccataaagtggatttactttttttctttaaggatggatgttgtgttctctttatttttttcctactactttaatccctaaaagaacgctgtgtggctgggaccttwaggaaagtgaaatgcaggtgagaagaacctaaacatgaaaggaaagggtgcctcatcccagcaacctgtccttgtgggtgatgatcactgtgmtgcttgyggctcatggcagagcattcagtgccmcggtttaggtgaagtcgctgcatatgtgactgtcatgagatcctacttagtatgatcctggctagaatgataattaaaagtatttaatttgaagcaccatttgaatgttcgtamtagtagaaaatgatgtgaattttctttctgttcggctcctatttttctcatcattttgttttctttaattgggttgaatggagtagatagaaatatttatggtttaggtaacagttagatgtttcctaagaatgcaaactgccttttccacacaaaggctgggaataaaattctgggtattctcstattctcatttaaaggagtttagctttcagagagaaacagcaggattgcttttgaccttttagaagattggtctccagtaaaggtggacatttttgagatttttataataaagaatttaattgctctgcatttgtcaagtacagttcgcttgaaagcctgcctgactgtggaaaagatggagctcaagaatggagttgatggcccagcgtggtggctcatgcctgtaatcccagcactttgggaggctgaggcggtcggatcacgacattaggggatcgagaccatcctggctaacacggtgaaaccccgtctctactaaaaaaaaaaaaaattagccaggcgtggtggcgggtgcctgtagttccagctactcgggaggctgaggcaggagaatggcttaaacccgggaggcggagcttgcagtgagctcagatcgcgccactgcactccagtctgggcaacagagcgagactccat

SEQ ID NO: 1267 - DNA, 2412 bp, Homo sapiens
aggcctgccccctgtccggccagcccctcgaagcacctactscacaggtccagccggccggtgagcgcctggggaccgcagaggtgagagtcgcgcccgggagtccgccgcctgcgccaggatggagttcgtgaaatgcctyggccaccccgaagagttctacaacctggtgcgcttccggatcgggggcaagcggaaggtgatgcccaagatggaccaggactcgctcagcagcagcctgaaaacttgctacargtatctcaatcagaccagtcgcagtttcgcagctgttatccaggcgctggatggggaaatgcgcaaygcagtgtgcatattttatctggttctccgagctctggacacactggaagatgacatgaccatcagtgtggaaaagaaggtcccgctgttacacaactttcactctttcytttmccaaccagactggcggttcatggagagcaaggagaaggatcgccaggtgctggaggacttcccaacgatctcccttgagtttagaaatctggctgagaaataccaaacagtgattgccgacatttgccggagaatgggcattgggatggcagagtttttggataagcatgtgacctctgaacaggagtgggacaagtactgccactatgttgctgggctggtcggaattggcctttcccgtcttttctcagcctcagagtttgaagaccccttagttggtgaagatacagaacgtgccaactctatgggcctgtttytgcagaaaacaaacatcatccgtgactatctggaagaccagcaaggaggaagagagttctggcctcaagaggtttggagcaggtatgttaagaagttaggggattttgctaagccggagaatattgacttggccgtgcagtgcctgaatgaacttataaccaatgcactgcaccacatcccagatgtcatcacctacctttcgagactcagaaaccagagtgtgtttaacttctgtgctattccacaggtgatggccattgccactttggctgcctgttataataaccagcaggtgttcaaaggggcagtgaagattcggaaagggcaagcagtgaccctbatgatggatgccaccaatatgccagctgtcaaagccatcatatatcagtatatggaagagatttatcatagaatccccgactcagacccatcttctagcaaaacaaggcagatcatctccaccatccggacgcagaatcttcccaactgtcagctgatttcccgaagccactactcccccatctacctgtcgtttgtcatgcytttggctgccctgagctggcagtacctgaccactctctcccaggtaacagaagactatgttcagactggagaacactgatcccaaatttgtccatagctgaagtccaccataaagtggatttactttttttctttaaggatggatgttgtgttctctttatttttttcctactactttaatccctaaaagaacgctgtgtggctgggaccttwaggaaagtgaaatgcaggtgagaagaacctaaacatgaaaggaaagggtgcctcatcccagcaacctgtccttgtgggtgatgatcactgtgmtgcttgyggctcatggcagagcattcagtgccmcggtttaggtgaagtcgctgcatatgtgactgtcatgagatcctacttagtatgatcctggctagaatgataattaaaagtatttaatttgaagcaccatttgaatgttcgtamtagtagaaaatgatgtgaattttctttctgttcggctcctatttttctcatcattttgttttctttaattgggttgaatggagtagatagaaatatttatggtttaggtaacagttagatgtttcctaagaatgcaaactgccttttccacacaaaggctgggaataaaattctgggtattctcstattctcatttaaaggagtttagctttcagagagaaacagcaggattgcttttgaccttttagaagattggtctccagtaaaggtggacatttttgagatttttataataaagaatttaattgctctgcatttgtcaagtacagttcgcttgaaagcctgcctgactgtggaaaagatggagctcaagaatggagttgatggcccagcgtggtggctcatgcctgtaatcccagcactttgggaggctgaggcggtcggatcacgacattaggggatcgagaccatcctggctaacacggtgaaaccccgtctctactaaaaaaaaaaaaaattagccaggcgtggtggcgggtgcctgtagttccagctactcgggaggctgaggcaggagaatggcttaaacccgggaggcggagcttgcagtgagctcagatcgcgccactgcactccagtctgggcaacagagcgagactccat

SEQ ID NO: 1268 - DNA, 1384 bp, Homo sapiens
cagaatgatgaggtggagtttgtccgaactggctatgggaaggaaatggtaaaagttctccatattcagtgagatggaaaatatcacagcattaaagaggtggcaacttcagtgcaacttactctaagttccaaaaaagattacctgcatggagataattcagacatcatccctacagacaccatcaagaacacagttcatgtcttggcaaagtttaaagaagtatcattttgtttctttttacaaatcaaaagcatagaagcctttggtgtgaatatttgtgagcattttctttcttcttttaaccatgtaatccgagctcaagtctacatggaagaaatcccttggaagcatcttggaaagaatggagttaagcatgtccatgcatttattcacactcccactggaacacacttctgtgaagttgaacagctgagaagtggaccccaagtcattcattctggaatcaaagacctcaaggtcttgaaaacaacacagtctggatttgaaggtttcatcaaggaccagttcactaccctccctgaggtgaaggactgatgctttgccacccaagtgtactgcaagtggcgctaccaccagtgcagggatgtggacttcaaggctacctgggacaccattcrggaccttgtcatggagaaatctgctgggccctatgacaaaggtgaatacttgacctctgtgcagaagaccctctgtgatatccaggtgctctccctgagccgagttcctgcgatagaagatatggaaatcagcctgccaaacattcactacttcaacatagacatgtccaaaatgggtctgatcaacaaggaagaggtaagaggtcttgctgccattagacaatccatatggaaaaattactggtacagtcaagaggaagttgtcttcaagactgtgacattgtggccaccaataggagtccactctcagctgaggaattccttaagtcatttgtgatgctggagatgatagcatgtagccatgcaaaatttcacactagtatattgatttatagtgttcactttcctccaatatgaaacagtttatttcttctacacctagctcagcaaggcattctgtggattaccttattagtaattataacaggctttatggctataatttactttaaaaatgctgagcagtattagaacagttataaatcaatatttctttttggttatcttatgccttcctatcttggagaagctttagaatcaattcattaagaaaataatcatgaattaatgagtgtgtcacatcaattaatttgtgcacaggtttaagaaacaaatattgttttcatcctactgatgcttctaagtaatgcagaaaatgaaataaaattatattgaaaaatatc

SEQ ID NO: 1269 - DNA, 2065 bp, Homo sapiens
atgactgaacgtatgcaggctctggcttccccagtggcttcttggagaagtcagattaggaaaggtgagaatgagttgaggaacgcagcactctgggatcatggttccagctccgggcagagggttacatcgtgtcaagtgtgtgaaggcagaatagcctgcagagaccactgtggcgttgaaaagaggtgtcgtcgcgaccttcggcgccggagaggcgaaacaagagggggtcttcgggccctcaggtatggctcagccgcccaaggcgaagcgcacgtggcagttggcgggaaatccctggggggtggagcctcggctcgagatcggtggacgtgctcgcctccactcggggccaggtctatgtcccggtttcccgcagtcgcgggcagggcgccamggcggcaggaggagggtgagcggtcaagagacctccaggaagagcggctctcggctgtttgcatcgccgatagaggtgcggtccgcgggacggtacggaagccagcgggagttacggcgtgggggttttggtggggggatgaaaaagagaaaggatgcacgtcccaggagggaggaactactccaacttttcctattcagaaacaaagaaaaaagattattcaagctgtgagggacaattcattccttattgttactggaaatacaggaagtggtaaaacaactcaactcccaaaatatctatatgaagcagggttttcacaacatggtatgattggtgtaactcaaccacgaaaagtagctgctatatcagttgctcagagagtagctgaagaaatgaaatgcactttgggatccaaagtaggataccaagttcgttttgatgattgcagttctaaggagacagcaatcaaatatatgactgatggatgtttactgaaacatattctgggagacccaaatcttaccaaattcagwgtcattattttggatgaagcccatgaaagaactctaactacagatatcttatttggtttattgaagaagctatttcaggagaagtctsctaataggaaggagcatttaaaagtggtggtaatgtcagcaactatggaattagccaagctctctgcattctttggaaattgtccaatatttgatatacctggaaggctttatccagtcagagagaaattctgcaatttgattggtccacgagacagagaaaatactgcgtatattcaagcggtattacttggcattcatttaatgtcttttttaaatatctatgattcttactaattgggtggtttgataattcatttgttcactactattttaatgacagtcctcacaggtcctagaacttttaagaaccaaatttaatttttctgtggggcaagggaagtggtgatcaacagaggaggatatttttgccaccaccacctggaattagaaaatgtgtcatatccaccaatatttctgcaacgtctttgacaatagatggaatcagatatgtggtagatggtggcttcgtgaagcagttaaatcacaaccccagattagggttggacatcctggaggtggttccaatttcaaagagcgaggcattacagcgaagtggccgagctggcaggacttcttcaggaaaatgctttcggatctatagtaaagatttttggaaccagtgtatgcctgaccatgtgatccctgaaattaagagaactagtttgacatctgtagttctgaccttaaagtgccttgccatacacgatgtcataaggtatgttgatccagagtaccagaaggaagcagaacagagacatcgagaattggcagctaaagctggaggatttaatgactttgcaactttagctgtcatctttgaacaatgcaaatcaagtggagctccagcttcatggtgccaaaaacactggattcattggaggtgcttattttctgcatttcgtgtggaagctcaacttcgagaactaatcaggaagcttaaacagcaaagtgatttcccaaaagagacctttgaaggccctaaacatgaagtactacgaagatgtctttgtgcgggctatttcaaaaatgtagctcgaag

SEQ ID NO: 1270 - DNA, 2553 bp, Homo sapiens
tcctcgtctttcccctcccatctcctcagatcggtggacgtgctcgcctccactcggggccaggtctatgtcccggtttcccgcagtcgcgggcagggcgccamggcggcaggaggagggtgagcggtcaagagacctccaggaagagcggctctcggctgtttgcatcgccgatagagaagagaaaggatgcacgtcccaggagggaggaactactccaacttttcctattcagaaacaaagaaaaaagattattcaagctgtgagggacaattcattccttattgttactggaaatacaggaagtggtaaaacaactcaactcccaaaatatctatatgaagcagggttttcacaacatggtatgattggtgtaactcaaccacgaaaagtagctgctatatcagttgctcagagagtagctgaagaaatgaaatgcactttgggatccaaagtaggataccaagttcgttttgatgattgcagttctaaggagacagcaatcaaatatatgactgatggatgtttactgaaacatattctgggagacccaaatcttaccaaattcagwgtcattattttggatgaagcccatgaaagaactctaactacagatatcttatttggtttattgaagaagctatttcaggagaagtctsctaataggaaggagcatttaaaagtggtggtaatgtcagcaactatggaattagccaagctctctgcattctttggaaattgtccaatatttgatatacctggaaggctttatccagtcagagagaaattctgcaatttgattggtccacgagacagagaaaatactgcgtatattcaagcgattgtgaaagtcaccatggatatccatttgaatgaaatggctggagacatcttggtttttctgactggccagtttgaaatagaaaaaagttgtgagttactttttcagatggcagagtctgttgattatgattatgatgttcaagataccaycctcgatggcttgttaatattgccgtgttatggatcaatgacaactgatcaacagaggaggatatttttgccaccaccacctggaattagaaaatgtgtcatatccaccaatatttctgcaacgtctttgacaatagatggaatcagatatgtggtagatggtggcttcgtgaagcagttaaatcacaaccccagattagggttggacatcctggaggtggttccaatttcaaagagcgaggcattacagcgaagtggccgagctggcaggacttcttcaggaaaatgctttcggatctatagtaaagatttttggaaccagtgtatgcctgaccatgtgatccctgaaattaagagaactagtttgacatctgtagttctgaccttaaagtgccttgccatacacgatgtcataaggtatgttgatccagagtaccagaaggaagcagaacagagacatcgagaattggcagctaaagctggaggatttaatgactttgcaactttagctgtcatctttgaacaatgcaaatcaagtggagctccagcttcatggtgccaaaaacactggattcattggaggtgcttattttctgcatttcgtgtggaagctcaacttcgagaactaatcaggaagcttaaacagcaaagtgatttcccaaaagagacctttgaaggccctaaacatgaagtactacgaagatgtctttgtgcgggctatttcaaaaatgtagctcgaagatctgttgggagaacgttttgcacaatggatggtcgtggaagcccagttcacattcatccttcctcagcacttcatgaacaggaaaccaaacttgaatggatcatttttcatgaggtattggttaccaccaaagtctacgcaagaattgtatgcccaatccgttatgaatgggtaagagacttgttacccaagttgcatgaatttaatgcacatgatttgagcagtgtggcccgacgtgaagtgagagaagatgcaagaaggagatggacaaataaggaaaatgtaaagcagctaaaggatggaatatcgaaagacgtcttaaagaaaatgcaaagaagaaatgatgacaaatccatatctgatgcacgggctcgtttccttgagagaaagcagcagaggacccaggaccacagtgacacacgaaaggaaacaggctaaggtggttgtggtgggccgagatcacaccattgcagtctggcctgggcgacaagagcaagactccgtctcaaaaaaaaaaaattgttcttgctttgtaaatgctgctttcttttcttcattttggagcggggagccttgccgatagtcagtgacttgtacatttgtttactggcatttgataggctgctccttatcttgcatgaaaaaataaagacctagccagtctaatcctgctgggattcatatcagtggccccagggggttgagatgcttcaaagctactgtttaaatggcaaaaccaagtatcttacttggataatactaaagtatgtcctttatggctttattggaatctgaattgtaaacatttggtacagtgg

SEQ ID NO: 1271 - DNA, 695 bp, Homo sapiens
tcctcgtctttcccctcccatctcctcagatcggtggacgtgctcgcctccactcggggccaggtctatgtcccggtttcccgcagtcgcgggcagggcgccamggcggcaggaggagggtgagcggtcaagagacctccaggaagagcggctctcggctgtttgcatcgccgatagagaagagaaaggatgcacgtcccaggagggaggaactactccaacttttcctattcagaaacaaagaaaaaagattattcaagctgtgagggacaattcattccttattgttactggaaatacaggaagtggtaaaacaactcaactcccaaaatatctatatgaagcaggagacagcaatcaaatatatgactgatggatgtttactgaaacatattctgggagacccaaatcttaccaaattcagwgtcattattttggatgaagcccatgaaagaactctaactacagatatcttatttggtttattgaagaagctatttcaggagaagtctsctaataggaaggagcatttaaaagtggtggtaatgtcagcaactatggaattagccaagctctctgcattctttggaaattgtccaatatttgatatacctggaaggctttatccagtcagagagaaattctgcaatttgattggtccacgagacagagaaaatactgcgtatattcaagcg

SEQ ID NO: 1272 - DNA, 1935 bp, Homo sapiens
atgactgaacgtatgcaggctctggcttccccagtggcttcttggagaagtcagattaggaaaggtgagaatgagttgaggaacgcagcactctgggatcatggttccagctccgggcagagggttacatcgtgtcaagtgtgtgaaggcagaatagcctgcagagaccactgtggcgttgaaaagaggtgtcgtcgcgaccttcggcgccggagaggcgaaacaagagggggtcttcgggccctcaggtatggctcagccgcccaaggcgaagcgcacgtggcagttggcgggaaatccctggggggtggagcctcggctcgagatcggtggacgtgctcgcctccactcggggccaggtctatgtcccggtttcccgcagtcgcgggcagggcgccamggcggcaggaggagggtgagcggtcaagagacctccaggaagagcggctctcggctgtttgcatcgccgatagaggtgcggtccgcgggacggtacggaagccagcgggagttacggcgtgggggttttggtggggggatgaaaaagagaaaggatgcacgtcccaggagggaggaactactccaacttttcctattcagaaacaaagaaaaaagattattcaagctgtgagggacaattcattccttattgttactggaaatacaggaagtggtaaaacaactcaactcccaaaatatctatatgaagcagggttttcacaacatggtatgattggtgtaactcaaccacgaaaagtagctgctatatcagttgctcagagagtagctgaagaaatgaaatgcactttgggatccaaagtaggataccaagttcgttttgatgattgcagttctaaggagacagcaatcaaatatatgactgatggatgtttactgaaacatattctgggagacccaaatcttaccaaattcagwgtcattattttggatgaagcccatgaaagaactctaactacagatatcttatttggtttattgaagaagctatttcaggagaagtctsctaataggaaggagcatttaaaagtggtggtaatgtcagcaactatggaattagccaagctctctgcattctttggaaattgtccaatatttgatatacctggaaggctttatccagtcagagagaaattctgcaatttgattggtccacgagacagagaaaatactgcgtatattcaagcgattgtgaaagtcaccatggatatccatttgaatgaaatggctggagacatcttggtttttctgactggccagtttgaaatagaaaaaagttgtgagttactttttcagatggcagagtctgttgattatgattatgatgttcaagataccaycctcgatggcttgttaatattgccgtgttatggatcaatgacaactgatcaacagaggaggatatttttgccaccaccacctggaattagaaaatgtgtcatatccaccaatatttctgcaacgtctttgacaatagatggaatcagatatgtggtagatggtggcttcgtgaagcagttaaatcacaaccccagattagggttggacatcctggaggtggttccaatttcaaaaacattttggggaatttttgggtttttttccttttgtaggagcgaggcattacagcgaagtggccgagctggcaggacttcttcaggaaaatgctttcggatctatagtaaagatttttggaaccagtgtatgcctgaccatgtgatccctgaaattaagagaactagtttgacatctgtagttctgaccttaaagtgccttgccatacacgatgtcataaggaagaataattttaaagctgaaaatgcaagaacaggtctgaataagaaggaattgatgactaaggtggaaggaaataatgagggaaaacctaccaccataagtgattttgtcttgagcatt

SEQ ID NO: 1273 - DNA, 3572 bp, Homo sapiens
tcctcgtctttcccctcccatctcctcagatcggtggacgtgctcgcctccactcggggccaggtctatgtcccggtttcccgcagtcgcgggcagggcgccamggcggcaggaggagggtgagcggtcaagagacctccaggaagagcggctctcggctgtttgcatcgccgatagagaagagaaaggatgcacgtcccaggagggaggaactactccaacttttcctattcagaaacaaagaaaaaagattattcaagctgtgagggacaattcattccttattgttactggaaatacaggaagtggtaaaacaactcaactcccaaaatatctatatgaagcagggttttcacaacatggtatgattggtgtaactcaaccacgaaaagtagctgctatatcagttgctcagagagtagctgaagaaatgaaatgcactttgggatccaaagtaggataccaagttcgttttgatgattgcagttctaaggagacagcaatcaaatatatgactgatggatgtttactgaaacatattctgggagacccaaatcttaccaaattcagwgtcattattttggatgaagcccatgaaagaactctaactacagatatcttatttggtttattgaagaagctatttcaggagaagtctsctaataggaaggagcatttaaaagtggtggtaatgtcagcaactatggaattagccaagctctctgcattctttggaaattgtccaatatttgatatacctggaaggctttatccagtcagagagaaattctgcaatttgattggtccacgagacagagaaaatactgcgtatattcaagcgattgtgaaagtcaccatggatatccatttgaatgaaatggctggagacatcttggtttttctgactggccagtttgaaatagaaaaaagttgtgagttactttttcagatggcagagtctgttgattatgattatgatgttcaagataccaycctcgatggcttgttaatattgccgtgttatggatcaatgacaactgatcaacagaggaggatatttttgccaccaccacctggaattagaaaatgtgtcatatccaccaatatttctgcaacgtctttgacaatagatggaatcagatatgtggtagatggtggcttcgtgaagcagttaaatcacaaccccagattagggttggacatcctggaggtggttccaatttcaaagagcgaggcattacagcgaagtggccgagctggcaggacttcttcaggaaaatgctttcggatctatagtaaagatttttggaaccagtgtatgcctgaccatgtgatccctgaaattaagagaactagtttgacatctgtagttctgaccttaaagtgccttgccatacacgatgtcataaggtgttgatccagagtaccagaaggaagcagaacagagacatcgagaattggcagctaaagctggaggatttaatgactttgcaactttagctgtcatctttgaacaatgcaaatcaagtggagctccagcttcatggtgccaaaaacactggattcattggaggtgcttattttctgcatttcgtgtggaagctcaacttcgagaactaatcaggaagcttaaacagcaaagtgatttcccaaaagagacctttgaaggccctaaacatgaagtactacgaagatgtctttgtgcgggctatttcaaaaatgtagctcgaagatctgttgggagaacgttttgcacaatggatggtcgtggaagcccagttcacattcatccttcctcagcacttcatgaacaggaaaccaaacttgaatggatcatttttcatgaggtattggttaccaccaaagtctacgcaagaattgtatgcccaatccgttatgaatgggtaagagacttgttacccaagttgcatgaatttaatgcacatgatttgagcagtgtggcccgacgtgaagtgagagaagatgcaagaaggagatggacaaataaggaaaatgtaaagcagctaaaggatggaatatcgaaagacgtcttaaagaaaatgcaaagaagaaatgatgacaaatccatatctgatgcacgggctcgtttccttgagagaaagcagcagaggacccaggaccacagtgacacacgaaaggaaacaggctaaggtggtgaaccctccaattcaggaagtgggaaaaggagccaggaaatgtgcttctactttgccagttatttcagacagcactaccaagaggaggtggtcagcacttgttattggcctatgaactaaaagcaaatcaaagctcataaatcaaagctcatcagttcccataaatgcagttgtcaaagaaaagatttggttgccatagtcataagcaatgatacatgaaaccaatgaaagacagtacatgtaataatattttcctcagtacaattttgctggccttaactggtatcaaacgctgtcattgagatgttttcaaagaacattgagttgtatttaatcagcgtgtactccatttgcattgaagcattaaaaattatttttcttaaaatctctttaaggccttcttgttgctgttagaatagtgctatatatcaggtatgtgaccatttatttcagaaggctgaacataagaggtttctactcagcaatacttagatgtctaactgtttaattgctacagagctttatagatatttagagaaaagacttaatcaattagtaaataaaattgcctatggcaggattctttcttgaattaatattaatccttaaattgatttttctgggattatacaaattcctttttatataaaagtatattgtttaaaacagtagctatagccattaaccaaaggacagatgatatatatatatatgatatatatatatatataagttcttttttagctgtacctacgtacttatatcagcmccatgtatgtaggtgtgatagtactttcaaacagcgcctccacctggcctactctgttatttccacctgtttgggtagggccatttaacttccattatgccaaacttgggatgggattttcgaagcagacaacactatttcatcgtgtttcaaattggaaccttgaggctagttagtatcacactcaggccacactcagcacttgcccactcttgtttactgccttgtattctagttatttgtgtatttgtctccctcactagattatacgctccttgtgggcagggactgtgtcttttttcatctttgtatctttcatgcacctagcatagtgctttgcacatagtagtcactcagtgtttgttaaataaagctattagtgtcattaaaattcaaaagacagtataatgtgtgtttttagatattttgtgtaaaaattaagaatctaaattttttatcggtaactcttctagttatttcctttggaatctagttttatgttcaataatagaaacttgaaatctttatcaaaaatcacaaggacccaaattcatgtatttgtccctaaagtaaggtgagtgatgatggtttctctaaacctttccagtgttttaatttgttaattt

SEQ ID NO: 1274 - DNA, 2024 bp, Homo sapiens
gaaagcgagtgtccctctcgcgccccaggccggtgtacccccgcactccgcgccccggcctagaagctctctctccccgctccccggcccggcccccgccccgccccgccccagcccgctgggccgccatggagcgctggccttggccgtcgggcggcgcctggctgctcgtggctgcccgcgcgctgctgcagctgctgcgctcagacctgcgtctgggccgcccgctgctggcggcgctggcgctgctggccgcgctcgactggctgtgccagcgcctgctgcccccgccggccgcactcgccgtgctggccgccgccggctggatcgcgttgtcccgcctggcgcgcccgcagcgcctgccggtggccactcgcgcggtgctcatcaccggctgtgactctggttttggcaaggagacggccaagaaactggactccatgggcttcacggtgctggccaccgtattggagttgaacagccccggtgccatcgagctgcgtacctgctgctcccctcgcctaaggctgctgcagatggacctgaccaaaccaggagacattagccgcktkctagagttcaccaaggcccacacmaccagcaccggcctgtggggcctcgtcaacaacgcaggccacaatgaagtagttgctgatgcggarckgtytccagtggccactttcygtagctgcatggaggtgaatttctttggcgcrctcgagctgaccaagggcctcctgcccctgctgyrcagctcaaggggccgcatcgtgactgtggggagcccagcgggggacatgccatatcygtgcttgggggcctatggaacctccaaagyggccgtggcgctactcatgracacattcagctgtgaackccttccctggggggtcaaggtcagcatcatccagcctggctgcttcaagacagagtcagtgagaaacgtgggtcagtgggaaaagcgcaagcaattgctgctggccaacctgcctcaagagctgctgcaggcctacggcaaggactacatcgagcacttgcatgggcagttcctgcactcgctacgcctggccatgtccgacctcaccccagttgtagatgccatcacagatgygctgctggcagctcggccccgccgcygctattaccccggccagggcctggggctcatgtacttcatccactactacctgcctgaaggcctgcggcgccgcttcctgcaggccttcttcatcagtcactgtctgcctygagcactgcagcctggccagcctggcactaccccaccacaggacgcagcccaggacccaaaccygagccccggcccttccccagcagtggctcggtgagccatgtgcacctatggcccagccactgcagcacaggaggctccgtgagcccttggttcctccccgaaaayccccagcattacgatcccccaagtgtcctggaccctggcctaaagaatcccacccccacttcatgcccactgccgatgcccaatccaggcccggtgaggccaaggtttcccagtgagcctctgcgcctctccactgtttcatgagcccaaacaccctcctggcacaacgctctaccctgcagcttggagaactccgctggatggggagtctcatgcaagacttcactgcagcctttcacaggactctgcagatagtgcctctgcaaactaaggagtgactaggtgggttggggaccccctcaggattgtttctcggcaccagtgcctcagtgctgcaattgagggctaaatcccaagtgtctcttgactggctcaagaattagggccccaactacacacccccaagccacagggaagcatgtactgtacttcccaawtgccacattttaaataaagacaaatttttatttcttctaaaatgcggcaggtgctgtttggagggggtcactgactggctggctgagtgacacagtgtggccgtgtgacagggtggcaactcctggggctcagcgtggaggctgggattcccctggtagactctggttca

SEQ ID NO: 1275 - DNA, 2092 bp, Homo sapiens
gaaccagttgtaaggagaatggagagagcagtgagagtggagtccggggtcctggtcggggtggtctgtctgctcctggcatgccctgccacagccactgggcccgaagttgctcagcctgaagtagacaccaccctgggtcgtgtgcgaggccggcaggtgggcgtgaagggcacagaccgccttgtgaatgtctttctgggcattccatttgcccagccgccactgggccctgaccggttctcagccccacacccagcacagccctgggagggtgtgcgggatgccagcactgcgcccccaatgtgcctacaagacgtggagagcatgaacagcagcagatttgtcctcaacggaaaacagcagatcttctccgtttcagaggactgcctggtcctcaacrtctatagcccagctgaggtccccgcagggtccggtaggccggtcatggtrtgggtccatggaggcgctctgataactggcgctgccacctcctacgatggatcagctctggctgcctatggggatgtggtcgtggttacagtccagtaccgccttggggtccttggcttcttcagcactggagatragcatgcacctggcaaccagggcttcctagatgtggtagctgctttgcgctgggtgcaagaaaacatcgcccccttcgggggtgacctcaactgtgtcactgtctttggtggatctgccggtgggagcatcatctctggcctggtcctgtccccagtggctgcagggctgttccacagagccatcacacagagtggggtcatcaccaccccagggatcatcgactctcacccttggcccctagctcagaaaatcgcaaacaccttggcctgcagctccagctccccggctgagatggtgcagtgccttcagcagaaagaaggagaagagctggtccttagcaagaagctgaaaaatactatctatcctctcaccgttgatggcactgtcttccccaaaagccccaaggaactcctgaaggagaagcccttccactctgtgcccttcctcatgggtgtcaacaaccatgagttcagctggctcatccccaggggctggggtctcctggatacaatggagcagatgagcygggaggacatgctggccatctcaacaccygtcttgaccagtctggatgtgccccctgagatgatgcccaccgtcatagatgaatacctaggaagcaactcggacgcacaagccaaatgccaggcgttccaggaattcatgggtgacgtattcatcaatgttcccaccgtcagtttttcaagataccttcgagattctggaagccctgtctttttctatgagttccagcatcgacccagttcttttgcgaagatcaaacctgcctgggtgaaggctgatcatggggccgagggtgcttttgtgttcggaggtcccttcctcatggacgagagctcccgcctggcctttccagaggccacagaggaggagaagcagctaagcctcaccatgatggcccagtggacccactttgcccggacaggggaccccaatagcaaggctctgcctccttggccccaattcaaccaggcggaacaatatctggagatcaacccagtgccacgrgccggacagaagttcagggaggcctggatgcagttctggtcagagacgctccccagcaagrtacaacagtggcaccagaagcagaagaacaggaaggcccaggaggacctctgaggccaggcctgaaccttcttggctggggcaaaccactcttcaagtggtggcagagtcccagcacggcagcccgcctctccccctgctgagactttaatctccaccagcccttaaagtgtcggccgctctgtgactggagttatgctcttttgaaatgtcacaaggccgcctcccacctctggggcattgtacaagttcttccctctccctgaagtgcctttcctgctttcttcgtggtaggttctagcacattcctctagcttcctggaggactcactcccccaggaagccttccctgccttctctgggctgtgcggccccgagtctgcgtccattagagcacagtccacccgaggct

SEQ ID NO: 1276 - DNA, 1998 bp, Homo sapiens
atcacagccctttagagatcggtggtgctgaagggcagggatcttattccaccttctgaagcttctgtcgaaccagttgtaaggagaatggagagagcagtgagagtggagtccggggtcctggtcggggtggtctgtctgctcctggcatgccctgccacagccactgggcccgaagttgctcagcctgaagtagacaccaccctgggtcgtgtgcgaggccggcaggtgggcgtgaagggcacagaccgccttgtgaatgtctttctgggcattccatttgcccagccgccactgggccctgaccggttctcagccccacacccagcacagccctgggagggtgtgcgggatgccagcactgcgcccccaatgtgcctacaagacgtggagagcatgaacagcagcagatttgtcctcaacggaaaacagcagatcttctccgtttcagaggactgcctggtcctcaacrtctatagcccagctgaggtccccgcagggtccggtaggccggtcatggtrtgggtccatggaggcgctctgataactggcgctgccacctcctacgatggatcagctctggctgcctatggggatgtggtcgtggttacagtccagtaccgccttggggtccttggcttcttcagcactggagatragcatgcacctggcaaccagggcttcctagatgtggtagctgctttgcgctgggtgcaagaaaacatcgcccccttcgggggtgacctcaactgtgtcactgtctttggtggatctgccggtgggagcatcatctctggcctggtcctgtccccagtggctgcagggctgttccacagagccatcacacagagtggggtcatcaccaccccagggatcatcgactctcacccttggcccctagctcagaaaatcgcaaacaccttggcctgcagctccagctccccggctgagatggtgcagtgccttcagcagaaagaaggagaagagctggtccttagcaagaagctgaaaaatactatctatcctctcaccgttgatggcactgtcttccccaaaagccccaaggaactcctgaaggagaagcccttccactctgtgcccttcctcatgggtgtcaacaaccatgagttcagctggctcatccccaggagcctcgatccatcatccaggctgcagtgcagcagcgccatcatgactctctactgcctcaacggctggggtctcctggatacaatggagcagatgagcygggaggacatgctggccatctcaacaccygtcttgaccagtctggatgtgccccctgagatgatgcccaccgtcatagatgaatacctaggaagcaactcggacgcacaagccaaatgccaggcgttccaggaattcatgggtgacgtattcatcaatgttcccaccgtcagtttttcaagataccttcgagattctggaagccctgtctttttctatgagttccagcatcgacccagttcttttgcgaagatcaaacctgcctgggtgaaggctgatcatggggccgagggtgcttttgtgttcggaggtcccttcctcatggacgagagctcccgcctggcctttccagaggccacagaggaggagaagcagctaagcctcaccatgatggcccagtggacccactttgcccggacaggggaccccaatagcaaggctctgcctccttggccccaattcaaccaggcggaacaatatctggagatcaacccagtgccacgrgccggacagaagttcagggaggcctggatgcagttctggtcagagacgctccccagcaagrtacaacagtggcaccagaagcagaagaacaggaaggcccaggaggacctctgaggccaggcctgaaccttcttggctggggcaaaccactcttcaagtggtggcagagtcccagcacggcagcccgcctctccccctgctgagactttaatctccaccagcccttaaagtgtcggccgctctgtg

SEQ ID NO: 1277 - DNA, 2505 bp, Homo sapiens
atcacagccctttagagatcggtggtgctgaagggcagggatcttattccaccttctgaagcttctgtcgaaccagttgtaaggagaatggagagagcagtgagagtggagtccggggtcctggtcggggtggtctgtctgctcctggcatgccctgccacagccactgggcccgaagttgctcagcctgaagtagacaccaccctgggtcgtgtgcgaggccggcaggtgggcgtgaagggcacagaccgccttgtgaatgtctttctgggcattccatttgcccagccgccactgggccctgaccggttctcagccccacacccagcacagccctgggagggtgtgcgggatgccagcactgcgcccccaatgtgcctacaagacgtggagagcatgaacagcagcagatttgtcctcaacggaaaacagcagatcttctccgtttcagaggactgcctggtcctcaacrtctatagcccagctgaggtccccgcagggtccggtaggccggtcatggtrtgggtccatggaggcgctctgataactggcgctgccacctcctacgatggatcagctctggctgcctatggggatgtggtcgtggttacagtccagtaccgccttggggtccttggcttcttcagcactggagatragcatgcacctggcaaccagggcttcctagatgtggtagctgctttgcgctgggtgcaagaaaacatcgcccccttcgggggtgacctcaactgtgtcactgtctttggtggatctgccggtgggagcatcatctctggcctggtcctgtccccagtggctgcagggctgttccacagagccatcacacagagtggggtcatcaccaccccagggatcatcgactctcacccttggcccctagctcagaaaatcgcaaacaccttggcctgcagctccagctccccggctgagatggtgcagtgccttcagcagaaagaaggagaagagctggtccttagcaagaagctggtatggccacccttttggrgatggtgccgggcaatggcacagagggggttctatccatcccctgcaggagcagaggggcagtctacccccaggtggggctggggacagcagctcatgaggggaaggggctgagggcttggagacagaaatggagggccatctccatccccacagcaggcctgtcttctaggaaagaaactggacgcatctgttgccctgatctcctggttcccccgacccccttaaccctggtgatcttcatcccttcactttccctccaggctcagacactcaggcctgcagctcagtggctgctggggtcctagcctttgaggcttggccctaacttgggagcctcctgcattgctttctcctgcagaaaaatactatctatcctctcaccgttgatggcactgtcttccccaaaagccccaaggaactcctgaaggagaagcccttccactctgtgcccttcctcatgggtgtcaacaaccatgagttcagctggctcatccccaggggctggggtctcctggatacaatggagcagatgagcygggaggacatgctggccatctcaacaccygtcttgaccagtctggatgtgccccctgagatgatgcccaccgtcatagatgaatacctaggaagcaactcggacgcacaagccaaatgccaggcgttccaggaattcatgggtgacgtattcatcaatgttcccaccgtcagtttttcaagataccttcgagattctggaagccctgtctttttctatgagttccagcatcgacccagttcttttgcgaagatcaaacctgcctgggtgaaggctgatcatggggccgagggtgcttttgtgttcggaggtcccttcctcatggacgagagctcccgcctggcctttccagaggccacagaggaggagaagcagctaagcctcaccatgatggcccagtggacccactttgcccggacaggggaccccaatagcaaggctctgcctccttggccccaattcaaccaggcggaacaatatctggagatcaacccagtgccacgrgccggacagaagttcagggaggcctggatgcagttctggtcagagacgctccccagcaagrtacaacagtggcaccagaagcagaagaacaggaaggcccaggaggacctctgaggccaggcctgaaccttcttggctggggcaaaccactcttcaagtggtggcagagtcccagcacggcagcccgcctctccccctgctgagactttaatctccaccagcccttaaagtgtcggccgctctgtgactggagttatgctcttttgaaatgtcacaaggccgcctcccacctctggggcattgtacaagttcttccctctccctgaagtgcctttcctgctttcttcgtggtaggttctagcacattcctctagcttcctggaggactcactcccccaggaagccttccctgccttctctgggctgtgcggccccga

SEQ ID NO: 1278 - DNA, 1680 bp, Homo sapiens
cgcgtcacctgacgcacttgacagcccgctgaggacgcagcgtcagctgacctggggagtcgcgattcgtgccggccggtcctggttctccggtcccgccgctcccgcagcagccatgtcgttcttcccggagctttactttaacgtggacaatggctacttggagggactggtgcgcggcctgaaggccggggtgctcagccaggccgactacctcaacctggtgcagtgcgagacgctagaggacttgaaactgcatctgcagagcactgattatggtaacttcctggccaacgaggcatcacctctgacggtgtcagtcatcgatgaccggctcaaggagaagatggtggtggagttccgccacatgaggaaccatgcctatgagccactcgccagcttcctagacttcattacttacagttacatgatcgacaacgtgatcctgctcatcacaggcacgctgcaccagcgctccatcgctgagctcgtgcccaagtgccacccactaggcagcttcgagcagatggaggccgtgaacattgctcagacacctgctgagctctacaatgccattctggtggacacgcctcttgcggcttttttccaggactgcatttcagagcaggaccttgacgagatgaacatcgagatcatccgcaacaccctctacaaggcctacctggagtccttctacaagttctgcaccctactgggcgggactacggctgatgccatgtgccccatcctggagtttgaagcagaccgccgcrccttcatcatcaccatcaattctttcggcacagagctgtccaaagaggaccgtgccaagctctttccacactgtgggcggctctaccctgagggcctggcgcagctggctcgggctgacgactatgaacaggtcaagaacgtggccgattactacccggagtacaagctgctcttcgagggtgcaggtagcaaccctggagacaagacgctggaggaccgattctttgagcacgaggtaaagctgaacaagttggccttcctgaaccagttccactttggtgtcttctatgccttcgtgaagctcaaggagcaggagtgtcgcaacatcgtgtggatcgctgaatgtatcgcccagcgccaccgcgcmaaaatcgacaactacatccctatcttctagcgtcctggcccaaggctctcaattgcactctttgtgtgtgtgtgtgtgtgtgtgcgcgtgtgtgtgcgtgtgtgtgtatgtggtctgtgacaagcctgtggctcacctgcctgtccggggtgtagtacgctgtcctagcggctgcccagttctcctgaccctcttagagactgttcttaggcctgaaaaggggctgggcacccccccccaccaaggatggacgaagaccccctccagagcaaggaggccccctcagccctgtggttacagccgctgatgtatctaagaagcatgtcactttcatgttcctccctaactccctgacctgagaaccctggggcctgggggcagtttgagcctcctctcccttctgtgggtcgctcccagagccatggcccatgggaaggacaragtgtgtgtgtccttggggcctggggggatgtygctcctcagctccctccctcagccctgcccctctgagacaataaaactgccctctctaagsccaa

SEQ ID NO: 1279 - DNA, 2516 bp, Homo sapiens
gacacggctaccatgccatccacagtgttgccatccacagtgttgccatcactcctgcccacagcaggagctggctggagcatgaggtggattctgtgctggagcctcaccctctgcctgatggcgcagacggccttgggtgccttgcacaccaagaggcctcaagtggtcaccaaatatggaaccctgcaaggaaaacagatgcatgtggggaagacacccatccaagtctttttaggagtccccttctccagacctcctctaggtatcctcaggtttgcacctccagaaccccyggagccctggaaaggaatcagagatgctaccacctacccgcctgggtgcctgcaggagtcctggggccagctggcctcgatgtacgtcagcacgcgggaacggtacaagtggctgcgcttcagcgaggactgtctgtacctgaacgtgtacgcgccggcgcgcgcgcccggggatccccagctgccagtgatggtctggttcccgggaggcgccttcatcgtgggcgctgcttcttcgtacgagggctctgacttggccgcccgcgagaaagtggtgctggtgtttctgcagcacaggctcggcatcttcggcttcctgagcacggacgacagccacgcgcgcgggaactgggggctgctggaccagatggcggctctgcgctgggtgcaggagaacatcgcagccttcgggggagacccaggaaatgtgaccctgttcggccagtcggcgggggccatgagcatctcaggactgatgatgtcacccctagcctcgggtctcttccatcgggccatttcccagagtggcaccgcgttrttcagacttttcatcactmgtaacccactgaaagtggccaagaaggttgcccacctggctggatgcaaccacaacagcacacagatcctggtaaactgcctgagggcactatcagggaccaaggtgatgcgtgtgtccaacaagatgagattcctccaactgaacttccagagagacccggaagagattatctggtccatgagccctgtggtggatggtgtggtgatcccagatgaccctttggtgctcctgacccaggggaaggtttcatctgtgccctaccttctaggtgtcaacaacctggaattcaattggctcttgccttatatcatgaagttcccgctaaaccggcaggcgatgagaaaggaaaccatcactaagatgctctggagtacccgcaccctgttgaatatcaccaaggagcaggtaccacttgtggtggaggagtacctggacaatgtcaatgagcatgactggaagatgctacgaaaccgtatgatggacatagttcaagatgccactttcgtgtatgccacactgcagactgctcactaccaccgagatgccggcctccctgtctacctgtatgaatttgagcaccacrctcgtggaataatcgtcaaaccccgcactgatggggcagaccatggggatgagatgtacttcctctttgggggccccttcgccacaggcctttccatgggtaaggagaaggcacttagcctccagatgatgaaatactgggccaactttgcccgcacaggaaaccccaatgatgggaatctgccctgctggccacgctacaacaaggatgaaaagtacctgcagctggattttaccacaagagtgggcatgaagctcaaggagaagaagatggctttttggatgagtctgtaccagtctcaaagacctgagaagcagaggcaattctaagggtggctatgcaggaaggagccaaagaggggtttgcccccaccatccaggccctggggagactagccatggacatacctggggacaagagttctacccaccccagtttagaactgcaggagctccctgctgcctccaggccaaagctagagcttttgcctgttgtgtgggacctgcactgccctttccagcctgacatcccatgatgcccctctacttcactgttgacatccagttaggccaggccctgtcaacaccacactgtgctcagctctccagcctcaggacaacctctttttttcccttcttcaaatcctcccacccttcaatgtctccttgtgactccttcttatgggaggtcgacccagactgccactgcccctgtcactgcacccagcttggcatttaccatccatcctgctcaaccttgtgcctgtctgttcacattggcctggaggcctagggcaggttgtgacatggagcaaacttttggtagtttgggatcttctctcccacccacacttatctcccccagggccactccaaagtctatacacaggggtggtctcttcaataaagaagtgttgattagacctgaatttctccacctataaaatgggtgtgtgaagtgaatgatgtctcaatttgagccctgagagaaaggaagtattgctgcctgttccttagtgggctgtgcctggatgctacactcagtcaaagggtgctactgcaaagttgcctggggtaca

SEQ ID NO: 1280 - DNA, 3010 bp, Homo sapiens
tcccggcggggagcgcggtgaagcgggggtgggatctgaacatggcggcggtggtagctgctacggcgctgaagggccggggggcgagaaatgcccgcgtcctccgggggattctcgcaggagccacagctaacaaggcttctcataacaggacccgggccctgcaaagccacagctccccagagggcaaggaggaacctgaacccctatccccggagctggaatacattcccagaaagaggggcaagaaccccatgaaagctgtgggactggcctggtacagcctgtacacccgcacctggctcgggtacctcttctaccgacagcagctgcgcagggctcggaatcgctaccctaaaggccactcgaaaacccagccccgcctcttcaatggagtgaaggtgcttcccatccctgtcctctcggacaactacagctacctcatcatcgacacccaggcccagctggctgtggctgtggacccttcagaccctcgggctgtgcaggcttccattgaaaaggaaggrgtcaccttggtcgccattctgtgtactcacaagcactgggaccacagtggagggaaccgtgacctcagccggcggcaccgggactgtcgggtgtacgggagccctcaggacggcatcccctacctcacccatcccctgtgtcatcaagatgtggtcagcgtgggamggcttcagatccgggccctggctacacctggccacacacaaggccatctggtctacctactggatggggagccctacaagggtccctcctgcctcttctcaggggacctgctcttcctctctggctgtgggcggacctttgagggcaatgcagagaccatgctgagctcactggacactgtgctggggctaggggatgacacccttctgtggcctggtcatgagtatgcagaggagaacctgggctttgcaggtgtggtggagcccgagaacctggcccrggagaggaagatgcagtgggtgcagcggcagcggctggagcgcaagggcacgtgcccatctaccctgggagaggagcgctcctacaacccgttcctgagaacccactgcctggcgctacaggaggctctggggccggggccgggccccactggggatgatgactactcccgggcccagctcctggaagagctccgccggctgaaggatatgcacaagagcaagtgatgcccccagcgcccccagcccagcccactccccgcatggggaggccgccaccaccaacacctcatcatccttctcatcgctaacaccaccamctccatcggcacccaagcgggcatcatccccccacactgctcaggggaggggagggatcaggcgatgagactgtgaggccaaaagaagggggcctgttggaggctgggaaccccgcagcgcgaggctgcctcatcaacggcaagaggaaaggaggggtctcgggacatctccagaccctaccaactgggagggtcccctcctccttccctactcctgggacggcagcaaggacatgggggctgctgttagcttctccgtcaggaggcctcatctcactgtagccctggaacccagggtccatcttgcccttcccccatccatggttgggaaagaagctcagcccctcacagtggcctcaagtgtgatgccttacaaaagcaccactcagatgggcagctggactctggtgtcctgagactctgccctcttcccacagcctccctgccccacccatccctgcaaagccatttttcagacagagccattcctaagaacactgaagggctggaatgctggctggccactctctgcctcagtggcctccctacagcctggaagaaggagggtcctgattgccaaggaaacctcctcattgggctaaggagacactggagtctggagtgtggagccccacagtcttgcaggtcacatgctctccttgcacatctggcctggttgtacccactggcctctgcctctgccctgggccaaaagggcccctccttgccaggggagagacagcyacggtcctctttggccgatgctgtattctcattttggcccttgttcttaggcccgtctgcccgccytcctccatctaacctttcctgttttatccgcagcccttttcttctttgagttagtaaagatttattctgtaacctgacactcatctggccctttgcagtttgccagccatattcccatgtgatttcccactggatccaggcccccatccggctggcaggagggggctctgacgtrcaggttggaaatcagaagtctgtgagagcgcgggagtgcatggcagctctgggtcccagacctggcccgacccctctgcttcacctccagctctgctgctcctctactcttgggtcgagatccctttggagccacagcgaggaaccctgtggtcctcaggcaggtgtaccttgagtcagccaggagccctcttttcctgtgtcaaagcctgccctcgggctctgctcacctctggtgaccctccaagatgcccctgccctcagtttcccctcatgatctggcctctgcccccttctctagccacagcctctagtacactttagcaataccaccagactagttagagttccccactcaccaagcaagacatgcagtttcatgcctctgtgccttcgctcatgctgtttcttccgactggaatgccttcccctgctcctcctgccttgtctgcctggcaagttcatctctcacgatcccctcaaaggccccctcctccaggaaggcaacccctgtgcccctcccctccaggctacctytgcactttgtcaatgcttctcttgtggcacttatcacactgtattttacttgtttacatgtttgtctccccttctagactgtgaatccttaagggcatggactgtatcttatgcatctctgtatttctgcgcctagcacggtgcctagcacacagtaggcgctcaataaatgttgaatgaatgaatgatttaatcaag

SEQ ID NO: 1281 - DNA, 1366 bp, Homo sapiens
ctgggtgacagagcaagacccaaaaaaagaattatagatttgcatttttggcacaaataccacagaagtgatcttatgccctcctcagtgcatcataccaagaggcaaatgatgtctatatattgttactggtacagcctgtacacccgcacctggctcgggtacctcttctaccgacagcagctgcgcagggctcggaatcgctaccctaaaggccactcgaaaacccagccccgcctcttcaatggagtgaaggtgcttcccatccctgtcctctcggacaactacagctacctcatcatcgacacccaggcccagctggctgtggctgtggacccttcagaccctcgggctgtgcaggcttccattgaaaaggaaggrgtcaccttggtcgccattctgtgtactcacaagcactgtcccctgtgtcatcaagatgtggtcagcgtgggamggcttcagatccgggccctggctacacctggccacacacaaggccatctggtctacctactggatggggagccctacaagggtccctcctgcctcttctcaggggacctgctcttcctctctggctgtgggcggacctttgagggcaatgcagagaccatgctgagctcactggacactgtgctggggctaggggatgacacccttctgtggcctggtcatgagtatgcagaggagaacctgggctttgcaggtgtggtggagcccgagaacctggcccrggagaggaagatgcagtgggtgcagcggcagcggctggagcgcaagggcacgtgcccatctaccctgggagaggagcgctcctacaacccgttcctgagaacccactgcctggcgctacaggaggctctggggccggggccgggccccactggggatgatgactactcccgggcccagctcctggaagagctccgccggctgaaggatatgcacaagagcaagtgatgcccccagcgcccccagcccagcccactccccgcatggggaggccgccaccaccaacacctcatcatccttctcatcgctaacaccaccamctccatcggcacccaagcgggcatcatccccccacactgctcaggggaggggagggatcaggcgatgagactgtgaggccccctcctccaggaaggcaacccctgtgcccctcccctccaggctacctytgcactttgtcaatgcttctcttgtggcacttatcacactgtattttacttgtttacatgtttgtctccccttctagactgtgaatccttaagggcatggactgtatcttatgcatctctgtatttctgcgcctagcacggtgcctagcacacagtaggcgctcaataaatgttgaatgaatgaa

SEQ ID NO: 1282 - DNA, 659 bp, Homo sapiens
tcccggcggggagcgcggtgaagcgggggtgggatctgaacatggcggcggtggtagctgctacggcgctgaagggccggggggcgagaaatgcccgcgtcctccgggggattctcgcaggagccacagctaacaaggcttctcataacaggacccgggccctgcaaagccacagctccccagagggcaaggaggaacctgaacccctatccccggagctggaatacattcccagaaagaggggcaagaaccccatgaaagctgtgggactggcctgggccatcggcttcccttgtggtatcctcctcttcatcctmaccaagcgggaagtggacaaggaccgtgtgaagcagatgaaggctcggcagaacatgcggttgtccaacacgggcgagtatgagagccagaggttcagggcttcctcccagagtgccccgtcccctgatgttgggtctggggtgcagacctgaggagcgctgcgaccctcctaggctattgactgttaagtcctcaggtttggcccagattccagttcgtgcctytgaggtccaccagagggsgcatgaagcccaggctgtwgccaaaccctaccctgccccacaccaaggagccagccaaaggcaaataaagttattgagtgtttagtagaaaggaaccag

SEQ ID NO: 1283 - DNA, 1605 bp, Homo sapiens
tcccggcggggagcgcggtgaagcgggggtgggatctgaacatggcggcggtggtagctgctacggcgctgaagggccggggggcgagaaatgcccgcgtcctccgggggattctcgcaggagccacagctaacaaggcttctcataacaggacccgggccctgcaaagccacagctccccagagggcaaggaggaacctgaacccctatccccggagctggaatacattcccagaaagaggggcaagaaccccatgaaagctgtgggactggcctggtacagcctgtacacccgcacctggctcgggtacctcttctaccgacagcagctgcgcagggctcggaatcgctaccctaaaggccactcgaaaacccagccccgcctcttcaatggagtgaaggtgcttcccatccctgtcctctcggacaactacagctacctcatcatcgacacccaggcccagctggctgtggctgtggacccttcagaccctcgggctgtgcaggcttccattgaaaaggaaggrgtcaccttggtcgccattctgtgtactcacaagcactgggaccacagtggagggaaccgtgacctcagccggcggcaccgggactgtcgggtgtacgggagccctcaggacggcatcccctacctcacccatcccctgtgtcatcaagatgtggtcagcgtgggamggcttcagatccgggccctggctacacctggccacacacaaggccatctggtctacctactggatggggagccctacaagggtccctcctgcctcttctcaggggacctgctcttcctctctggctgtgggcggacctttgagggcaatgcagagaccatgctgagctcactggacactgtgctggggctaggggatgacacccttctgtggcctggtcatgagtatgcagaggagaacctgggctttgcaggtgtggtggagcccgagaacctggcccrggagaggaagatgcagtgggtgcagcggcagcggctggagcgcaagggcacgtgcccatctaccctgggagaggagcgctcctacaacccgttcctgagaacccactgcctggcgctacaggaggctctggggccggggccgggccccactggggatgatgactactcccgggcccagctcctggaagagctccgccggctgaaggatatgcacaagagcaagtgatgcccccagcgcccccagcccagcccactccccgcatggggaggccgccaccaccaacacctcatcatccttctcatcgctaacaccaccamctccatcggcacccaagcgggcatcatccccccacactgctcaggggaggggagggatcaggcgatgagactgtgaggccccctcctccaggaaggcaacccctgtgcccctcccctccaggctacctytgcactttgtcaatgcttctcttgtggcacttatcacactgtattttacttgtttacatgtttgtctccccttctagactgtgaatccttaagggcatggactgtatcttatgcatctctgtatttctgcgcctagcacggtgcctagcacacagtaggcgctcaataaatgttgaatgaatgaa

SEQ ID NO: 1284 - DNA, 1676 bp, Homo sapiens
ttcggggtgcttgcccggctggaggtggtgagggggcgggtccaaaggagaggtcaatgggcggggcggggccacaacgcccccacgtccagagycggcaggcaggttccccgcggggggccggggccgggccgttgcctagcaacgccgagccccgcccggccggcgcgtgcctgcccccagcatggcttggcagggctggcccgcggcgtggcagtgggtcgccggctgctggctcctcctcgtccttgtcctcgtcctacttgtgagcccccgcggctgccgagcgcggcggggcctccgcggtctgctcatggcgcacagccagcggctgctcttccgaatcgggtacagcctgtacacccgcacctggctcgggtacctcttctaccgacagcagctgcgcagggctcggaatcgctaccctaaaggccactcgaaaacccagccccgcctcttcaatggagtgaaggtgcttcccatccctgtcctctcggacaactacagctacctcatcatcgacacccaggcccagctggctgtggctgtggacccttcagaccctcgggctgtgcaggcttccattgaaaaggaaggrgtcaccttggtcgccattctgtgtactcacaagcactgggaccacagtggagggaaccgtgacctcagccggcggcaccgggactgtcgggtgtacgggagccctcaggacggcatcccctacctcacccatcccctgtgtcatcaagatgtggtcagcgtgggamggcttcagatccgggccctggctacacctggccacacacaaggccatctggtctacctactggatggggagccctacaagggtccctcctgcctcttctcaggggacctgctcttcctctctggctgtgggcggacctttgagggcaatgcagagaccatgctgagctcactggacactgtgctggggctaggggatgacacccttctgtggcctggtcatgagtatgcagaggagaacctgggctttgcaggtgtggtggagcccgagaacctggcccrggagaggaagatgcagtgggtgcagcggcagcggctggagcgcaagggcacgtgcccatctaccctgggagaggagcgctcctacaacccgttcctgagaacccactgcctggcgctacaggaggctctggggccggggccgggccccactggggatgatgactactcccgggcccagctcctggaagagctccgccggctgaaggatatgcacaagagcaagtgatgcccccagcgcccccagcccagcccactccccgcatggggaggccgccaccaccaacacctcatcatccttctcatcgctaacaccaccamctccatcggcacccaagcgggcatcatccccccacactgctcaggggaggggagggatcaggcgatgagactgtgaggccccctcctccaggaaggcaacccctgtgcccctcccctccaggctacctytgcactttgtcaatgcttctcttgtggcacttatcacactgtattttacttgtttacatgtttgtctccccttctagactgtgaatccttaagggcatggactgtatcttatgcatctctgtatttctgcgcctagcacggtgcctagcacacagtaggcgctcaataaatgttgaatgaatgaa

SEQ ID NO: 1285 - DNA, 1150 bp, Homo sapiens
tttcagactgcatcccgacattggtttacatttctcttgactgagaatggtgccacgtgtggtctgtaagtaggtggtcagctgtagctggatgtgtgccttgaaaggctgacaagtttgccctgagtgactcacctactgtcacctgatccaacaagatttgtgggcgtagcctgccgatgggtgacgccagttaaagggtcgggatgccgatgccggcttggagttagagatgagtcaccgctgagagcagctgcagtagctgagcagtggcagcagagaggcagacgtgagctgagggcgcagaggcaggcagcatctctgagggtccccaaggarcatggctgggagccgtgaggtggtggccatggactgcgagatggtgggggctggggccccaccgggagagtggcctggctcgttgcagcctcgtgaaygtccacggygctgtgctgtacgacaagttcatccggcctgagggagagatcaccgattacagaacccgggtcagcggggtcacccctcagcacatggtgggggccacaccatttgccgtggccaggctagagatcctgcagctcctgaaaggcaagctggtggtgggtcatgacctgaagcacgacttccaggcactgaaagaggacatgagcggctacacaatctacgacacgtccactgacaggctgttgtggcgtgaggccaagctggaccactgcaggcgtgtctccctgcgggtgctgagtgagcgcctcctrcacaagagcatccagaacagcctgcttggacacagctcggtggaagatgcgagggcaacgatggagctctatcaaatctcccagagaatccgagcccgccgagggctgccccgcctggctgtgtcagactgaagccccatccagcccgttccgcagggactagaggctttcggctttttgggacagcaactaccttgcttttggaaaatacatttttaatagtaaagtggctctatattttctctacgccctctctgaggggagggcatcctgtatggggaggagggtctggaccagagctgtccctgatcgctagaatcaacggcagaattcttgttattttaataataattaataatttagtgcttccactaaataaaaatcattggaatggt

SEQ ID NO: 1286 - DNA, 599 bp, Homo sapiens
tttcagactgcatcccgacattggtttacatttctcttgactgagaatggtgccacgtgtggtctgtaagtaggtggtcagctgtagctggatgtgtgccttgaaaggctgacaagtttgccctgagtgactcacctactgtcacctgatccaacaagatttgtgggcgtagcctgccgatgggtgacgccagttaaagggtcgggatgccgatgccggcttggagttagagatgagtcaccgctgagagcagctgcagtagctgagcagtggcagcagagaggcagacgtgagctgagggcgcagaggcaggcagcatctctgagggtccccaaggarcatggctgggagccgtgaggtggtggccatggactgcgagatggtgggggctggggccccaccgggagagtggcctggctcgttgcagcctcgtgaaygtccacggygctgtgctgtacgacaagttcatccggcctgagggagagatcaccgattacagaacccgggtcagcggggtcacccctcagcacatggtgggggccacaccatttgccgtggccaggctagaggtccccttcccatcctctccaacggcagct

SEQ ID NO: 1287 - DNA, 1160 bp, Homo sapiens
caatccactccacgaacgtcaaatgcgtcatctgaggagggggagggccggggcaaaggaggggcaccctgacatggagcctgccagctccgtcagccctgactcggcccggagctgagctccccacctgccggtagcccaggagatggagcagcccagcccacgtgcccggccttccgcccctgacttcacttgataacaaactagaaactgaaacagggtcgggatgccgatgccggcttggagttagagatgagtcaccgctgagagcagctgcagtagctgagcagtggcagcagagaggcagacgtgagctgagggcgcagaggcaggcagggtccccaaggarcatggctgggagccgtgaggtggtggccatggactgcgagatggtgggggctggggccccaccgggagagtggcctggctcgttgcagcctcgtgaaygtccacggygctgtgctgtacgacaagttcatccggcctgagggagagatcaccgattacagaacccgggtcagcggggtcacccctcagcacatggtgggggccacaccatttgccgtggccaggctagagatcctgcagctcctgaaaggcaagctggtggtgggtcatgacctgaagcacgacttccaggcactgaaagaggacatgagcggctacacaatctacgacacgtccactgacaggctgttgtggcgtgaggccaagctggaccactgcaggcgtgtctccctgcgggtgctgagtgagcgcctcctrcacaagagcatccagaacagcctgcttggacacagctcggtggaagatgcgagggcaacgatggagctctatcaaatctcccagagaatccgagcccgccgagggctgccccgcctggctgtgtcagactgaagccccatccagcccgttccgcagggactagaggctttcggctttttgggacagcaactaccttgcttttggaaaatacatttttaatagtaaagtggctctatattttctctacgccctctctgaggggagggcatcctgtatggggaggagggtctggaccagagctgtccctgatcgctagaatcaacggcagaattcttgttattttaataataattaataatttagtgcttccactaaataaaaatcattggaatggt

SEQ ID NO: 1288 - DNA, 1024 bp, Homo sapiens
aatccactccacgaacgtcaaatgcgtcatctgaggagggggagggccggggcaaaggaggggcaccctgacatggagcctgccagctccgtcagccctgactcggcccggagctgagctccccacctgccggtagcccaggagatggagcagcccagcccacgtgcccggccttccgcccctgacttcacttgataacaaactagaaactgaaacagggtcgggatgccgatgccggcttggagttagagatgagtcaccgctgagagcagctgcagtagctgagcagtggcagcagagaggcagacgtgagctgagggcgcagaggcaggcagcatctctgagggtccccaaggarcatggctgggagccgtgaggtggtggccatggactgcgagatggtgggggctggggccccaccgggagagtggcctggctcgttgcagcctcgtgaaygtccacggygctgtgctgtacgacaagttcatccggcctgagggagagatcaccgattacagaacccgggtcagcggggtcacccctcagcacatggtgggggccacaccatttgccgtggccaggctagagatcctgcagctcctgaaaggcaagctggtggtgggtcatgacctgaagcacgacttccaggcactgaaagaggacatgagcggctacacaatctacgacacgtccactgacaggctgttgtggcgtgaggccaagctggaccactgcaggcgtgtctccctgcgggtgctgagtgagcgcctcctrcacaagagcatccagaacagcctgcttggacacagctcggtggaagatgcgagggcaacgatggagctctatcaaatctcccagagaatccgagcccgccgagggctgccccgcctggctgtgtcagactgaagccccatccagcccgttccgcagggactagaggctttcggctttttgggacagcaactaccttgcttttggaaaatacatttttaatagtaaagtggctctatattttctctacgcc

SEQ ID NO: 1289 - DNA, 2287 bp, Homo sapiens
caagactagcgctcttgggaccggaagttaaggcgttcgcggcgtgtgaatccagggcctgaaaacccagaatgaacttgtgtccatcccagagatcactgcagatgtcatgaggtaccctttgtgtcaccagctcaagcaggcctctggccactttatcatctgtggtggtcctgtsccgtgaccaggaggaaaaattagctctttgaagagaaagtagttctctattgcaggcactggcctcttaaattgttgcaggtggggaatggatgagaatatttgttttgggtgatcagaactgagactcctattgtggattagtaacatgcctcctcctagaacaagggagggcagggatcgccgagaccaccacygggctcccagcgaggaagaggccttggagaaatgggactggaattgtccagagacgcgtcgcctcttggaagatgccttcttccgtgaagaggattacatccgtcagggttctgaggaatgtcagaagttttggaccttctttgaacgcctgcagagattccagaatctcaagacctccaggaaggaggagaaagaccctggacagcccaagcacagcatcccagcgctggccgacctacctcgcacttacgacccacgttaccgcatcaacctctctgttcttggccctgccacgcgggrctctcagggactgggcaggcacttgcccgcggagagagtggctgagttccgccgagccctgttgcactacctggactttggccagaagcaggcatttgggcgtctggccaagctgcagcgtgagcgggcagccctccccatcgcccagtatgggaaccgcatcctgcagacgctgaaggagcaccaggtggtggtagtggccggtgacaccggctgtggcaagtccactcaggtgccccagtacctgctggctgctggcttcagtcatgtggcgtgcacccagccccggcggatcgcctgcatctcactggccaagcgtgtgggctttgagagcctcagtcagtatggctcacaggtcggctaccagatccgctttgagagcacacgttcggcggccaccaagattgtattcctgacagtggggctgctcctgcgacaaatccagcgggaacccagcctgccccagtatgaggtcctgattgtrgatgaagtccatgagcggcatctccacaacgatttcctcctgggcgtcctccagcgcctgttgcscacgcggcctgacctcaaggtcatcctcatgtcggccaccatcaacatctcgctcttctccagctatttcagcaatgcccctgtggtacaggtgcctgggaggctgttccccatcacggttgtgtaccagccgcaggaggcggagccgaccacgtccaagtcagagaagctggacccgcggcctttcctgagggtgctggagtccattgaccacaagtacccgcctgaggagcggggtgacctcctcgtcttcctcagcggcatggcggagatcagcgccgtgctggaggctgcccagacctatgccagccacacccagcgctgggtggtactgccactgcacagcgccctgtctgtggccgaccaggacaaggtatttgatgtggcaccccctggagtccggaaatgcatcctctccaccaacattgctgagacctcagtcaccattgacgggatccgcttcgtagtagattccggaaaggtgaaggagatgagctacgatccgcaggccaagctgcaacggctgcaggagttctggattagtcaggccagcgcagagcagcggaagggccgggcgggccgcacgggccccggagtctgcttccgcctctatgccgaatcggactatgatgccttcgccccctaccccgtcccrgaaattcggagggtggccctggactcgttggtgctgcagatgaagagcatgagtgtgggggacccccgaaccttccccttcatcgagcccccaccaccagccagcctggaaaccgccatcctctacctccgggaccagggggccctggacagctcagaggccctcacacccattgggtccctgctagcccagctgcctgtggacgttgtgattgggaagatgctgatcctgggctccatgttcagcctggtggagcctgtgctcaccatcgcagccgcacttagcgtccagtcgcccttcacccgcagcgcccagagcagcccagagtgcgcggcagcayggcggccgctggagagcgaccagggtgaccccttcacgctcttcaacgtcttcaacgcctgggtgcag

SEQ ID NO: 1290 - DNA, 4342 bp, Homo sapiens
aatccagggcctgaaaacccagaatgaacttgtgtccatcccagagatcactgcagatgtcatgaggtaccctttgtgtcaccagctcaagcaggcctctggccactttatcatctgtggtggtcctgtsccgtgaccaggaggaaaaattagctctttgaagagaaagtagttctctattgcaggcactggcctcttaaattgttgcaggtggggaatggatgagaatatttgttttgggtgatcagaactgagactcctattgtggattagtaacatgcctcctcctagaacaagggagggcagggatcgccgagaccaccacygggctcccagcgaggaagaggccttggagaaatgggactggaattgtccagagacgcgtcgcctcttggaagatgccttcttccgtgaagaggattacatccgtcagggttctgaggaatgtcagaagttttggaccttctttgaacgcctgcagagattccagaatctcaagacctccaggaaggaggagaaagaccctggacagcccaagcacagcatcccagcgctggccgacctacctcgcacttacgacccacgttaccgcatcaacctctctgttcttggccctgccacgcgggrctctcagggactgggcaggcacttgcccgcggagagagtggctgagttccgccgagccctgttgcactacctggactttggccagaagcaggcatttgggcgtctggccaagctgcagcgtgagcgggcagccctccccatcgcccagtatgggaaccgcatcctgcagacgctgaaggagcaccaggtggtggtagtggccggtgacaccggctgtggcaagtccactcaggtgccccagtacctgctggctgctggcttcagtcatgtggcgtgcacccagccccggcggatcgcctgcatctcactggccaagcgtgtgggctttgagagcctcagtcagtatggctcacaggtcggctaccagatccgctttgagagcacacgttcggcggccaccaagattgtattcctgacagtggggctgctcctgcgacaaatccagcgggaacccagcctgccccagtatgaggtcctgattgtrgatgaagtccatgagcggcatctccacaacgatttcctcctgggcgtcctccagcgcctgttgcscacgcggcctgacctcaaggtcatcctcatgtcggccaccatcaacatctcgctcttctccagctatttcagcaatgcccctgtggtacaggtgcctgggaggctgttccccatcacggtatttgatgtggcaccccctggagtccggaaatgcatcctctccaccaacattgctgagacctcagtcaccattgacgggatccgcttcgtagtagattccggaaaggtgaaggagatgagctacgatccgcaggccaagctgcaacggctgcaggagttctggattagtcaggccagcgcagagcagcggaagggccgggcgggccgcacgggccccggagtctgcttccgcctctatgccgaatcggactatgatgccttcgccccctaccccgtcccrgaaattcggagggtggccctggactcgttggtgctgcagatgaagagcatgagtgtgggggacccccgaaccttccccttcatcgagcccccaccaccagccagcctggaaaccgccatcctctacctccgggaccagggggccctggacagctcagaggccctcacacccattgggtccctgctagcccagctgcctgtggacgttgtgattgggaagatgctgatcctgggctccatgttcagcctggtggagcctgtgctcaccatcgcagccgcacttagcgtccagtcgcccttcacccgcagcgcccagagcagcccagaggcgccgtgctgcaccccacctgcgtcttcgctggcagccccgaggtgctgcacgcacaggagctggaggccagcaactgcgacggaagccgagacgacaaggacaagatgagcagcaaacaccagctcctcagcttcgtgtccctgctggagaccaacaagccgtacctggtgaactgcgtccgcatccctgccctccagtccctcctgctttttagccggtctttggacaccaatggtgactgctcccgcctggtggccgatggctggctggagctgcagctagcagacagtgaaagtgccatccgactcctggcggcktccctgcggctccgtgcccgctgggaaagtgccctggaccggcagctggcgcaccaggcccagcagcagctggaggaggaggaggaggatacgccagtcagccccaaggaggtggccaccctgagcaaggaactcctgcaattcacggcatccaagattccttacagcctccggcggctcacagggctagaagtccagaacatgtatgtgggaccccagaccatcccagccaccccccatcttcctggcctctttggcagctccaccctgtccccccaccccacaaaggggggctacgcagtcactgacttcctcacctacaactgcctcacgaatgacacagacctgtacagcgactgtctccgaaccttctggacctgcccccactgtggcctgcatgcgcccctcacgcccctggagcgcatcgcccatgagaacacctgcccccaggccccacaggatgggcccccaggggctgaggaagctgccctcgaaaccctccagaagacatctgtcctgcagaggccctaccactgcgaggcctgcgggaaggacttcctctttacacccacagaggtgctgcgccaccggaagcagcacgtgtgagctgggccaggagccctgcccacctccgtgcagctgacctgcyctccagcccaggactaggggcaggactcttgcctgaacccccagcctgggcttagccctgtggtccygtcccagtgcagagggcctggagcacggattgtgaataaagcckcacatgctgatacacactgttaggcctgcacctgcccatccagaaagcagcagctgccttgttagtcctccccagggtctagctttccttcttcctgctgcagggtgctgcctgaggggtcctgggtaggaggggckttagagccagcagggacctcccatgtctccagattccaggtgcaggttcttagcacctccgcagccgctctctcttgagtccatcctcagtctctcctwccccttgaagtagggggaccctgaatttgcccatccacctgggtcactttgagagttgtgcaggggggctgggagcactggtgttcacgtgggaccacaggctgcaccataagacccactcacaataaaaaaataaaaggccgagccgggcatggttgctcactcccgtaataaaaaaataaaagaacatgctgggattacaggcgtgagccactgcacccggccgtgaccaacattcttaatctgtcctctagtgctggccactctaaaacttcacaagaatgtgctgtctgtgtctagcttcttttacccaacatgagsttgcatgggcttggttcattcattctgttccatgaattcatcacaatatatccattcttttgtccagggacatttggcttccagaaacctacccctaacaccagcccttccctccctctgcagaacaaaggccccatcagaggggacgtgctgggtgtcagcgtcagcttctgggaggaggaaggtcagagctaaggcctgaaggatgatgaggtatcargtgggtggaggggagacgctcaggaggtgggaaaggcggaggtgcacaggcttggttccaggtacaaataacgttactaggagcacacagtacctggattttgatgaatacattgtacatttctgtcctgtatgtatccagggttataggacgtgattataggacacgcatatatgtttggttttagtggactcttaaaaattgttttccaggggccgggcacagtggcttacgcctgtaatcccagcactttgggaggcctaggcgggcagatcacctgaggtcaggagttcaagatcagcctgaccaacatggagaaaccccgtctctattgggaggccgaggcgggaggatcacaaagtcaggagatcgagaccatcctggctaacacggtgaaaccccgtctctactaaaaatacaaaaaaattagctgggcgtggtggcgggcgcctgtagtcccagctactcgggaggctgaggcaggagaatggagtgaacccgggaggcagagcttgcagtgagccaagatcgtgccactgcactccagcctggttgacagagcaagactccgtctcaaaaaag

SEQ ID NO: 1291 - DNA, 4390 bp, Homo sapiens
caagactagcgctcttgggaccggaagttaaggcgttcgcggcgtgtgaatccagggcctgaaaacccagaatgaacttgtgtccatcccagagatcactgcagatgtcatgaggtaccctttgtgtcaccagctcaagcaggcctctggccactttatcatctgtggtggtcctgtsccgtgaccaggaggaaaaattagctctttgaagagaaagtagttctctattgcaggcactggcctcttaaattgttgcaggtggggaatggatgagaatatttgttttgggtgatcagaactgagactcctattgtggattagtaacatgcctcctcctagaacaagggagggcagggatcgccgagaccaccacygggctcccagcgaggaagaggccttggagaaatgggactggaattgtccagagacgcgtcgcctcttggaagatgccttcttccgtgaagaggattacatccgtcagggttctgaggaatgtcagaagttttggaccttctttgaacgcctgcagagattccagaatctcaagacctccaggaaggaggagaaagaccctggacagcccaagcacagcatcccagcgctggccgacctacctcgcacttacgacccacgttaccgcatcaacctctctgttcttggccctgccacgcgggrctctcagggactgggcaggcacttgcccgcggagagagtggctgagttccgccgagccctgttgcactacctggactttggccagaagcaggcatttgggcgtctggccaagctgcagcgtgagcgggcagccctccccatcgcccagtatgggaaccgcatcctgcagacgctgaaggagcaccaggtggtggtagtggccggtgacaccggctgtggcaagtccactcaggtgccccagtacctgctggctgctggcttcagtcatgtggcgtgcacccagccccggcggatcgcctgcatctcactggccaagcgtgtgggctttgagagcctcagtcagtatggctcacaggtcggctaccagatccgctttgagagcacacgttcggcggccaccaagattgtattcctgacagtggggctgctcctgcgacaaatccagcgggaacccagcctgccccagtatgaggtcctgattgtrgatgaagtccatgagcggcatctccacaacgatttcctcctgggcgtcctccagcgcctgttgcscacgcggcctgacctcaaggtcatcctcatgtcggccaccatcaacatctcgctcttctccagctatttcagcaatgcccctgtggtacaggtgcctgggaggctgttccccatcacggtatttgatgtggcaccccctggagtccggaaatgcatcctctccaccaacattgctgagacctcagtcaccattgacgggatccgcttcgtagtagattccggaaaggtgaaggagatgagctacgatccgcaggccaagctgcaacggctgcaggagttctggattagtcaggccagcgcagagcagcggaagggccgggcgggccgcacgggccccggagtctgcttccgcctctatgccgaatcggactatgatgccttcgccccctaccccgtcccrgaaattcggagggtggccctggactcgttggtgctgcagatgaagagcatgagtgtgggggacccccgaaccttccccttcatcgagcccccaccaccagccagcctggaaaccgccatcctctacctccgggaccagggggccctggacagctcagaggccctcacacccattgggtccctgctagcccagctgcctgtggacgttgtgattgggaagatgctgatcctgggctccatgttcagcctggtggagcctgtgctcaccatcgcagccgcacttagcgtccagtcgcccttcacccgcagcgcccagagcagcccagaggcgccgtgctgcaccccacctgcgtcttcgctggcagccccgaggtgctgcacgcacaggagctggaggccagcaactgcgacggaagccgagacgacaaggacaagatgagcagcaaacaccagctcctcagcttcgtgtccctgctggagaccaacaagccgtacctggtgaactgcgtccgcatccctgccctccagtccctcctgctttttagccggtctttggacaccaatggtgactgctcccgcctggtggccgatggctggctggagctgcagctagcagacagtgaaagtgccatccgactcctggcggcktccctgcggctccgtgcccgctgggaaagtgccctggaccggcagctggcgcaccaggcccagcagcagctggaggaggaggaggaggatacgccagtcagccccaaggaggtggccaccctgagcaaggaactcctgcaattcacggcatccaagattccttacagcctccggcggctcacagggctagaagtccagaacatgtatgtgggaccccagaccatcccagccaccccccatcttcctggcctctttggcagctccaccctgtccccccaccccacaaaggggggctacgcagtcactgacttcctcacctacaactgcctcacgaatgacacagacctgtacagcgactgtctccgaaccttctggacctgcccccactgtggcctgcatgcgcccctcacgcccctggagcgcatcgcccatgagaacacctgcccccaggccccacaggatgggcccccaggggctgaggaagctgccctcgaaaccctccagaagacatctgtcctgcagaggccctaccactgcgaggcctgcgggaaggacttcctctttacacccacagaggtgctgcgccaccggaagcagcacgtgtgagctgggccaggagccctgcccacctccgtgcagctgacctgcyctccagcccaggactaggggcaggactcttgcctgaacccccagcctgggcttagccctgtggtccygtcccagtgcagagggcctggagcacggattgtgaataaagcckcacatgctgatacacactgttaggcctgcacctgcccatccagaaagcagcagctgccttgttagtcctccccagggtctagctttccttcttcctgctgcagggtgctgcctgaggggtcctgggtaggaggggckttagagccagcagggacctcccatgtctccagattccaggtgcaggttcttagcacctccgcagccgctctctcttgagtccatcctcagtctctcctwccccttgaagtagggggaccctgaatttgcccatccacctgggtcactttgagagttgtgcaggggggctgggagcactggtgttcacgtgggaccacaggctgcaccataagacccactcacaataaaaaaataaaaggccgagccgggcatggttgctcactcccgtaataaaaaaataaaagaacatgctgggattacaggcgtgagccactgcacccggccgtgaccaacattcttaatctgtcctctagtgctggccactctaaaacttcacaagaatgtgctgtctgtgtctagcttcttttacccaacatgagsttgcatgggcttggttcattcattctgttccatgaattcatcacaatatatccattcttttgtccagggacatttggcttccagaaacctacccctaacaccagcccttccctccctctgcagaacaaaggccccatcagaggggacgtgctgggtgtcagcgtcagcttctgggaggaggaaggtcagagctaaggcctgaaggatgatgaggtatcargtgggtggaggggagacgctcaggaggtgggaaaggcggaggtgcacaggcttggttccaggtacaaataacgttactaggagcacacagtacctggattttgatgaatacattgtacatttctgtcctgtatgtatccagggttataggacgtgattataggacacgcatatatgtttggttttagtggactcttaaaaattgttttccaggggccgggcacagtggcttacgcctgtaatcccagcactttgggaggcctaggcgggcagatcacctgaggtcaggagttcaagatcagcctgaccaacatggagaaaccccgtctctattgggaggccgaggcgggaggatcacaaagtcaggagatcgagaccatcctggctaacacggtgaaaccccgtctctactaaaaatacaaaaaaattagctgggcgtggtggcgggcgcctgtagtcccagctactcgggaggctgaggcaggagaatggagtgaacccgggaggcagagcttgcagtgagccaagatcgtgccactgcactccagcctggttgacagagcaagactccgtctcaaaaaag

SEQ ID NO: 1292 - DNA, 4583 bp, Homo sapiens
caagactagcgctcttgggaccggaagttaaggcgttcgcggcgtgtgaatccagggcctgaaaacccagaatgaacttgtgtccatcccagagatcactgcagatgtcatgaggtaccctttgtgtcaccagctcaagcaggcctctggccactttatcatctgtggtggtcctgtsccgtgaccaggaggaaaaattagctctttgaagagaaagtagttctctattgcaggcactggcctcttaaattgttgcaggtggggaatggatgagaatatttgttttgggtgatcagaactgagactcctattgtggattagtaacatgcctcctcctagaacaagggagggcagggatcgccgagaccaccacygggctcccagcgaggaagaggccttggagaaatgggactggaattgtccagagacgcgtcgcctcttggaagatgccttcttccgtgaagaggattacatccgtcagggttctgaggaatgtcagaagttttggaccttctttgaacgcctgcagagattccagaatctcaagacctccaggaaggaggagaaagaccctggacagcccaagcacagcatcccagcgctggccgacctacctcgcacttacgacccacgttaccgcatcaacctctctgttcttggccctgccacgcgggrctctcagggactgggcaggcacttgcccgcggagagagtggctgagttccgccgagccctgttgcactacctggactttggccagaagcaggcatttgggcgtctggccaagctgcagcgtgagcgggcagccctccccatcgcccagtatgggaaccgcatcctgcagacgctgaaggagcaccaggtggtggtagtggccggtgacaccggctgtggcaagtccactcaggtgccccagtacctgctggctgctggcttcagtcatgtggcgtgcacccagccccggcggatcgcctgcatctcactggccaagcgtgtgggctttgagagcctcagtcagtatggctcacaggtcggctaccagatccgctttgagagcacacgttcggcggccaccaagattgtattcctgacagtggggctgctcctgcgacaaatccagcgggaacccagcctgccccagtatgaggtcctgattgtrgatgaagtccatgagcggcatctccacaacgatttcctcctgggcgtcctccagcgcctgttgcscacgcggcctgacctcaaggtcatcctcatgtcggccaccatcaacatctcgctcttctccagctatttcagcaatgcccctgtggtacaggtgcctgggaggctgttccccatcacggtatttgatgtggcaccccctggagtccggaaatgcatcctctccaccaacattgctgagacctcagtcaccattgacgggatccgcttcgtagtagattccggaaaggtgaaggagatgagctacgatccgcaggccaagctgcaacggctgcaggagttctggattagtcaggccagcgcagagcagcggaagggccgggcgggccgcacgggccccggagtctgcttccgcctctatgccgaatcggactatgatgccttcgccccctaccccgtcccrgaaattcggagggtggccctggactcgttggtgctgcagatgaagagcatgagtgtgggggacccccgaaccttccccttcatcgagcccccaccaccagccagcctggaaaccgccatcctctacctccgggaccagggggccctggacagctcagaggccctcacacccattgggtccctgctagcccagctgcctgtggacgttgtgattgggaagatgctgatcctgggctccatgttcagcctggtggagcctgtgctcaccatcgcagccgcacttagcgtccagtcgcccttcacccgcagcgcccagagcagcccagaggcgccgtgctgcaccccacctgcgtcttcgctggcagccccgaggtgctgcacgcacaggagctggaggccagcaactgcgacggaagccgagacgacaaggacaagatgagcagcaaacaccagctcctcagcttcgtgtccctgctggagaccaacaagccgtacctggtgaactgcgtccgcatccctgccctccagtccctcctgctttttagccggtctttggacaccaatggtgactgctcccgcctggtggccgatggctggctggagctgcagctagcagacagtgaaagtgccatccgactcctggcggcktccctgcggctccgtgcccgctgggaaagtgccctggaccggcagctggcgcaccaggcccagcagcagctggaggaggaggaggaggatacgccagtcagccccaaggaggtggccaccctgagcaaggaactcctgcaattcacggcatccaagattccttacagcctccggcggctcacagggctagaagtccagaacatgtatgtgggaccccagaccatcccagccaccccccatcttcctggcctctttggcagctccaccctgtccccccaccccacaaaggggggctacgcagtcactgacttcctcacctacaactgcctcacggtaagcatgaaccctccttccctgaaggtgggatttcaggaagaccccaccaccccgtttcaccttagtccagggacatagttcccaagtggggcccrtggccctgagggcttctgggaagggtcccgggggggcacttgggtggtgggtggcacttggcgggggcccagccctgacagctggcctgccacagaatgacacagacctgtacagcgactgtctccgaaccttctggacctgcccccactgtggcctgcatgcgcccctcacgcccctggagcgcatcgcccatgagaacacctgcccccaggccccacaggatgggcccccaggggctgaggaagctgccctcgaaaccctccagaagacatctgtcctgcagaggccctaccactgcgaggcctgcgggaaggacttcctctttacacccacagaggtgctgcgccaccggaagcagcacgtgtgagctgggccaggagccctgcccacctccgtgcagctgacctgcyctccagcccaggactaggggcaggactcttgcctgaacccccagcctgggcttagccctgtggtccygtcccagtgcagagggcctggagcacggattgtgaataaagcckcacatgctgatacacactgttaggcctgcacctgcccatccagaaagcagcagctgccttgttagtcctccccagggtctagctttccttcttcctgctgcagggtgctgcctgaggggtcctgggtaggaggggckttagagccagcagggacctcccatgtctccagattccaggtgcaggttcttagcacctccgcagccgctctctcttgagtccatcctcagtctctcctwccccttgaagtagggggaccctgaatttgcccatccacctgggtcactttgagagttgtgcaggggggctgggagcactggtgttcacgtgggaccacaggctgcaccataagacccactcacaataaaaaaataaaaggccgagccgggcatggttgctcactcccgtaataaaaaaataaaagaacatgctgggattacaggcgtgagccactgcacccggccgtgaccaacattcttaatctgtcctctagtgctggccactctaaaacttcacaagaatgtgctgtctgtgtctagcttcttttacccaacatgagsttgcatgggcttggttcattcattctgttccatgaattcatcacaatatatccattcttttgtccagggacatttggcttccagaaacctacccctaacaccagcccttccctccctctgcagaacaaaggccccatcagaggggacgtgctgggtgtcagcgtcagcttctgggaggaggaaggtcagagctaaggcctgaaggatgatgaggtatcargtgggtggaggggagacgctcaggaggtgggaaaggcggaggtgcacaggcttggttccaggtacaaataacgttactaggagcacacagtacctggattttgatgaatacattgtacatttctgtcctgtatgtatccagggttataggacgtgattataggacacgcatatatgtttggttttagtggactcttaaaaattgttttccaggggccgggcacagtggcttacgcctgtaatcccagcactttgggaggcctaggcgggcagatcacctgaggtcaggagttcaagatcagcctgaccaacatggagaaaccccgtctctattgggaggccgaggcgggaggatcacaaagtcaggagatcgagaccatcctggctaacacggtgaaaccccgtctctactaaaaatacaaaaaaattagctgggcgtggtggcgggcgcctgtagtcccagctactcgggaggctgaggcaggagaatggagtgaacccgggaggcagagcttgcagtgagccaagatcgtgccactgcactccagcctggttgacagagcaagactccgtctcaaaaaag

SEQ ID NO: 1293 - DNA, 3056 bp, Homo sapiens
tcccaggggacatggccctgtcctcatttcaggagccgggtttccatggacggtgcttggtcccaggtatctgcagagcctgggggtctgcggatcatggtaggagcccctcaggtcccctaagactctgcctccccgtgctccccccaggatgtgaagttcaagcttcggcatgacctggcgcagctgcaggccgctgccagctcagcccaggacctgagccgcgagcagctggctctgctgaagctrgtgctgggccggggcctgtacccacagctggccgtccccgacgccttcaacagcagccgaaaggactcagaccagattttccacacgcaggccaagcagggcgccgtgctgcaccccacctgcgtcttcgctggcagccccgaggtgctgcacgcacaggagctggaggccagcaactgcgacggaagccgaggcatggctgcgtgctgggagtcacattcagatttggctgaccttcttgtctgagccaggccaccaaagccatgccacgacaaggacaagatgagcagcaaacaccagctcctcagcttcgtgtccctgctggagaccaacaagccgtacctggtgaactgcgtccgcatccctgccctccagtccctcctgctttttagccggtctttggacaccaatggtgactgctcccgcctggtggccgatggctggctggagctgcagctagcagacagtgaaagtgccatccgactcctggcggcktccctgcggctccgtgcccgctgggaaagtgccctggaccggcagctggcgcaccaggcccagcagcagctggaggaggaggaggaggatacgccagtcagccccaaggaggtggccaccctgagcaaggaactcctgcaattcacggcatccaagattccttacagcctccggcggctcacagggctagaagtccagaacatgtatgtgggaccccagaccatcccagccaccccccatcttcctggcctctttggcagctccaccctgtccccccaccccacaaaggggggctacgcagtcactgacttcctcacctacaactgcctcacggtaagcatgaaccctccttccctgaaggtgggatttcaggaagaccccaccaccccgtttcaccttagtccagggacatagttcccaagtggggcccrtggccctgagggcttctgggaagggtcccgggggggcacttgggtggtgggtggcacttggcgggggcccagccctgacagctggcctgccacagaatgacacagacctgtacagcgactgtctccgaaccttctggacctgcccccactgtggcctgcatgcgcccctcacgcccctggagcgcatcgcccatgagaacacctgcccccaggccccacaggatgggcccccaggggctgaggaagctgccctcgaaaccctccagaagacatctgtcctgcagaggccctaccactgcgaggcctgcgggaaggacttcctctttacacccacagaggtgctgcgccaccggaagcagcacgtgtgagctgggccaggagccctgcccacctccgtgcagctgacctgcyctccagcccaggactaggggcaggactcttgcctgaacccccagcctgggcttagccctgtggtccygtcccagtgcagagggcctggagcacggattgtgaataaagcckcacatgctgatacacactgttaggcctgcacctgcccatccagaaagcagcagctgccttgttagtcctccccagggtctagctttccttcttcctgctgcagggtgctgcctgaggggtcctgggtaggaggggckttagagccagcagggacctcccatgtctccagattccaggtgcaggttcttagcacctccgcagccgctctctcttgagtccatcctcagtctctcctwccccttgaagtagggggaccctgaatttgcccatccacctgggtcactttgagagttgtgcaggggggctgggagcactggtgttcacgtgggaccacaggctgcaccataagacccactcacaataaaaaaataaaaggccgagccgggcatggttgctcactcccgtaataaaaaaataaaagaacatgctgggattacaggcgtgagccactgcacccggccgtgaccaacattcttaatctgtcctctagtgctggccactctaaaacttcacaagaatgtgctgtctgtgtctagcttcttttacccaacatgagsttgcatgggcttggttcattcattctgttccatgaattcatcacaatatatccattcttttgtccagggacatttggcttccagaaacctacccctaacaccagcccttccctccctctgcagaacaaaggccccatcagaggggacgtgctgggtgtcagcgtcagcttctgggaggaggaaggtcagagctaaggcctgaaggatgatgaggtatcargtgggtggaggggagacgctcaggaggtgggaaaggcggaggtgcacaggcttggttccaggtacaaataacgttactaggagcacacagtacctggattttgatgaatacattgtacatttctgtcctgtatgtatccagggttataggacgtgattataggacacgcatatatgtttggttttagtggactcttaaaaattgttttccaggggccgggcacagtggcttacgcctgtaatcccagcactttgggaggcctaggcgggcagatcacctgaggtcaggagttcaagatcagcctgaccaacatggagaaaccccgtctctattgggaggccgaggcgggaggatcacaaagtcaggagatcgagaccatcctggctaacacggtgaaaccccgtctctactaaaaatacaaaaaaattagctgggcgtggtggcgggcgcctgtagtcccagctactcgggaggctgaggcaggagaatggagtgaacccgggaggcagagcttgcagtgagccaagatcgtgccactgcactccagcctggttgacagagcaagactccgtctcaaaaaag

SEQ ID NO: 1294 - DNA, 1727 bp, Homo sapiens
gatggcacctgagcgtccctgggagaacctgggcgacaggccagagaccgaaagaaatggagaatccagggcctgaaaacccagaatgaacttgtgtccatcccagagatcactgcagatgtcatgaggtaccctttgtgtcaccagctcaagcaggcctctggccactttatcatctgtggtggtcctgtsccgtgaccaggaggaaaaattagctctttgaagagaaagtagttctctattgcaggcactggcctcttaaattgttgcaggtggggaatggatgagaatatttgttttgggtgatcagaactgagactcctattgtggattagtaacatgcctcctcctagaacaagggagggcagggatcgccgagaccaccacygggctcccagcgaggaagaggccttggagaaatgggactggaattgtccagagacgcgtcgcctcttggaagatgccttcttccgtgaagaggattacatccgtcagggttctgaggaatgtcagaagttttggaccttctttgaacgcctgcagagattccagaatctcaagacctccaggaaggaggagaaagaccctggacagcccaagcacagcatcccagcgctggccgacctacctcgcacttacgacccacgttaccgcatcaacctctctgttcttggccctgccacgcgggrctctcagggactgggcaggcacttgcccgcggagagagtggctgagttccgccgagccctgttgcactacctggactttggccagaagcaggcatttgggcgtctggccaagctgcagcgtgagcgggcagccctccccatcgcccagtatgggaaccgcatcctgcagacgctgaaggagcaccaggtggtggtagtggccggtgacaccggctgtggcaagtccactcaggtgccccagtacctgctggctgctggcttcagtcatgtggcgtgcacccagccccggcggatcgcctgcatctcactggccaagcgtgtgggctttgagagcctcagtcagtatggctcacaggtcggctaccagatccgctttgagagcacacgttcggcggccaccaagattgtattcctgacagtggggctgctcctgcgacaaatccagcgggaacccagcctgccccagtatgaggtcctgattgtrgatgaagtccatgagcggcatctccacaacgatttcctcctgggcgtcctccagcgcctgttgcscacgcggcctgacctcaaggtcatcctcatgtcggccaccatcaacatctcgctcttctccagctatttcagcaatgcccctgtggtacaggtgcctgggaggctgttccccatcacggtatttgatgtggcaccccctggagtccggaaatgcatcctctccaccaacattgctgagacctcagtcaccattgacgggatccgcttcgtagtagattccgatgaagagcatgagtgtgggggacccccgaaccttccccttcatcgagcccccaccaccagccagcctggaaaccgccatcctctacctccgggaccagggggccctggacagctcagaggccctcacacccattgggtccctgctagcccagctgcctgtggacgttgtgattgcctggtggagcctgtgctcaccatcgcagccgcacttagcgtccagtcgcccttcacccgcagcgcccagagcagcccagagtgcgcggcagc

SEQ ID NO: 1295 - DNA, 905 bp, Homo sapiens
cggccgcacacctcgcgtcgtctggggcagtgttgcgcgtgcgctgatgacaggcccgacacgcccctcttacgtccgcgaacccgtcttcgctcagcctctcgcagctttgcgctcgtgggagagtcccgcctccttctgcgaaccgcaccacccagatcccggggtgcgcggagggcgcgtctctgacggaagccggggcggacggtcggagtccggaagaaaaacagtccgcgacagctaggcgcgtgagaccggccgcccgcagggctgctctggcckggacccgctggccgggagacgcgaacctgccggaccaccgcgcggggacgacggcggccatgagctcgcggaagctgagcgggccgaaaggcaggaggctcagcatacacgtcgtgacttggaacgtggcttcggcagcgccccckctagatctcagtgacctgcttcagctgaacaaccggaacctcaatcttgacatatatgttattggtttgcaggaattgaactctgggatcataagcctcctttccgatgctgcctttaatgactcgtggagcagtttcctcatggatgtgctttcccctctgagcttcatcaaggtctcccatgtccgtatgcaggggatcctcttactggtctttgccaagtatcagcatttgccctatatccagattctgtctactaaatccacccccactggcctgtttgggtactgggggaacaaaggtggagtcaacatctgcctgaagctttatggctactatgtcagcatcatcaactgccacctgcctccccacatttccaacaattaccagcggctggagcactttgaccggatcctggagatgcagaattgtgaggggcgagacatcccaaacatcctggaccacgagtgagcctgg

SEQ ID NO: 1296 - DNA, 2939 bp, Homo sapiens
cggccgcacacctcgcgtcgtctggggcagtgttgcgcgtgcgctgatgacaggcccgacacgcccctcttacgtccgcgaacccgtcttcgctcagcctctcgcagctttgcgctcgtgggagagtcccgcctccttctgcgaaccgcaccacccagatcccggggtgcgcggagggcgcgtctctgacggaagccggggcggacggtcggagtccggaagaaaaacagtccgcgacagctaggcgcgtgagaccggccgcccgcagggctgctctggcckggacccgctggccgggagacgcgaacctgccggaccaccgcgcggggacgacggcggccatgagctcgcggaagctgagcgggccgaaaggcaggaggctcagcagcatacacgtcgtgacttggaacgtggcttcggcagcgccccckctagatctcagtgacctgcttcagctgaacaaccggaacctcaatcttgacatatatgttattggtttgcaggaattgaactctgggatcataagcctcctttccgatgctgcctttaatgactcgtggagcagtttcctcatggatgtgctttcccctctgagcttcatcaaggtctcccatgtccgtatgcaggggatcctcttactggtctttgccaagtatcagcatttgccctatatccagattctgtctactaaatccacccccactggcctgtttgggtactgggggaacaaaggtggagtcaacatctgcctgaagctttatggctactatgtcagcatcatcaactgccacctgcctccccacatttccaacaattaccagcggctggagcactttgaccggatcctggagatgcagaattgtgaggggcgagacatcccaaacatcctggaccacgacctcattatctggtttggagacatgaactttcggatcgaggactttgggttgcactttgttcgggaatccattaaaaatcggtgctacsgtggcctgtgggagaaggaccagctcarcattgccaagaaacatgacccgctgctccgggagttccaggagggccgcctactcttcccscccacctacaagtttgataggaactccaacgactatgacaccagtgagaaaaaacgcaagcctgcatggaccgatcgcatcctgtggaggctgaagcggcagccctgtgctggccccgacactsccataccgcyggcgtcacacttctccttgtctctgaggggctacagcagccacatgacgtacggyatcagygaycacaagcctgtctccggcacgttcgacttggagctgaagccattggtgtctgctccgctgatcgtcctgatgcccgaggacctgtggaccgtggaaaatgacatgatggtcagctactcttcaacctcggacttccccagcagcccrtgggactggattggactgtacaaggtggggctgcgggacgttaatgactacgtgtcctatgcctgggtcggggacagcaaggtctcctgcagcgacaayctgaaccaggtttacatcgacatcagcaatatccctaccactgaagatgagtttctcctctgttactacagmaacagtctgcgttctgtggtggggataagcagacccttccagatcccgcctggctccttgagggaggacccactgggtgaagcacagccacagatctgagccaggatgggagtgaatcccaggcggaggccagagctggcagccagctctgcctttccactgccgggagtgctgggggcccagcctggccccctgaagagacagccaagtgtcgtccacatactcctcccagagtgagctctaaccaggctcatttgctctctccactactcatctctggaattagcygcttaaatacaggtttttgttgctgagatgtgagtgaaaccagctagtgtgtcaacagtgaagacctggggacagttctgcgtctcatttctggattcctaccccctcttctagtcttgcccaagtagtcctgccaggcacatgccccatttggcacaggcctgcattcttgtcgtgccgtcctgggcctcaggctgtctgggaggggagatgctcacatttgtacaggctacatagactggtgcaagcagtgctggattccaggagtcttggcatctcatagcttgtccccgtgaggagtgagcagagggtctgggatttctgctttcagcaaaagcagtctgactcagtgggcagaatggaggggcccctctagccaggctcttacgccatggttatgagcaggttgatgagggtccttcggccagcacaaccttcctccctactcacggcatggagtctgactgcatggaagttccagatcctgacagagagaactgggaaggatccaggttcgcttccgttggtagcttgagtcccatgcctccaccctgccatctgaggaaggggtgacaagtggtcaaggagctgtggccacagacttttccagggtggtccttggcaggtkaggtgcgtctgtgccacccttgtcaggagycattgacgacgggccccccctggacccccygggacctcagagtgggggcaggcagaagggagaaccagctcaagacattttggaggatctggccctggggttcttcagagaacaccctctaggggctttggggacatggcctgtccccacatccagcacttgcctccgccatggtcactcggcagcccttttcccaggagaagacacctctgggagcctgctcagtgcttgtcctgccatcctgtgtcctgggactgagggttactccagttgctctgtgttgcatactctcccccgcaagcctgtgtatgaagaattgtcccctggcttccagcaggccatggctggctgttttgtgactgttacattgtgcaggggtaattattagcgtggcttttaca

SEQ ID NO: 1297 - DNA, 2936 bp, Homo sapiens
cggccgcacacctcgcgtcgtctggggcagtgttgcgcgtgcgctgatgacaggcccgacacgcccctcttacgtccgcgaacccgtcttcgctcagcctctcgcagctttgcgctcgtgggagagtcccgcctccttctgcgaaccgcaccacccagatcccggggtgcgcggagggcgcgtctctgacggaagccggggcggacggtcggagtccggaagaaaaacagtccgcgacagctaggcgcgtgagaccggccgcccgcagggctgctctggcckggacccgctggccgggagacgcgaacctgccggaccaccgcgcggggacgacggcggccatgagctcgcggaagctgagcgggccgaaaggcaggaggctcagcatacacgtcgtgacttggaacgtggcttcggcagcgccccckctagatctcagtgacctgcttcagctgaacaaccggaacctcaatcttgacatatatgttattggtttgcaggaattgaactctgggatcataagcctcctttccgatgctgcctttaatgactcgtggagcagtttcctcatggatgtgctttcccctctgagcttcatcaaggtctcccatgtccgtatgcaggggatcctcttactggtctttgccaagtatcagcatttgccctatatccagattctgtctactaaatccacccccactggcctgtttgggtactgggggaacaaaggtggagtcaacatctgcctgaagctttatggctactatgtcagcatcatcaactgccacctgcctccccacatttccaacaattaccagcggctggagcactttgaccggatcctggagatgcagaattgtgaggggcgagacatcccaaacatcctggaccacgacctcattatctggtttggagacatgaactttcggatcgaggactttgggttgcactttgttcgggaatccattaaaaatcggtgctacsgtggcctgtgggagaaggaccagctcarcattgccaagaaacatgacccgctgctccgggagttccaggagggccgcctactcttcccscccacctacaagtttgataggaactccaacgactatgacaccagtgagaaaaaacgcaagcctgcatggaccgatcgcatcctgtggaggctgaagcggcagccctgtgctggccccgacactsccataccgcyggcgtcacacttctccttgtctctgaggggctacagcagccacatgacgtacggyatcagygaycacaagcctgtctccggcacgttcgacttggagctgaagccattggtgtctgctccgctgatcgtcctgatgcccgaggacctgtggaccgtggaaaatgacatgatggtcagctactcttcaacctcggacttccccagcagcccrtgggactggattggactgtacaaggtggggctgcgggacgttaatgactacgtgtcctatgcctgggtcggggacagcaaggtctcctgcagcgacaayctgaaccaggtttacatcgacatcagcaatatccctaccactgaagatgagtttctcctctgttactacagmaacagtctgcgttctgtggtggggataagcagacccttccagatcccgcctggctccttgagggaggacccactgggtgaagcacagccacagatctgagccaggatgggagtgaatcccaggcggaggccagagctggcagccagctctgcctttccactgccgggagtgctgggggcccagcctggccccctgaagagacagccaagtgtcgtccacatactcctcccagagtgagctctaaccaggctcatttgctctctccactactcatctctggaattagcygcttaaatacaggtttttgttgctgagatgtgagtgaaaccagctagtgtgtcaacagtgaagacctggggacagttctgcgtctcatttctggattcctaccccctcttctagtcttgcccaagtagtcctgccaggcacatgccccatttggcacaggcctgcattcttgtcgtgccgtcctgggcctcaggctgtctgggaggggagatgctcacatttgtacaggctacatagactggtgcaagcagtgctggattccaggagtcttggcatctcatagcttgtccccgtgaggagtgagcagagggtctgggatttctgctttcagcaaaagcagtctgactcagtgggcagaatggaggggcccctctagccaggctcttacgccatggttatgagcaggttgatgagggtccttcggccagcacaaccttcctccctactcacggcatggagtctgactgcatggaagttccagatcctgacagagagaactgggaaggatccaggttcgcttccgttggtagcttgagtcccatgcctccaccctgccatctgaggaaggggtgacaagtggtcaaggagctgtggccacagacttttccagggtggtccttggcaggtkaggtgcgtctgtgccacccttgtcaggagycattgacgacgggccccccctggacccccygggacctcagagtgggggcaggcagaagggagaaccagctcaagacattttggaggatctggccctggggttcttcagagaacaccctctaggggctttggggacatggcctgtccccacatccagcacttgcctccgccatggtcactcggcagcccttttcccaggagaagacacctctgggagcctgctcagtgcttgtcctgccatcctgtgtcctgggactgagggttactccagttgctctgtgttgcatactctcccccgcaagcctgtgtatgaagaattgtcccctggcttccagcaggccatggctggctgttttgtgactgttacattgtgcaggggtaattattagcgtggcttttaca

SEQ ID NO: 1298 - DNA, 1995 bp, Homo sapiens
cggccgcacacctcgcgtcgtctggggcagtgttgcgcgtgcgctgatgacaggcccgacacgcccctcttacgtccgcgaacccgtcttcgctcagcctctcgcagctttgcgctcgtgggagagtcccgcctccttctgcgaaccgcaccacccagatcccggggtgcgcggagggcgcgtctctgacggaagccggggcggacggtcggagtccggaagaaaaacagtccgcgacagctaggcgcgtgagaccggccgcccgcagggctgctctggcckggacccgctggccgggagacgcgaacctgccggaccaccgcgcggggacgacggcggccatgagctcgcggaagctgagcgggccgaaaggcaggaggctcagcatacacgtcgtgacttggaacgtggcttcggcagcgccccckctagatctcagtgacctgcttcagctgaacaaccggaacctcaatcttgacatatatgttattggtttgcaggaattgaactctgggatcataagcctcctttccgatgctgcctttaatgactcgtggagcagtttcctcatggatgtgctttcccctctgagcttcatcaaggtctcccatgtccgtatgcaggggatcctcttactggtctttgccaagtatcagcatttgccctatatccagattctgtctactaaatccacccccactggcctgtttgggtactgggggaacaaaggtggagtcaacatctgcctgaagctttatggctactatgtcagcatcatcaactgccacctgcctccccacatttccaacaattaccagcggctggagcactttgaccggatcctggagatgcagaattgtgaggggcgagacatcccaaacatcctggaccacgacctcattatctggtttggagacatgaactttcggatcgaggactttgggttgcactttgttcgggaatccattaaaaatcggtgctacsgtggcctgtgggagaaggaccagctcarcattgccaagaaacatgacccgctgctccgggagttccaggagggccgcctactcttcccscccacctacaagtttgataggaactccaacgactatgacaccagtgagaaaaaacgcaagcctgcatggaccgatcgcatcctgtggaggctgaagcggcagccctgtgctggccccgacactsccataccgcyggcgtcacacttctccttgtctctgaggggctacagcagccacatgacgtacggyatcagygaycacaagcctgtctccggcacgttcgacttggagctgaagccattggtgtctgctccgctgatcgtcctgatgcccgaggacctgtggaccgtggaaaatgacatgatggtcagctactcttcaacctcggacttccccagcagcccrtgggactggattggactgtacaaggtggggctgcgggacgttaatgactacgtgtcctatgcctgggtcggggacagcaaggtctcctgcagcgacaayctgaaccaggtttacatcgacatcagcaatatccctaccactgaagatgagtttctcctctgttactacagmaacagtctgcgttctgtggtggggataagcagacccttccagatcccgcctggctccttgagggaggacccactgggtgaagcacagccacagatctgagccaggatgggagtgaatcccaggcggaggccagagctggcagccagctctgcctttccactgccgggagtgctgggggcccagcctggccccctgaagagacagccaagtgtcgtccacatactcctcccagagtgagctctaaccaggctcatttgctctctccactactcatctctggaattagcygcttaaatacaggtttttgttgctgagatgtgagtgaaaccagctagcttccagcaggccatggctggctgttttgtgactgttacattgtgcaggggtaattattagcgtggctttt

SEQ ID NO: 1299 - DNA, 3167 bp, Homo sapiens
cggccgcacacctcgcgtcgtctggggcagtgttgcgcgtgcgctgatgacaggcccgacacgcccctcttacgtccgcgaacccgtcttcgctcagcctctcgcagctttgcgctcgtgggagagtcccgcctccttctgcgaaccgcaccacccagatcccggggtgcgcggagggcgcgtctctgacggaagccggggcggacggtcggagtccggaagaaaaacagtccgcgacagctaggcgcgtgagaccggccgcccgcagggctgctctggcckggacccgctggccgggagacgcgaacctgccggaccaccgcgcggggacgacggcggccatgagctcgcggaagctgagcgggccgaaaggcaggaggctcagcacatacatcaggaggtctgcctgatcccatggtgaaccccgggaatccgaaatcagattgagataagatcctttagggaagtgacttagcctggtctcttgcctgctctttcacggggaacaacgctaatcgcccacttagtctaagtcacgatgcttggatttgctgctaatcgtcggatttgagagtgggaacaagaaatccggacttttgctctccatcctcttagacatacacgtcgtgacttggaacgtggcttcggcagcgccccckctagatctcagtgacctgcttcagctgaacaaccggaacctcaatcttgacatatatgttattggtttgcaggaattgaactctgggatcataagcctcctttccgatgctgcctttaatgactcgtggagcagtttcctcatggatgtgctttcccctctgagcttcatcaaggtctcccatgtccgtatgcaggggatcctcttactggtctttgccaagtatcagcatttgccctatatccagattctgtctactaaatccacccccactggcctgtttgggtactgggggaacaaaggtggagtcaacatctgcctgaagctttatggctactatgtcagcatcatcaactgccacctgcctccccacatttccaacaattaccagcggctggagcactttgaccggatcctggagatgcagaattgtgaggggcgagacatcccaaacatcctggaccacgacctcattatctggtttggagacatgaactttcggatcgaggactttgggttgcactttgttcgggaatccattaaaaatcggtgctacsgtggcctgtgggagaaggaccagctcarcattgccaagaaacatgacccgctgctccgggagttccaggagggccgcctactcttcccscccacctacaagtttgataggaactccaacgactatgacaccagtgagaaaaaacgcaagcctgcatggaccgatcgcatcctgtggaggctgaagcggcagccctgtgctggccccgacactsccataccgcyggcgtcacacttctccttgtctctgaggggctacagcagccacatgacgtacggyatcagygaycacaagcctgtctccggcacgttcgacttggagctgaagccattggtgtctgctccgctgatcgtcctgatgcccgaggacctgtggaccgtggaaaatgacatgatggtcagctactcttcaacctcggacttccccagcagcccrtgggactggattggactgtacaaggtggggctgcgggacgttaatgactacgtgtcctatgcctgggtcggggacagcaaggtctcctgcagcgacaayctgaaccaggtttacatcgacatcagcaatatccctaccactgaagatgagtttctcctctgttactacagmaacagtctgcgttctgtggtggggataagcagacccttccagatcccgcctggctccttgagggaggacccactgggtgaagcacagccacagatctgagccaggatgggagtgaatcccaggcggaggccagagctggcagccagctctgcctttccactgccgggagtgctgggggcccagcctggccccctgaagagacagccaagtgtcgtccacatactcctcccagagtgagctctaaccaggctcatttgctctctccactactcatctctggaattagcygcttaaatacaggtttttgttgctgagatgtgagtgaaaccagctagtgtgtcaacagtgaagacctggggacagttctgcgtctcatttctggattcctaccccctcttctagtcttgcccaagtagtcctgccaggcacatgccccatttggcacaggcctgcattcttgtcgtgccgtcctgggcctcaggctgtctgggaggggagatgctcacatttgtacaggctacatagactggtgcaagcagtgctggattccaggagtcttggcatctcatagcttgtccccgtgaggagtgagcagagggtctgggatttctgctttcagcaaaagcagtctgactcagtgggcagaatggaggggcccctctagccaggctcttacgccatggttatgagcaggttgatgagggtccttcggccagcacaaccttcctccctactcacggcatggagtctgactgcatggaagttccagatcctgacagagagaactgggaaggatccaggttcgcttccgttggtagcttgagtcccatgcctccaccctgccatctgaggaaggggtgacaagtggtcaaggagctgtggccacagacttttccagggtggtccttggcaggtkaggtgcgtctgtgccacccttgtcaggagycattgacgacgggccccccctggacccccygggacctcagagtgggggcaggcagaagggagaaccagctcaagacattttggaggatctggccctggggttcttcagagaacaccctctaggggctttggggacatggcctgtccccacatccagcacttgcctccgccatggtcactcggcagcccttttcccaggagaagacacctctgggagcctgctcagtgcttgtcctgccatcctgtgtcctgggactgagggttactccagttgctctgtgttgcatactctcccccgcaagcctgtgtatgaagaattgtcccctggcttccagcaggccatggctggctgttttgtgactgttacattgtgcaggggtaattattagcgtggcttttaca

SEQ ID NO: 1300 - DNA, 2227 bp, Homo sapiens
ccggagtctcgcgcccgcggtcatgtgacacagcgaagatrgcgtcgcccggctgcctgtggctctwggctgtggctctcctgccatggacctgcgcttctcgggcrctgcagcatctggacccgccggcgccgctgccgttggtgatctggcawgggatggragacagctgttgcaatcccttaagcatgggtgctattaaaaaaatggtggagaagaaaatacctggaatttacgtcttatctttagagattgggaagmccctgatggaggrcgtggagaacagcttcttcttgaatgtcaattcccaagtaacaacagtgtrtcaggcacttgctaaggatcctwaattgcagcaasgctacaatgctatgggattctcccagggagrccaatttctgwgggcagtggctcagagatgcccttcacctcccatgaycaatctgatctcggttgggggacaacatcaaggtgtttttggactccctygatgmccaggagagagctctcacatctgtgacttcatcygaaaaacactgaatgctggggcgtactccaaagttgttcaggaacgcctcgtgcaagccgaatactggcatgaccccataaaggaggatgtgtatcgcaaccacagcatcttcttggcagatataaatcaggagcggggtatcaatgagtcctacaagaaaaacctgatggccctgaagaagtytgtgatggtgaaattcctcaatgattccattgtggaccctgtagattcggagtggtttggatttyacagaagtggccaagccaaggaaaccattcccttacaggagacctccctgtacacacaggaccgcctggggctaaaggaaatggacaatgcaggacagctagtgtttctggctacagaaggggaccatcttyagttgtctgaagaatgrttttatgcccacatcataccattccttggatgaaacccgtatagttcacaatagagctcagggagcccctaactcttccaaaccacatgggagacagtttccttcatgcccaagcctgagctcagatccagcttgcaactaatccttctatcatctaacatgccctacttggaaagatctaagatctgaatcttatcctttttcagttttagaaaagggagtctgttccagatcagkgccagaactgtgcccaggcccaaaggagacaactaactaaagtagtgagatagattctaagggcaaacatttttccaagtcttgccatatttcaagcaaagaggtgcccaggcctgaggtactcacataaatgctttgttttgctggtgatttaaccagtgcttggaaaaatcttgcttggctatttctgcatcatttcttaaggctgccttcctctctsagtacgttgccctctgtgctatcatcttatcatcaattattagacaaatcccactggcctacagtcttgcttctgcagcacccactttgtctcctcaggtagtgatgaattagttgctgtcacaaaaggagggaagtagcacccaaattaarttgcttaagagaggaaatgtacatcttgtataacttagggagcgaagaaaatgtaggcgcgaaagtgaaaagtgaggcagctagttcttcctattccattctcgaccaacctgccctttcttaatatgactagtggtcttgatgctagagtcaacttactctgttgctggctttagcagagaataggaggaaccatatgaaaaagatcaggctttctgacttccatccccaaaacacatttaccagcatactccaaactgtttctgatgtgttccatgagaaaaggattgtttgctcaaaaagcttggaaaatactacacactccctttctccttctggagatcaacccacattagagtgtctaaggactcctgagaattcctgttacagtaaacaaaactaacgtaatctaccatttcctacactatttgagcatggaaatcatagtccccactctgtgaaaacttaacgctttttggaagacatttctgtagcatgtcagtttggagaaatgatgagctacgccttgatgaaagaaccgtgttggtgctgctaagtttagccattatggtttttcctttctctctcttaagccttattcttcaactaaaagatgaggattaagagcaagaagttgggggggatgtgaaaataattttatgaggttgtctaaaataaagagtagtttctta

SEQ ID NO: 1301 - DNA, 2308 bp, Homo sapiens
ccggagtctcgcgcccgcggtcatgtgacacagcgaagatrgcgtcgcccggctgcctgtggctctwggctgtggctctcctgccatggacctgcgcttctcgggcrctgcagcatctggacccgccggcgccgctgccgttggtgatctggcawgggatggragacagctgttgcaatcccttaagcatgggtgctattaaaaaaatggtggagaagaaaatacctggaatttacgtcttatctttagagattgggaagmccctgatggaggrcgtggagaacagcttcttcttgaatgtcaattcccaagtaacaacagtgtrtcaggcacttgctaaggatcctwaattgcagcaasgctacaatgctatgggattctcccagggagrccaatttctgwgggcagtggctcagagatgcccttcacctcccatgaycaatctgatctcggttgggggacaacatcaaggtgtttttggactccctygatgmccaggagagagctctcacatctgtgacttcatcygaaaaacactgaatgctggggcgtactccaaagttgttcaggaacgcctcgtgcaagccgaatactggcatgaccccataaaggaggatgtgtatcgcaaccacagcatcttcttggcagatataaatcaggagcggggtatcaatgagtcctacaagaaaaacctgatggccctgaagaagtytgtgatggtgaaattcctcaatgattccattgtggaccctgtagattcggagtggtttggatttyacagaagtggccaagccaaggaaaccattcccttacaggagacctccctgtacacacaggaccgcctggggctaaaggaaatggacaatgcaggacagctagtgtttctggctacagaaggggaccatcttyagttgtctgaagaatgrttttatgcccacatcataccattccttggatgaaacccgtatagttcacaatagagctcagggagcccctaactcttccaaaccacatgggagacagtttccttcatgcccaagcctgagctcagatccagcttgcaactaatccttctatcatctaacatgccctacttggaaagatctaagatctgaatcttatcctttgccatcttctgttaccatatggtgttgaatgcaagtttaattaccatggagattgttttacaaacttttgatgtggtcaagttcagttttagaaaagggagtctgttccagatcagkgccagaactgtgcccaggcccaaaggagacaactaactaaagtagtgagatagattctaagggcaaacatttttccaagtcttgccatatttcaagcaaagaggtgcccaggcctgaggtactcacataaatgctttgttttgctggtgatttaaccagtgcttggaaaaatcttgcttggctatttctgcatcatttcttaaggctgccttcctctctsagtacgttgccctctgtgctatcatcttatcatcaattattagacaaatcccactggcctacagtcttgcttctgcagcacccactttgtctcctcaggtagtgatgaattagttgctgtcacaaaaggagggaagtagcacccaaattaarttgcttaagagaggaaatgtacatcttgtataacttagggagcgaagaaaatgtaggcgcgaaagtgaaaagtgaggcagctagttcttcctattccattctcgaccaacctgccctttcttaatatgactagtggtcttgatgctagagtcaacttactctgttgctggctttagcagagaataggaggaaccatatgaaaaagatcaggctttctgacttccatccccaaaacacatttaccagcatactccaaactgtttctgatgtgttccatgagaaaaggattgtttgctcaaaaagcttggaaaatactacacactccctttctccttctggagatcaacccacattagagtgtctaaggactcctgagaattcctgttacagtaaacaaaactaacgtaatctaccatttcctacactatttgagcatggaaatcatagtccccactctgtgaaaacttaacgctttttggaagacatttctgtagcatgtcagtttggagaaatgatgagctacgccttgatgaaagaaccgtgttggtgctgctaagtttagccattatggtttttcctttctctctcttaagccttattcttcaactaaaagatgaggattaagagcaagaagttgggggggatgtgaaaataattttatgaggttgtctaaaataaagagtagtttctta

SEQ ID NO: 1302 - DNA, 1885 bp, Homo sapiens
atgactaccccagccctgctgccctctccagacgtgggatcccacctctgaacctggggccgccctccccacatcacagcactaccttgagactttctgagaagacacttatttttaatgccttcatcaccctgtgtttgggggcattcttttttcttctaggcttctcaaaacacaaacgctttgatctgggtttagacgatgtgttaattcctcatgtagtagctggcaaaggggctaaaaaccctgaagtcttcctgatctatgcacccaattaacatacacacagagaagaagaagaagaacctctgagaaataaagttcgagctaatcatgacaagtccctggaagagacaaaagaaaaattgagaaaaaaagaaaagtcaagcaaggaaatccaagcagaaattcagatagagaaaaatagggtccragaaatgaagacagagaacaagccactgccaccagtccttattccaaactttgtaggcatgaatggtggagacctggaagacaacataaaaaagaaaagggaaaaaaattaaagcatgaaacatgcctaggataattataggacatacagttgggggcataatgaactcagacctattaaaaggaaaggatgtgccactaacatttgaaaattcacaaatgggtgctaccgttgtagatgctttggataccctttatatcttgggacttcatgctgaattcctagatgtgcaaagattgtttaaagacaaccttgaggtcagtgtgaattcagagatgtttgtgtttgacgtcaacattcagtttattgaaggcctacttgcagcatatcacctttcaggaaaggagatattcaagattaaagctgtgcaactggctaagaaattccttcctgcctttcacacatgtactgggattccctggacaatggtacatttgcagagtggagtagggtgcagctgaagctaggggcctgcatgtagcagcattctggctgaatctggtacactgcacatggagtwcatccacctcagctacttgacagaagacctggtttactacaacaaggtcatgtacatgcggaaactgcttcagaaaatggattgtccaaacggtctttatccaaattaaacccaagaacagggtgctggggtcggtatcacacatcatttggtgatcgggagacagtttttatgactacttactgagagcacgtttgatgtcagataaaacagaccatgaatggagaaagatgtgtggtgatgctcttgaggctgcaaaaaaacaagaactcccatggatgtcttaatctttagtaaagaatggatcagtgggcacttggaaaacaagatggggcatctggcctgctttgctggggtaatgtttgcactaggagaagatggttccagaacagataagtctgtcattatttagagctggggtggaaattgcatatacrtgtcatgagtcatatgacagactgcattaaagctaggtcctgagtcagtcaagtttgatggtgcagtggaggttgtggctgtcaggctgaaaagtattatatcctgtgtccagaagtaattgaaaccgttggtacctacggtgattctctcacaatccaaaatacaggcagtggggcagggaacagcactggccattgaaaagtattgctgagtcagtggtggattttctggagtcaaagatgtacatttctctactcctacacatggtgatgtagagcagggtgtctttcttgctgaaacacttaaaatatttgtatgtgctgttctccagtsgtgaccttttacctttagactactaggtgtttaatacagaggctcaccctctgcctgtgttacatttagccaacaccacactttcaggtaattctgctgtt

SEQ ID NO: 1303 - DNA, 435 bp, Homo sapiens
atgcagggcaaggctgtgaacagacacacctgcgccttcttcctcaccctcgtgaagctcatggcctgcacaggggcagaggkgccccgagtggcagcacatatgcttgcggctcytgcatcctgcacaacacaggcaccrggctgggttggcagctatcattccacagagccagccccgtccctgatgtcacggagctctgggtctcctgtgccagccaayaccgagcagcccaagcttctcgggggccgcggaggaggaggaaggtgcgtccggacaggcgagtgcggcggcgacagcgacagcggctggccgggctcaggcttctcaaaacacaaacgctttgatctgggtttagacgatgtgttaattcctcatgtagtagctggcaaaggggctaaaaaccctgaagtcttcctgatctatgcacccaat

SEQ ID NO: 1304 - DNA, 715 bp, Homo sapiens
cggggcaaacytggagaggcgctgcgtcgggggacgrggctacaagccgtcrctgggggcggggcttgcggcccacctgtaggtcccggtgccacctcgtcagtgtcccgagagatccccagaagaacgagagggctgaacaggggaccccactgacgtccggtgggccgactttacgatcctttaggatgaagaaactaagactcagagaagacaaatgacatgcccaaagacacattgataagaacgcatctggtagtggtgttcgagtccagcgttgcagcagagagatggccactcgaggcccatgtcctcaacaaagagaaagacggtggggtgctgtcagccaggaataaggacaatgagagccagcaagcagggaagtggagcaaggatggtgccgtccggctgctcagctgctggctggaactcccggaggactctgtgaggatgcaggtagaagagggaagcccaccagagccctcttctctctggggaggagctggctccctgaatctccaagacaaacccagmcagccctggggaccttgaatgtgagcaaggggagcagaaaggaggctccagcccacccagggcccctgcagggtctgcacacacaattacaggtcctcatttccctctcctaatgatgccccaaaacattaagggaagttaaatcaaaccaccaggtgtccagcatgaacagctgaaataa

SEQ ID NO: 1305 - DNA, 3406 bp, Homo sapiens
ctcccctggccaggagcaggggattagtctgccccgcgaccggccccagccacgacgcggacatcgccccctctgtctgggccgctgtcactcacgcgccaaagggccacggagaaagaaggggcgggccggggcgggccgggcgagcggaggcggggacttgcgccgtcctgaggctgcctcctagggtccggccggcgctggagctgcggatttagattgtcactgccacctcggtcggtgcttacttcgctgccagctggtcgtcgccatgaacccggacctgcgcagggagcgggattccgccagcttcaacccggagctgcttacacacatcctggacggcagccccgagaaaacccggcgccgccgagagatcgagaacatgatcctgaacgacccagacttccagcatgaggacttgaacttcctcactcgcagccagcgttatgaggtggctgtcaggaaaagtgccatcatggtgaagaagatgagggagtttggcatcgctgaccctgatgaaattatgtggtttaaaaaactacatttggtcaattttgtggaacctgtgrgcctcaattactccatgtttattcctaccttgctgaatcagggcaccactgctcagaaagagaaatggctgctttcatccaaaggactccagataattggcacctacgcccagacggaaatgggccacggaactcaccttcgaggcttggaaaccacagccacgtatgaccctgaaacccaggagttcattctcaacagtcctactgtgacctccattaaatggtggcctggtgggcttggaaagacttcaaatcatgcaatagttcttgcccagctcatcactaaggggaaatgctatggattacatgcctttatcgtacctattcgtgaaatcgggacccataagcctttgccaggaattaccgttggtgacatcggccccaaatttggttatgatgagatagacaatggctacctcaaaatggacaaccatcgtattcccagagaaaacatgctgatgaagtatgcccaggtgaagcctgatggcacatacgtgaaaccgctgagtaacaagctgacttacgggaccatggtgtttgtcaggtccttccttgtgggagaagctgctcgggctctgtctaaggcgtgcaccattgccatccgatacagcgctgtgaggcaccagtctgaaatsaagccaggtgaaccagaaccacagattttggattttcaaacccagcagtataaactctttccactcctggccactgcctatgccttccagtttgtgggcgcatacatgaaggagacctatcaccggattaacgaaggcattggtcaaggggacctgagtgaactgcctgagcttcatgccctcaccgctggactgaaggctttcacctcctggactgcaaacactggcattgaagcatgtcggatggcttgtggtgggcatggctattctcattgcagtggtcttccaaatatttatgtcaatttcaccccaagctgtacctttgagggagaaaacactgtcatgatgctccagacggctaggttcctgatgaaaagttatgatcaggtgcactcaggaaagttggtgtgtggcatggtgtcctatttgaacgacctgcccagtcagcgcatccagccacagcaggtagcagtctggccaaccatggtggatatcaacagccccgaaagcctaaccgaagcatataaactccgtgcagccagattagtagaaattgctgcaaaaaaccttcaaaaagaagtgattcacagaaaaagcaaggaggtagcttggaacctaacttctgttgaccttgttcgagcaagtgaggcacattgccactatgtggtagttaagctcttttcagaaaaactcctcaaaattcaagataaagccattcaagctgtcttaaggagtttatgtctgctgtattctctgtatggaatcagtcagaacgcgggggatttccttcaggggagcatcatgacagagcctcagattacacaagtaaaccagygtgtaaaggagttactcactctgattcgctcagatgctrttgctttggttgatgcatttgattttcaggatgtgacacttggctctgtgcttggccgctatgatgggaatgtgtatgaaaacttgtttgagtgggctaagaactccccactgaacaaagcagaggtccacgaatcttacaagcacctgaagtcactgcagtccaagctctgaagtgtcacaaggacaagtttaatctgcttcagaaagcgcctgtgtgcaactcaaattttgtggaatctttttcgaattcaaatagctatagagcaaatgataaattgacccctttttataaatggagggaaaaaatgaacagatttcagagattaaatgaaaaaaagcagatgttttaagtgcaattaacactgaaagagacctgttaaaccattcagaaaaagcttaagaaatgcgatatgacttccttttgtaatgctgctgatcccagtagactatgacttttgataattagcagaatttaactactgagtagttgattattttcacattttaattgctaatcactggctatataagtgtttttaagcaaaggtatttttgaagtggtgtagaacccttccaagctttcctgctcagtgttctaccagacttaccctggggcctggcttaaaagcaggattgaagaaaagggactgggggaaggaaacttattggaaaacttgatgcgaatgagtttctgcttggcacagtctctgcctgcttgctctcctttgctgatggattgcatttatcaaactattcatgctagcatttttccaacgagggaacttattccgcacgggcctactgtaggaccattgtctcgtgtarttaggaattttccatttgaaggatygctaaattgtcacagtagtaggaagtatagggaaacctctcagctgtggcactgttgtagctttggagtgcagagtgtaactctgggacaatcagatttcacatattctgtcatcttggcataagccattaaaagcttggagattactgtatttggcattaaaaaaaaatgtcacttaggtcagcactcccagaygtagcacagaaaaaccctttgacacaaaccatgtgttctgatttttggttcagaaaatattgaaactgtgagttgttttttttttaacaactgggaaaaaacaaaaacaaaaaactatagttagaaaaatggaagttccataggttctatttcttactctatgtatggctttgttttcagtctatttctaggagctttctctgaatcgctaattgtcctttcagttgaaatctaatttatacaatcattctatacttaaaggttaaatacatcttaat

SEQ ID NO: 1306 - DNA, 2830 bp, Homo sapiens
ctcccctggccaggagcaggggattagtctgccccgcgaccggccccagccacgacgcggacatcgccccctctgtctgggccgctgtcactcacgcgccaaagggccacggagaaagaaggggcgggccggggcgggccgggcgagcggaggcggggacttgcgccgtcctgaggctgcctcctagggtccggccggcgctggagctgcggatttagattgtcactgccacctcggtcggtgcttacttcgctgccagctggtcgtcgccatgaacccggacctgcgcagggagcgggattccgccagcttcaacccggagctgcttacacacatcctggacggcagccccgagaaaacccggcgccgccgagagatcgagaacatgatcctgaacgacccagacttccagcatgaggacttgaacttcctcactcgcagccagcgttatgaggtggctgtcaggaaaagtgccatcatggtgaagaagatgagggagtttggcatcgctgaccctgatgaaattatgtggtttaaaaattttgtgcaccgagggcggcctgagcctctggatcttcacttgggcatgttcctgcccaccttgcttcaccaggcaactgcggagcagcaggagcgcttcttcatgcccgcctggaacttggagatcattggcacttatgcccagacagagatgggtcatggaactcaccttcgaggcttggaaaccacagccacgtatgaccctgaaacccaggagttcattctcaacagtcctactgtgacctccattaaatggtggcctggtgggcttggaaagacttcaaatcatgcaatagttcttgcccagctcatcactaaggggaaatgctatggattacatgcctttatcgtacctattcgtgaaatcgggacccataagcctttgccaggaattaccgttggtgacatcggccccaaatttggttatgatgagatagacaatggctacctcaaaatggacaaccatcgtattcccagagaaaacatgctgatgaagtatgcccaggtgaagcctgatggcacatacgtgaaaccgctgagtaacaagctgacttacgggaccatggtgtttgtcaggtccttccttgtgggagaagctgctcgggctctgtctaaggcgtgcaccattgccatccgatacagcgctgtgaggcaccagtctgaaatsaagccaggtgaaccagaaccacagattttggattttcaaacccagcagtataaactctttccactcctggccactgcctatgccttccagtttgtgggcgcatacatgaaggagacctatcaccggattaacgaaggcattggtcaaggggacctgagtgaactgcctgagcttcatgccctcaccgctggactgaaggctttcacctcctggactgcaaacactggcattgaagcatgtcggatggcttgtggtgggcatggctattctcattgcagtggtcttccaaatatttatgtcaatttcaccccaagctgtacctttgagggagaaaacactgtcatgatgctccagacggctaggttcctgatgaaaagttatgatcaggtgcactcaggaaagttggtgtgtggcatggtgtcctatttgaacgacctgcccagtcagcgcatccagccacagcaggtagcagtctggccaaccatggtggatatcaacagccccgaaagcctaaccgaagcatataaactccgtgcagccagattagtagaaattgctgcaaaaaaccttcaaaaagaagtgattcacagaaaaagcaaggaggtagcttggaacctaacttctgttgaccttgttcgagcaagtgaggcacattgccactatgtggtagttaagctcttttcagaaaaactcctcaaaattcaagataaagccattcaagctgtcttaaggagtttatgtctgctgtattctctgtatggaatcagtcagaacgcgggggatttccttcaggggagcatcatgacagagcctcagattacacaagtaaaccagygtgtaaaggagttactcactctgattcgctcagatgctrttgctttggttgatgcatttgattttcaggatgtgacacttggctctgtgcttggccgctatgatgggaatgtgtatgaaaacttgtttgagtgggctaagaactccccactgaacaaagcagaggtccacgaatcttacaagcacctgaagtcactgcagtccaagctctgaagtgtcacaaggacaagtttaatctgcttcagaaagcgcctgtgtgcaactcaaattttgtggaatctttttcgaattcaaatagctatagagcaaatgataaattgacccctttttataaatggagggaaaaaatgaacagatttcagagattaaatgaaaaaaagcagatgttttaagtgcaattaacactgaaagagaccgctaattgtcctttcagttgaaatctaatttatacaatcattctatacttaaaggttaaatacatcttaattaattttttcttaaagtcaatgtaagtcactttgttttgtttttttttaatctacgccatatgcctcatgaaaccagctgttctagaatcagtcctgagaatatggcttaattccatggaaacataactcctatcttgggacctgacataatatctatctatcctggggaactggtaatatgagacttataggttacagcagaaatgctacatgttgacaaaagccttaatcgttccactgggagaactaattgataattgtgttaagattgaagattaaccctgtgttaatctcacttgag

SEQ ID NO: 1307 - DNA, 2830 bp, Homo sapiens
ctcccctggccaggagcaggggattagtctgccccgcgaccggccccagccacgacgcggacatcgccccctctgtctgggccgctgtcactcacgcgccaaagggccacggagaaagaaggggcgggccggggcgggccgggcgagcggaggcggggacttgcgccgtcctgaggctgcctcctagggtccggccggcgctggagctgcggatttagattgtcactgccacctcggtcggtgcttacttcgctgccagctggtcgtcgccatgaacccggacctgcgcagggagcgggattccgccagcttcaacccggagctgcttacacacatcctggacggcagccccgagaaaacccggcgccgccgagagatcgagaacatgatcctgaacgacccagacttccagcatgaggacttgaacttcctcactcgcagccagcgttatgaggtggctgtcaggaaaagtgccatcatggtgaagaagatgagggagtttggcatcgctgaccctgatgaaattatgtggtttaaaaaactacatttggtcaattttgtggaacctgtgrgcctcaattactccatgtttattcctaccttgctgaatcagggcaccactgctcagaaagagaaatggctgctttcatccaaaggactccagataattggcacctacgcccagacggaaatgggccacggaactcaccttcgaggcttggaaaccacagccacgtatgaccctgaaacccaggagttcattctcaacagtcctactgtgacctccattaaatggtggcctggtgggcttggaaagacttcaaatcatgcaatagttcttgcccagctcatcactaaggggaaatgctatggattacatgcctttatcgtacctattcgtgaaatcgggacccataagcctttgccaggaattaccgttggtgacatcggccccaaatttggttatgatgagatagacaatggctacctcaaaatggacaaccatcgtattcccagagaaaacatgctgatgaagtatgcccaggtgaagcctgatggcacatacgtgaaaccgctgagtaacaagctgacttacgggaccatggtgtttgtcaggtccttccttgtgggagaagctgctcgggctctgtctaaggcgtgcaccattgccatccgatacagcgctgtgaggcaccagtctgaaatsaagccaggtgaaccagaaccacagattttggattttcaaacccagcagtataaactctttccactcctggccactgcctatgccttccagtttgtgggcgcatacatgaaggagacctatcaccggattaacgaaggcattggtcaaggggacctgagtgaactgcctgagcttcatgccctcaccgctggactgaaggctttcacctcctggactgcaaacactggcattgaagcatgtcggatggcttgtggtgggcatggctattctcattgcagtggtcttccaaatatttatgtcaatttcaccccaagctgtacctttgagggagaaaacactgtcatgatgctccagacggctaggttcctgatgaaaagttatgatcaggtgcactcaggaaagttggtgtgtggcatggtgtcctatttgaacgacctgcccagtcagcgcatccagccacagcaggtagcagtctggccaaccatggtggatatcaacagccccgaaagcctaaccgaagcatataaactccgtgcagccagattagtagaaattgctgcaaaaaaccttcaaaaagaagtgattcacagaaaaagcaaggaggtagcttggaacctaacttctgttgaccttgttcgagcaagtgaggcacattgccactatgtggtagttaagctcttttcagaaaaactcctcaaaattcaagataaagccattcaagctgtcttaaggagtttatgtctgctgtattctctgtatggaatcagtcagaacgcgggggatttccttcaggggagcatcatgacagagcctcagattacacaagtaaaccagygtgtaaaggagttactcactctgattcgctcagatgctrttgctttggttgatgcatttgattttcaggatgtgacacttggctctgtgcttggccgctatgatgggaatgtgtatgaaaacttgtttgagtgggctaagaactccccactgaacaaagcagaggtccacgaatcttacaagcacctgaagtcactgcagtccaagctctgaagtgtcacaaggacaagtttaatctgcttcagaaagcgcctgtgtgcaactcaaattttgtggaatctttttcgaattcaaatagctatagagcaaatgataaattgacccctttttataaatggagggaaaaaatgaacagatttcagagattaaatgaaaaaaagcagatgttttaagtgcaattaacactgaaagagaccgctaattgtcctttcagttgaaatctaatttatacaatcattctatacttaaaggttaaatacatcttaattaattttttcttaaagtcaatgtaagtcactttgttttgtttttttttaatctacgccatatgcctcatgaaaccagctgttctagaatcagtcctgagaatatggcttaattccatggaaacataactcctatcttgggacctgacataatatctatctatcctggggaactggtaatatgagacttataggttacagcagaaatgctacatgttgacaaaagccttaatcgttccactgggagaactaattgataattgtgttaagattgaagattaaccctgtgttaatctcacttgag

SEQ ID NO: 1308 - DNA, 3406 bp, Homo sapiens
ctcccctggccaggagcaggggattagtctgccccgcgaccggccccagccacgacgcggacatcgccccctctgtctgggccgctgtcactcacgcgccaaagggccacggagaaagaaggggcgggccggggcgggccgggcgagcggaggcggggacttgcgccgtcctgaggctgcctcctagggtccggccggcgctggagctgcggatttagattgtcactgccacctcggtcggtgcttacttcgctgccagctggtcgtcgccatgaacccggacctgcgcagggagcgggattccgccagcttcaacccggagctgcttacacacatcctggacggcagccccgagaaaacccggcgccgccgagagatcgagaacatgatcctgaacgacccagacttccagcatgaggacttgaacttcctcactcgcagccagcgttatgaggtggctgtcaggaaaagtgccatcatggtgaagaagatgagggagtttggcatcgctgaccctgatgaaattatgtggtttaaaaattttgtgcaccgagggcggcctgagcctctggatcttcacttgggcatgttcctgcccaccttgcttcaccaggcaactgcggagcagcaggagcgcttcttcatgcccgcctggaacttggagatcattggcacttatgcccagacagagatgggtcatggaactcaccttcgaggcttggaaaccacagccacgtatgaccctgaaacccaggagttcattctcaacagtcctactgtgacctccattaaatggtggcctggtgggcttggaaagacttcaaatcatgcaatagttcttgcccagctcatcactaaggggaaatgctatggattacatgcctttatcgtacctattcgtgaaatcgggacccataagcctttgccaggaattaccgttggtgacatcggccccaaatttggttatgatgagatagacaatggctacctcaaaatggacaaccatcgtattcccagagaaaacatgctgatgaagtatgcccaggtgaagcctgatggcacatacgtgaaaccgctgagtaacaagctgacttacgggaccatggtgtttgtcaggtccttccttgtgggagaagctgctcgggctctgtctaaggcgtgcaccattgccatccgatacagcgctgtgaggcaccagtctgaaatsaagccaggtgaaccagaaccacagattttggattttcaaacccagcagtataaactctttccactcctggccactgcctatgccttccagtttgtgggcgcatacatgaaggagacctatcaccggattaacgaaggcattggtcaaggggacctgagtgaactgcctgagcttcatgccctcaccgctggactgaaggctttcacctcctggactgcaaacactggcattgaagcatgtcggatggcttgtggtgggcatggctattctcattgcagtggtcttccaaatatttatgtcaatttcaccccaagctgtacctttgagggagaaaacactgtcatgatgctccagacggctaggttcctgatgaaaagttatgatcaggtgcactcaggaaagttggtgtgtggcatggtgtcctatttgaacgacctgcccagtcagcgcatccagccacagcaggtagcagtctggccaaccatggtggatatcaacagccccgaaagcctaaccgaagcatataaactccgtgcagccagattagtagaaattgctgcaaaaaaccttcaaaaagaagtgattcacagaaaaagcaaggaggtagcttggaacctaacttctgttgaccttgttcgagcaagtgaggcacattgccactatgtggtagttaagctcttttcagaaaaactcctcaaaattcaagataaagccattcaagctgtcttaaggagtttatgtctgctgtattctctgtatggaatcagtcagaacgcgggggatttccttcaggggagcatcatgacagagcctcagattacacaagtaaaccagygtgtaaaggagttactcactctgattcgctcagatgctrttgctttggttgatgcatttgattttcaggatgtgacacttggctctgtgcttggccgctatgatgggaatgtgtatgaaaacttgtttgagtgggctaagaactccccactgaacaaagcagaggtccacgaatcttacaagcacctgaagtcactgcagtccaagctctgaagtgtcacaaggacaagtttaatctgcttcagaaagcgcctgtgtgcaactcaaattttgtggaatctttttcgaattcaaatagctatagagcaaatgataaattgacccctttttataaatggagggaaaaaatgaacagatttcagagattaaatgaaaaaaagcagatgttttaagtgcaattaacactgaaagagacctgttaaaccattcagaaaaagcttaagaaatgcgatatgacttccttttgtaatgctgctgatcccagtagactatgacttttgataattagcagaatttaactactgagtagttgattattttcacattttaattgctaatcactggctatataagtgtttttaagcaaaggtatttttgaagtggtgtagaacccttccaagctttcctgctcagtgttctaccagacttaccctggggcctggcttaaaagcaggattgaagaaaagggactgggggaaggaaacttattggaaaacttgatgcgaatgagtttctgcttggcacagtctctgcctgcttgctctcctttgctgatggattgcatttatcaaactattcatgctagcatttttccaacgagggaacttattccgcacgggcctactgtaggaccattgtctcgtgtarttaggaattttccatttgaaggatygctaaattgtcacagtagtaggaagtatagggaaacctctcagctgtggcactgttgtagctttggagtgcagagtgtaactctgggacaatcagatttcacatattctgtcatcttggcataagccattaaaagcttggagattactgtatttggcattaaaaaaaaatgtcacttaggtcagcactcccagaygtagcacagaaaaaccctttgacacaaaccatgtgttctgatttttggttcagaaaatattgaaactgtgagttgttttttttttaacaactgggaaaaaacaaaaacaaaaaactatagttagaaaaatggaagttccataggttctatttcttactctatgtatggctttgttttcagtctatttctaggagctttctctgaatcgctaattgtcctttcagttgaaatctaatttatacaatcattctatacttaaaggttaaatacatcttaat

SEQ ID NO: 1309 - DNA, 1233 bp, Homo sapiens
atgcggaccccaccggcgatcgaggccacccctaagggcaccctgcagccggcaggcggcagactccgcttcctcagtggctgtgtgcccatcttgcatcaggtggccgggcacaggtatgggaaggacaaaatgggtatactgcaacatccagatggcacagttttgaaacagttacaaccacctccaaggggcccaagagagctggaattctataatatggtttatgctgctgactgtaccgatggtgttcttctagagctacgacaatatttgccaaaatattatggcatctggccacctcccgctgccccaaacgatttatacctaaaactggaaaatgtgacccataaatttaataagccctgtataatggatcattatgctgccctgggccgcgacagcgtgggcgccgcctcrgtcaacctggarccctcggatgtgccgcaggacgtgtacagcrgcgtggccgcgcaggtggaggtgttccgtaggcaggacgcccagcggggcatgcgggtggcacaggtgctggaagscttcatcacccgcaaggtggtgaagcagacggtgatgaccgtggtgtacggggtcacccgctacggtgggcgcctgcagattgagaagcgcctccgggagctgaacgactttccccaggagttcgtgtgggaggcctcccactacctcktacgccaggtcttcaggagtctacaggagatgttctcggggacccgggccatccagcactggctgaycgagagcgcccacctcgtctcccacacgggctctgtggtggagtgggtcacccccctgggcgtccccatcatccagccgtatcgcctggagtccaaggtcaagcaatcaggaggtggaattcagagcatcacttacacccacaacagagacatcagccggaagcccaacacacctaagcagaagaacggcttccggcccaacttcatccactcgctggactcctcacacatgatgctcaccaccctgcactgctacaggaagggcctgaccttcgtctctgtgcacgactgttaccggacccatgcagctgatgtctccatcatgaaccaggacctgtccaggttcctggtcaggcggttctgctctgagccccagaagatcttggaggccagccagatgaaggagacactgcaggtggtgcccaagccaggggccttcgacctggagctggtgaagcgttccacctacttcttcagc

SEQ ID NO: 1310 - DNA, 1770 bp, Homo sapiens
caggaagcgcagcaactcgtgtctgagcgcccggcggaaaaccgaagttggaagtgtctcttagcagcgcgcggagaagaacggggagccagcatcatggcagaacaggatgtggaaaacgatcttttggattacgatgaagaggaagagccccaggctcctcaagagagcacaccagctccccctaagaaagacatcaagggatcctacgtttccatccacagctctggcttccgggactttctgctgaagccggagctcctgcgggccatcgtggactgtggctttgagcatccttctgaggtccagcatgagtgcattccccaggccatcctgggcatggacgtcctgtgccaggccaagtccgggatgggcaagacagcggtcttcgtgctggccaccctacagcagattgagcctgtcaacggacaggtgacggtcctggtcatgtgccacacgagggagctggccttccagatcagcaaggaatatgagcgcttttccaagtacatgcccagcrtcaaggtgtctgtgttcttcggtggtctctccatcaagaaggatgaagaagtgttgaagaagaactgtccccatgtcgtggtggggaccccgggccgcatcctggcgctcgtgcggaataggagcttcagcctaaagaatgtgaagcactttgtkctggacgagtgtgacaagatgctggagcagctggacatgcggcgggatgtgcaggagatcttccgcctgacaccacacgagaagcagtgcatgatgttcagcgccaccctgagcaaggacatccggcctgtgtgcaggaagttcatgcaggatgtgagtagggcgagagtggcagctttggccttccccaggggcctggagcctggggccccaggacacccrcacggcccacatggcacggaggatgctgggatgctgggagccggcggagcctcctttcctcccctcggtcttgtcaaactgggagtcaagcttggtccacacctgagtcgggccagagcttacatccagyttttgagcgatgtttactgaggtctggtgcagcaggtcctctgggaagtgtcgcacaaaggagtcgcccactggaaggttctgggcaggcgagatgcccagaggtgatccctgcccgcccctcccacctcccttcccacacagcccatggaggtgtttgtggacgacgagaccaagctcacgctgcacggcctgcagcagtactacgtcaaactcaaagacagtgagaagaaccgcaagctctttgatctcttggatgtgctggacagaacttcccggccatcgccatccaccggggcatggcccaggaggagcgcctgtcacgctatcagcagttcaaggatttccagcggcggatcctggtggccaccaatctgtttggccggggratggacatcgagcgagtcaacatcgtctttaactacgacatgcctgaggactcggacacctacctgcaccgggtggcccgggcgggtcgctttggcaccaaaggcctagccatcacttttgtgtctgacgagaatgatgccaaaatcctcaatgacgtccaggaccggtttgaagttaatgtggcagaacttccagaggaaatcgacatctccacatacatcgagcagagccggtaaccaccacrtgccagagccgcccacccggagccgcccgcatgcagcttcacctcccctttccaggcgccactgttgagaagctagagattgtatgagaataaacttgttattatggaag

SEQ ID NO: 1311 - DNA, 1498 bp, Homo sapiens
caggaagcgcagcaactcgtgtctgagcgcccggcggaaaaccgaagttggaagtgtctcttagcagcgcgcggagaagaacggggagccagcatcatggcagaacaggatgtggaaaacgatcttttggattacgatgaagaggaagagccccaggctcctcaagagagcacaccagctccccctaagaaagacatcaagggatcctacgtttccatccacagctctggcttccgggactttctgctgaagccggagctcctgcgggccatcgtggactgtggctttgagcatccttctgaggtccagcatgagtgcattccccaggccatcctgggcatggacgtcctgtgccaggccaagtccgggatgggcaagacagcggtcttcgtgctggccaccctacagcagattgagcctgtcaacggacaggtgacggtcctggtcatgtgccacacgagggagctggccttccagatcagcaaggaatatgagcgcttttccaagtacatgcccagcrtcaaggtgtctgtgttcttcggtggtctctccatcaagaaggatgaagaagtgttgaagaagaactgtccccatgtcgtggtggggaccccgggccgcatcctggcgctcgtgcggaataggagcttcagcctaaagaatgtgaagcactttgtkctggacgagtgtgacaagatgctggagcagctggacatgcggcgggatgtgcaggagatcttccgcctgacaccacacgagaagcagtgcatgatgttcagcgccaccctgagcaaggacatccggcctgtgtgcaggaagttcatgcaggatcccatggaggtgtttgtggacgacgagaccaagctcacgctgcacggcctgcagcagtactacgtcaaactcaaagacagtgagaagaaccgcaagctctttgatctcttggatgtgctggagtttaaccaggtgataatcttcgtcaagtcagtgcagcgctgcatggccctggcccagctcctcgtggagcagaacttcccggccatcgccatccaccggggcatggcccaggaggagcgcctgtcacgctatcagcagttcaaggatttccagcggcggatcctggtggccaccaatctgtttggccggggratggacatcgagcgagtcaacatcgtctttaactacgacatgcctgaggactcggacacctacctgcaccgggtggcccgggcgggtcgctttggcaccaaaggcctagccatcacttttgtgtctgacgagaatgatgccaaaatcctcaatgacgtccaggaccggtttgaagttaatgtggcagaacttccagaggaaatcgacatctccacatacatcgagcagagccggtaaccaccacrtgccagagccgcccacccggagccgcccgcatgcagcttcacctcccctttccaggcgccactgttgagaagctagagattgtatgagaataaacttgttattatggaag

SEQ ID NO: 1312 - DNA, 3345 bp, Homo sapiens
caggaagcgcagcaactcgtgtctgagcgcccggcggaaaaccgaagttggaagtgtctcttagcagcgcgcggagaagaacggggagccagcatcatggcagaacaggatgtggaaaacgatcttttggattacgatgaagaggaagagccccaggctcctcaagagagcacaccagctccccctaagaaagacatcaagggatcctacgtttccatccacagctctggcttccgggactttctgctgaagccggagctcctgcgggccatcgtggactgtggctttgagcatccttctgagggtacgccttctgggtgttatcctcttgcccaggtcctcaccaagacaagaccagccctgcccgcccagagcggtgccgcctccagtttgccgtgggtgagggaggggcccgtctgtcccgcggatcagttgtgcccagcggggcctgtggctgccctcggcagtggggcgttctgctttgaccaggcggataccccagccctgcaggtgtctgtggccttgtccggactcggcctcttctgattgccctcactgtgggcccccggtcaactggtgaggatcctgcacgggggtgcatccaggttctcgtccctcacgctctgcttctcctgcagtccagcatgagtgcattccccaggccatcctgggcatggacgtcctgtgccaggccaagtccgggatgggcaagacagcggtcttcgtgctggccaccctacagcagattgagcctgtcaacggacaggtgacggtcctggtcatgtgccacacgagggagctggccttccagatcagcaaggaatatgagcgcttttccaagtacatgcccagcrtcaaggtgagtccctcgggccagactggaccaggcgccacttggtttctgcagctttgttagcctcggctctggcccagccagcatttaccaagcttggcaggggcagctgcctttgaggtttgcggtggtttttgctccttaaaagcctgatgaattatgcatggctcccaggggcctgcgcaggtcccagcctggggctgcctttgagtggagccccgggaggctctcaggcctgccttggtcccctgaggcctcctgttcgcaggtgctgggccgtgcaggttggggccttgggccgtgtatcagcatggagcggtttcctcctcatccccataggtgtctgtgttcttcggtggtctctccatcaagaaggatgaagaagtgttgaagaagaactgtccccatgtcgtggtggggaccccgggccgcatcctggcgctcgtgcggaataggagcttcagcctaaagaatgtgaagcactttgtkctggacgagtgtgacaagatgctggagcagctgggtgagtcctctgcccttgcagccccagctgagagtcagtgactaggcgggccccatagcaggcggaaggctcttgagtgggtyacatgggcggccggcaggcggggctcctgtggtgatcttggggaaagctctgctgctggcagagggatgtgctgtttctgagcccgagccgaatgggaccacggggcccaagcaagcccccgtccctcctggacgtaaaggcatgcacacatacctctgggagtatgaggcttctgccacctgttgggttggttccaggccccgcctgccctcagtgagccccgacagggccggtgggagatgggcttgtgtcctgggaggcagctgcagctctcaccccagcggctgtctctgcctcaggctcccctccctgaagcgtggctcgaggcgcacgggcacggctgctccgcgccagcgtgtaagtggattgcagctcctcccgcgcctgcgctcgctggccaccccccagcccctcaggcaccaggactggccactcccgcggctcactctgccctcgtcacggtgccactggctccctggcacaggttgggaggggtctgggtctggtctggggtgggggtcctgcatggcagacgctcatgcccacccatgtcttgccctccccacctagacatgcggcgggatgtgcaggagatcttccgcctgacaccacacgagaagcagtgcatgatgttcagcgccaccctgagcaaggacatccggcctgtgtgcaggaagttcatgcaggatgtgagtagggcgagagtggcagctttggccttccccaggggcctggagcctggggccccaggacacccrcacggcccacatggcacggaggatgctgggatgctgggagccggcggagcctcctttcctcccctcggtcttgtcaaactgggagtcaagcttggtccacacctgagtcgggccagagcttacatccagyttttgagcgatgtttactgaggtctggtgcagcaggtcctctgggaagtgtcgcacaaaggagtcgcccactggaaggttctgggcaggcgagatgcccagaggtgatccctgcccgcccctcccacctcccttcccacacagcccatggaggtgtttgtggacgacgagaccaagctcacgctgcacggcctgcagcagtactacgtcaaactcaaagacagtgagaagaaccgcaagctctttgatctcttggatgtgctggagtttaaccaggtgatacttccatcagcctgtcctggggctcaggaccttcgggaggtcactgggccacagggactgtgtggccctgactgccactccttccctcaggtgataatcttcgtcaagtcagtgcagcgctgcatggccctggcccagctcctcgtggagcagaacttcccggccatcgccatccaccggggcatggcccaggaggagcggtgagtgcragccrcccgccaaggctgcagggagcaccaccaggagcccagtgtctgacggcctccacttgtttctcctgcaccccagcctgtcacgctatcagcagttcaaggatttccagcggcggatcctggtggccaccaatctgtttggccggggratggacatcgagcgagtcaacatcgtctttaactacgacatgcctgaggactcggacacctacctgcaccgggtggcccgggcgggtcgctttggcaccaaaggcctagccatcacttttgtgtctgacgagaatgatgccaaaatcctcaatgacgtccaggaccggtttgaagttaatgtggcagaacttccagaggaaatcgacatctccacatacatcgagcagagccggtaaccaccacrtgccagagccgcccacccggagccgcccgcatgcagcttcacctcccctttccaggcgccactgttgagaagctagagattgtatgagaataaacttgttattatggaag

SEQ ID NO: 1313 - DNA, 1128 bp, Homo sapiens
ttcctctctccaacgaagtcttatattttaccattctgcgtgtattagaaagctaaatttaaacagcaacaataagaaatcttccccagtggatccctcgagcctttcgggaaaatgcaggtttctggctgacaggaagaagaaacagcatccaatcggcacttgtgtctcaatgaccaatcaaatttcgccttacattgcatcgctgggataaacggagctggacgactcagtctcttggtctgtggctgctgcggttacctggatgggcgagcacctctgaggctggctttgttacctgggcaataagggactagcagttcagccgttttctatgcctgctggatttgtttgtatttgttcccagccactgctcatgtaatgtactcccttaaccaggaaattaaagcattctcccggaataatctcaggaagcaatgcaccagggtgacaacgctaactggaaagaaaattatagaaacatggaaagatgccagaattcatgttgtggaagaagtagagccgagcagtgggggtggttgtggttatgtgcaggaccttagctcggacctgcaagttggcgttattaagccatggttgctcctagggtcacaagatgctgctcatgatttggatacactgaaaaagaataaggatggagtggttcttgttcattgtaatgcaggcgtttccagggctgctgcaattgtaataggtttcctgatgaattctgaacaaacctcatttaccagtgctttttctttggtgaaaaatgcaagaccttccatatgtccaaattctggcttcatggagcagcttcgtacatatcaagagggcaaagaaagcaataagtgtgacagaatacaggagaacagttcatgagttgcattgtagcagacaatggacaactgtagtttctgaattgacttctatagccatcttttcccttttttggagagtagactagcaaaaytcccttttttctcttgccttttttatgcataaatggaggtcaatytgattgtcctgacctactgtataagtaaatttcaaatgtcattactttctctttgttattataatgtgtgattaaatgcttttttaaattgctaagggaaaataacaaag

SEQ ID NO: 1314 - DNA, 1281 bp, Homo sapiens
ttcctctctccaacgaagtcttatattttaccattctgcgtgtattagaaagctaaatttaaacagcaacaataagaaatcttccccagtggatccctcgagcctttcgggaaaatgcaggtttctggctgacaggaagaagaaacagcatccaatcggcacttgtgtctcaatgaccaatcaaatttcgccttacattgcatcgctgggataaacggagctggacgactcagtctcttggtctgtggctgctgcggttacctggatgggcgagcacctctgaggctggctttgttacctgggcaataagggactagcagttcagccgttttctatgcctgctggatttgtttgtatttgttcccagccactgctcatgtaatgtactcccttaaccaggaaattaaagcattctcccggaataatctcaggaagcaatgcaccagggtgacaacgctaactggaaagaaaattatagaaacatggaaagatgccagaattcatgttgtggaagaagtagagccgagcagtgggggtggttgtggttatgtgcaggaccttagctcggacctgcaagttggcgttattaagccatggttgctcctagggtcacaagatgctgctcatgatttggatacactgaaaaagaataaggtgactcatattcttaatgttgcatatggagttgaaaatgctttcctcagtgactttacatataagagcatttctatattggatctgcctgaaaccaacatcctgtcttattttccagaatgttttgaatttattgaagaagcaaaaagaaaagatggagtggttcttgttcattgtaatgcaggcgtttccagggctgctgcaattgtaataggtttcctgatgaattctgaacaaacctcatttaccagtgctttttctttggtgaaaaatgcaagaccttccatatgtccaaattctggcttcatggagcagcttcgtacatatcaagagggcaaagaaagcaataagtgtgacagaatacaggagaacagttcatgagttgcattgtagcagacaatggacaactgtagtttctgaattgacttctatagccatcttttcccttttttggagagtagactagcaaaaytcccttttttctcttgccttttttatgcataaatggaggtcaatytgattgtcctgacctactgtataagtaaatttcaaatgtcattactttctctttgttattataatgtgtgattaaatgcttttttaaattgctaagggaaaataacaaag

SEQ ID NO: 1315 - DNA, 1444 bp, Homo sapiens
gagccgagttattatctgcctctccgataggatgcctctttgtcttcacytgccattcccgctgtttcgtgaagaatcctctgtaaagggaaatttgttcaggcgactgctgtggccaccctctgcctcctccggcctctgcccctgggaggtccccgggggcctgggagtgtcattggcgtatgaccgcaacccttgccgctgccgctgacatcgctaccatggtctccggcagcagcggcctcgccgccgcccgtctcctgtcgcgcagcttcctcctgccgcagaatggaattcggcattgttcctacacagcttctcggcaacatctctatgttgataaaaatacaaagattatttgccagggtttcactggcaaacagggcacctttcacagccagcaggcattggaatatggcaccaaactcgttggaggaaccactccagggaaaggaggccagacacatctgggyttacctgtctttaatactgtgaaggaggccaaagaacagacaggagcaacggcttctgtcatttatgttcctccgccttttgctgctgctgccattaatgaagctattgaggcagaaattcccttggttgtgtgtatcactgaaggaattccccagcaggacatggtacgagtcaagcacaaactgctgcgccaggaaaagacaaggctaattgggcccaactgccctggagtcatcaatcctggagaatgtaaaattggcatcatgcctggccatattcacaaaaaaggaaggattggcattgtgtccagatctggcaccctgacttatgaagcagttcaccaaacarcgcaagttggattggggcagtctttgtgcgttggcattggaggtgatccttttaatggaacagattttattgactgcctcgaaatctttttgaacgattctgccacagaaggcatcatattgattggtgaaattggtggtaatgcagaagagaatgctgcagaatttttgaagcaacataattcaggtccaaattccaagcctgtagtgtccttcattgctggtttaactgctcctcctgggagaagaatgggtcatgccggggcaattattgctggaggaaaaggtggagctaaagagaagatctctgcccttcagagtgcaggagttgtggtcagtatgtctcctgcacagctgggaaccacgatctacaaggaatttgaaaagaggaagatgctatgaaagaaaaaaaaaattcctaaaactgtggaatggatcacgtagacatgtaacccagcagcagtttgcttctgttgtccactgattaatcagcctatgtgcctgacactggtcttgcagtacaactggaagccaaaacaaggtggaagatgtcctgaattaagaygttttcaccacattgtattacagagacagccaataaatctactatttgatttcaatat

SEQ ID NO: 1316 - DNA, 2492 bp, Homo sapiens
catactccatacctgggatttcygcctcgccgctctccgactgcttccagacatgcwggggccctgggtgctgctyctgctgggcctgaggctacagctctccctgggcatcatcccagttgaggaggagaacccggacttctggaaccgccaggcagccgaggccctgggtgccgccaagaagctgcagcctgcacagacagcygccaagaacctcatcatcttcctggggatgggggtgtctacggtgacagctgccaggatcctaaaagggcagaagaaggacaaactggggcctgagaccttcctggccatggaccgcttcccgtacgtggctctgtccaagacatacagtgtagacaagcatgtgccagacagtggagccacagccacggcctacctgtgcggggtcaagggcaacttccagaccattggcttgagtgcagccgcccgctttaaccagtgcaacacgacacgcggcaacgaggtcatctccgtgatgaatcgggccaagmaagcaggaaagtcagtgggagtggtaaccaccacacgggtgcagcatgcctcgccagccggcgcctacgcccacacggtgaaccgcaactggtactcggatgccgacgtgcctgcctcggcccgccaggaggggtgccaggacatcgcyacgcagctcatctccaacatggacattgatgtgatcctaggtggaggccgaaagtacatgtttcccatggggaccccagaccctgagtacccagatgactacagccaaggtgggaccaggctggacgggaagaatctggtgcaggaatggctggcgaagcaccagggtgcccggtacgtgtggaaccgcactgagctcctgcaggcttccctggacccgtctgtgacccatctcatgggtctctttgagcctggagacatgaaatacgagatccaccgagactccacactggacccctccctgatggagatgacagaggctgccctgcgcctgctgagcaggaacccccgcggcttcttcctcttcgtggagggtggtcgcatcgaccatggtcatcatgaaagcagggcttaccgggcactgactgagacgatcatgttcgacgacgccattgagagggcgggccagctcaccagcgaggaggacacgctgagcctcgtcactgccgaccactcccacgtcttctccttcggaggctaccccctgcgagggagctccatcttcgggctggcccctggcaaggcccgggacaggaaggcctacacggtcctcctatacggaaacggtccaggctatgtgctcaaggacggcgcccggccggatgttacsgagagcgagagcgggagccccgagtatcggcagcagtcagcagtgcccctggacggagagacccacgcaggcgaggacgtggcggtgttcgcgcgcggcccgcaggcgcacctggttcacggcgtgcaggagcagaccttcatagcgcacgtcatggccttcgccgcctgcctggagccctacaccgcctgcgacctggcgcccmscgccggcaccaccgacgccgcgcacccggggcsgtccgtggtccccgcgttgcttcctctgctggcmgggaccytgctgctgctggrgacggccactgctccctgagtgtcccgtccctggggctcctgcttccccatcccggagttcycctgctccccrcctccwgtcgtcctgccggacctccacctsgagctgtcayccccggagtcgccayacagasgtcctgccatggaaccttcccctcccggtgcaccctggggaccgagcccttgacaccacgccctttgctttatcttgctcttgaaattttggccccaactccagggactggggatttgtgcctggcagctgcctgcatttcaggaaaagaggaggctcagaccatccagcccccgcccatatsctgaggtggatcaggcaggctctctccccggggacatgaggcacccatacctaggaccccctgcgccttttttagcttcagtcatggcagcacctgagggacacaaggacttgggtgcatcaggacgccttggagaagcgtggcttcctgccaccctgcaacccaccctcccagccaaggaggctgctgtggtggggatccccaggggggctttgacacagtcctctgctgtccctccactgggctaattctacacccctgtgcccctcctaggggcccatgagtcagagaggcttgccccaagtcacagccactcagatgttcgacgccccctaaggtccattccagcacccacctgagttccgaggagcacctgggaagctctgggtgcaggatagcagtccagagtccatggccccgcctaggccatctgggtgctgggcatggatttctcagcaaggaagactcattaccttccctccctgggcctccattcttctgggaaacacaaagcaataataaaaggaagtgttagacaatgtaatgcca

SEQ ID NO: 1317 - DNA, 2498 bp, Homo sapiens
catactccatacctgggatttcygcctcgccgctctccgactgcttccagacatgcwggggccctgggtgctgctyctgctgggcctgaggctacagctctccctgggcatcatcccagttgaggaggagaacccggacttctggaaccgccaggcagccgaggccctgggtgccgccaagaagctgcagcctgcacagacagcygccaagaacctcatcatcttcctgggtgacgggatgggggtgtctacggtgacagctgccaggatcctaaaagggcagaagaaggacaaactggggcctgagaccttcctggccatggaccgcttcccgtacgtggctctgtccaagacatacagtgtagacaagcatgtgccagacagtggagccacagccacggcctacctgtgcggggtcaagggcaacttccagaccattggcttgagtgcagccgcccgctttaaccagtgcaacacgacacgcggcaacgaggtcatctccgtgatgaatcgggccaagmaagcaggaaagtcagtgggagtggtaaccaccacacgggtgcagcatgcctcgccagccggcgcctacgcccacacggtgaaccgcaactggtactcggatgccgacgtgcctgcctcggcccgccaggaggggtgccaggacatcgcyacgcagctcatctccaacatggacattgatgtgatcctaggtggaggccgaaagtacatgtttcccatggggaccccagaccctgagtacccagatgactacagccaaggtgggaccaggctggacgggaagaatctggtgcaggaatggctggcgaagcaccagggtgcccggtacgtgtggaaccgcactgagctcctgcaggcttccctggacccgtctgtgacccatctcatgggtctctttgagcctggagacatgaaatacgagatccaccgagactccacactggacccctccctgatggagatgacagaggctgccctgcgcctgctgagcaggaacccccgcggcttcttcctcttcgtggagggtggtcgcatcgaccatggtcatcatgaaagcagggcttaccgggcactgactgagacgatcatgttcgacgacgccattgagagggcgggccagctcaccagcgaggaggacacgctgagcctcgtcactgccgaccactcccacgtcttctccttcggaggctaccccctgcgagggagctccatcttcgggctggcccctggcaaggcccgggacaggaaggcctacacggtcctcctatacggaaacggtccaggctatgtgctcaaggacggcgcccggccggatgttacsgagagcgagagcgggagccccgagtatcggcagcagtcagcagtgcccctggacggagagacccacgcaggcgaggacgtggcggtgttcgcgcgcggcccgcaggcgcacctggttcacggcgtgcaggagcagaccttcatagcgcacgtcatggccttcgccgcctgcctggagccctacaccgcctgcgacctggcgcccmscgccggcaccaccgacgccgcgcacccggggcsgtccgtggtccccgcgttgcttcctctgctggcmgggaccytgctgctgctggrgacggccactgctccctgagtgtcccgtccctggggctcctgcttccccatcccggagttcycctgctccccrcctccwgtcgtcctgccggacctccacctsgagctgtcayccccggagtcgccayacagasgtcctgccatggaaccttcccctcccggtgcaccctggggaccgagcccttgacaccacgccctttgctttatcttgctcttgaaattttggccccaactccagggactggggatttgtgcctggcagctgcctgcatttcaggaaaagaggaggctcagaccatccagcccccgcccatatsctgaggtggatcaggcaggctctctccccggggacatgaggcacccatacctaggaccccctgcgccttttttagcttcagtcatggcagcacctgagggacacaaggacttgggtgcatcaggacgccttggagaagcgtggcttcctgccaccctgcaacccaccctcccagccaaggaggctgctgtggtggggatccccaggggggctttgacacagtcctctgctgtccctccactgggctaattctacacccctgtgcccctcctaggggcccatgagtcagagaggcttgccccaagtcacagccactcagatgttcgacgccccctaaggtccattccagcacccacctgagttccgaggagcacctgggaagctctgggtgcaggatagcagtccagagtccatggccccgcctaggccatctgggtgctgggcatggatttctcagcaaggaagactcattaccttccctccctgggcctccattcttctgggaaacacaaagcaataataaaaggaagtgttagacaatgtaatgcca

SEQ ID NO: 1318 - DNA, 696 bp, Homo sapiens
catactccatacctgggatttcygcctcgccgctctccgactgcttccagacatgcwggggccctgggtgctgctyctgctgggcctgaggctacagctctccctgggcatcatcccagttgaggaggagaacccggacttctggaaccgccaggcagccgaggccctgggtgccgccaagaagctgcagcctgcacagacagcygccaagaacctcatcatcttcctgggtgacgggatgggggtgtctacggtgacagctgccaggatcctaaaagggcagaagaaggacaaactggggcctgagaccttcctggccatggaccgcttcccgtacgtggctctgtccaagacatacagtgtagacaagcatgtgccagacagtggagccacagccacggcctacctgtgcggggtcaagggcaacttccagaccattggcttgagtgcagccgcccgctttaaccagtgcaacacgacacgcggcaacgaggtcatctccgtgatgaatcgggccaagmaagcaggtgagctggggcccgctgtggggtcaggrccaggtgacagacctctatckcatatcctgacctctatcaccctcaggaaagtcagtgggagtggtaaccaccacacgggtgcagcatgcctcgccagccggcgcctacgcccacacggtgaaccgcaactggtactcgg

SEQ ID NO: 1319 - DNA, 4327 bp, Homo sapiens
gcggccgcgctcgtctcgccgggctgttcgcgggcaggccctgccctgaagggacgaatcggcttggagcgcgggaggtggagtcggccccggcggtcgctccctggacccaacccgaggctgacccaggcccctgcccatgcggggcgcccctggctcggaagagtcccccgggccgggagcagctccaggcagcggccccggaggaagaggaagaagggacagtgctcagcttgggggacccggaccctcgccgcggcatttggagccgggggcagtcccgaactctgtgcttggcaccgccgctccgagtagggcagcgcctgccgggacyctgacccggaccccctgcgcctcgtaggcggcggcgccgccgcgccaccctgttcttccgtgtctccctctgcctggcggcagtcacggccaagaacctacattaagaaacgcattcagatgcatcagccgtttgtaaagcacctgtcgtgagccagagagtattatgagggaggccgaggacttcatgctccggacagagaaacggcgctggrattagggattgccacttctgagaggatgctgggaatckssagggggagacggaaattcttggctgcctcgttgagtcttctctgcatcccagccatcacctggatttacctgttttctgggagcttcgaagatggaaagcccgtgtctctgtcaccgctggagtcccaggcacacagccccaggtacacggcctccagccagcgggagcgcgagagcctggaggtgcgcatgcgcgaggtggaggaggagaaccgcgccctccgcaggcagctcagcctggcccagggccgagccccatcccatcgccgaggcaaccactccaagacctactccatggaggagggcactggagacagcgagaaccttcgggctggcatcgtggcaggcaacagctccgagtgtgggcagcagccggtcgtggagaaatgcgagacggaaccctctgcacttccaccttattgctgactccattgcggagcagatcctggccacgctcttccagacctggatggtgcccgctgtgcgtgtggacttctacaatgcagacgagctcaagtctgaagtttcctggatccccaataaacattactctgggatttatggtctgatgaagcttgtcctgaccaagactcttcctgccaacctggagagagtcatcgtccttgacacggatatcacctttgccactgacattgcagagctgtgggctgtgttccacaagttcaaaggtcagcaagtcctgggcttggtggagaaccagagtgactggtaccttggaaacctgtggaaaaatcaccgcccatggccagcccttggaagaggctacaacacaggggtgatcctgttacttctggataagctgcggaagatgaaatgggagcagatgtggaggctgaccgcagagagggagctcatgggcatgctctctacatccttagctgaccaggatattttcaatgccgtcatcaaacaaaaccccttccttgtgtaccagctcccctgcttctggaatgtgcagctgtcagaccacacccgctccgagcagtgctacagagacgtgtctgatctaaaggtcattcactggaactcccccaagaagctccgggtgaagaacaagcatgtggagttttttcgcaacctctacctgaccttcctggagtatgacggcaatcttctgaggcgggaactgtttggctgccccagtgaggctgatgtcaacagtgaaaacctccagaagcagctgtctgagctggacgaggacgacctgtgctatgagttccggcgagagcgcttcactgtcyaccgcacccacctgtacttcctgcactacgagtatgagcctgcagcagacagcacggacgtcaccctggtcgctcagctgtccatggacaggctccagatgctggaggccatctgcaagcactgggaggggcccatcagcctggccctctacctgtcagacgccgaggcccagcagttcctccgctacgcacagggctctgaggtgcttatgagccgccacaacgtgggctaccacatcgtgtacaaggagggccagttctaccccgtgaacctgctgcgcaacgtggccatgaagcacatcagcactccctacatgttcctgtctgacattgacttcctgcccatgtatgggctctatgagtacctcaggaagtctgtcatccagctcgatcttgccaacaccaagaaagcaatgattgtccccgcgttcgagacactgcgctaccggctgtccttccccaagtcaaaagcggagttgctgtcaatgctggacatggggaccctcttcacattcaggtaccacgtctggacgaaaggccacgcacccacaaacttcgccaagtggcggaccgccaccacgccttaccgggttgagtgggaggccgattttgagccgtatgttgttgtgagacgtgactgcccggagtacgaccggaggtttgtaggctttggctggaacaaagtggctcatatcatggagctggatgtgcaggagtatgagttcattgtgctgcccaacgcctacatgatccacatgcctcatgcccccagcttcgacattaccaagttccgttccaacaagcaataccgcatctgtctcaaaaccctcaaggaagagtttcagcaggacatgtcccgccgctacggctttgctgccctgaaatatctcacagccgagaacaacagctagcaccaagaagcccaccactagggggagacatgctgtaggggaagtgccactcgctgtttggggcccggccttcaaattcaaaattgagccatgctttttcggtttgtttttatttatctctttggcccagccaagctgccctcactacagagaccttggacaaggatccagccagtccctctctgccccacaaccctgcattcccagaggttagctatgcagcccacctagatgagtctcttcaagaatgggaaatcaaggggtgacagggagtaaaagggttatcatcttactgcaaagccacaagatcagggcagggctttaggatgttctggatgctttttaataattatgcttcccatcataactggggagaaagggaagtcagggttctaggggttattcgtcccaggaaatagaagtgaaattgtctttattaagtgaaaactttcccctttgccctgcaatgtagctgggcattcaaacggagggcaaaccgatgatctaaaccaaccacttggaaaaacccaatggggacattgtaaccagagggtcctggaggtggggttgatgggtttccttatccccaaagtcactcctgttttgttttgtttttctttgggggttttgtttatttttggggctggcaatccaaaatagaaaatctgatcctttgaggctctaaaggaaaatcagctgcctctaccaaccaccctctatcagcagtggcccaggaaggaggtcaagcatcttcggccgatatttaaacatgggcagcttccttcaggatgatcaccgaggctcccgtgactttgaactccctactctccagaatccaggggctatagcgatggggactgcggaattacgagggctggctgttttacaccggtcacattttctattggcagtgactgattcatgggaaagggctttgaaggaactacttcagtgcacacacaaggtamgaacctctcaggcctttcgaagaactttcataattcatgaaagcccagttctgaagattcacgtatccatctggagacrtacaggaagaaagtgattgggttcctctggttcttgcctgcttcactgtggatgggaagaggtgacaacctcagtctccctttgggacctgtccaagggtaggcaaccaccttcaccttcacacagattgaggagacactggactttttacccattttctttaatcttcaatattaatattgtgtttacattgatgagaacaagagttaatgccctaccctctgctgggctgtttgtattgagttgcaatgtgaccagcgaaagctgcatttaataaatgaaagtacagactgtttcttccccattcccctcccactcttgcaggaagctactgagacacaccttgacatagagagctaaattgcagtggataaacagcaacttcacactttctgttcccccattctatttttctcatcatttgaactttagccttttttttccccttttgcctgaagttagatcccactctgtctctaactcaaaccatcttcaagttttccattccgcatctttctc

SEQ ID NO: 1320 - DNA, 4410 bp, Homo sapiens
gcggccgcgctcgtctcgccgggctgttcgcgggcaggccctgccctgaagggacgaatcggcttggagcgcgggaggtggagtcggccccggcggtcgctccctggacccaacccgaggctgacccaggcccctgcccatgcggggcgcccctggctcggaagagtcccccgggccgggagcagctccaggcagcggccccggaggaagaggaagaagggacagtgctcagcttgggggacccggaccctcgccgcggcatttggagccgggggcagtcccgaactctgtgcttggcaccgccgctccgagtagggcagcgcctgccgggacyctgacccggaccccctgcgcctcgtaggcggcggcgccgccgcgccaccctgttcttccgtgtctccctctgcctggcggcagtcacggccaagaacctacattaagaaacgcattcagatgcatcagccgtttgtaaagcacctgtcgtgagccagagagtattatgagggaggccgaggacttcatgctccggacagagaaacggcgctgggattagggattgccacttctgagaggatgctgggaatctgcagggggagacggaaattcttggctgcctcgttgagtcttctctgcatcccagccatcacctggatttacctgttttctgggagcttcgaagatggaaarcccgtgtctctgtcaccgctggagtcccaggcacacagccccaggtacrcsgcctccagccagcgggagcgcgagagcctggaggtksscatgcgcgaggtggaggaggagaaccgcgccctccgcaggcagctcagcctggcccagggccgagccccatcccatcgccgaggcaaccactccaagacctactccatggaggagggcactggagacagcgagaaccttcgggctggcatcgtggcaggcaacagctccgagtgtgggcagcagccggtcgtggagaaatgcgagacaatccacgttgctattgtctgcgcyggatacaatgccagccgggatgtcgtcaccctggtcaaatccgtcctgttccatagacggaaccctctgcacttccaccttattgctgactccattgcggagcagatcctggccacgctcttccagacctggatggtgccygctgtgcgtgtggacttctacaatgcagacgagctcaagtctgaagtttcctggatccccaataaacattactctgggatttatggtctgatgaagcttgtcctgaccaagactcttcctgccaacctggagagagtcatcgtccttgacacggatatcacctttgccactgacattgcagagctgtgggctgtgttccacaagttcaaaggtcagcaagtcctgggcttggtggagaaccagagtgactggtaccttggaaacctgtggaaaaatcaccgcccatggccagcccttggaagaggctacaacacaggggtgatcctgttacttctggataagctgcggaagatgaaatgggagcagatgtggaggctgaccgcagagagggagctcatgggcatgctctctacatccttagctgaccaggatattttcaatgccgtcatcaaacaaaaccccttccttgtgtaccagctcccctgcttctggaatgtgcagctgtcagaccacacccgctccgagcagtgctacagagacgtgtctgatctaaaggtcattcactggaactcccccaagaagctccgggtgaagaacaagcatgtggagttttttcgcaacctctacctgaccttcctggagtatgacggcaatcttctgaggcgggaactgtttggctgccccagtgaggctgatgtcaacagtgaaaacctccagaagcagctgtctgagctggacgaggacgacctgtgctatgagttccggcgagagcgcttcactgtccaccgcacccacctgtacttcctgcactacgagtatgagcctgcagcagacagcacggacgtcaccctggtcgctcagctgtccatggacaggctccagatgctggaggccatctgcaagcactgggaggggcccatcagcctggccctctacctgtcagacgccgaggcccagcagttcctccgctaygcacagggctctgaggtgcttatgagccgccacaacgtgggctaccacatygtgtacaaggagggccagttctaccccgtgaacctgctgcgcaacgtggccatgaagcacatcagcactccctacatgttcctgtctgacattgacttcctgcccatgtatgggctctatgagtacctcaggaagtctgtcatccagctcgatcttgccaacaccaagaaagcaatgattgtccccgcgttcgagacactgcgctaccggctgtccttccccaagtcraaagcggagttgctgtcaatgctggacatggggaccctcttcacattcaggtaccacgtctggacgaaaggccacgcacccacaaacttcgccaagtggcggaccgccaccacgccttaccgggttgagtgggaggccgattttgagccgtatgttgttgtgagacrtgactgcccggagtacgaccggaggtttgtaggctttggctggaacaaagtggctcatatcatggagctggatgtgcaggagtatgagttcattgtgctgcccaacgcctacatgatccacatgcctcatgcccccagcttcgacattaccaagttccgttccaacaagcaataccgcatctgtctcaaaaccctcaaggaagagtttcagcaggacatgtcccgccgctacggctttgctgccctgaaatatctcacagccgagaacaacagctagcaccaagaagcccaccactagggggagacatgctgtaggggaagtgccactcgctgtttggggcccggccttcaaattcaaaattgagccatgctttttcggtttgtttttatttatctctttggcccagccaagctgccctcactacagagaccttggacaaggatccagccagtccctctctgccccacaaccctgcattcccagaggttagctatgcagcccacctagatgagtctcttcaagaatgggaaatcaaggggtgacagggagtaaaagggttatcatcttactgcaaagccacaagatcagggcagggctttaggatgttctggatgctttttaataattatgcttcccatcataactggggagaaagggaagtcagggttctaggggttattcgtcccaggaaatagaagtgaaattgtctttattaagtgaaaactttcccctttgccctgcaatgtagctgggcattcaaacggagggcaaaccgatgatctaaaccaaccacttggaaaaacccaatggggacattgtaaccagagggtcctggaggtggggttgatgggtttccttatccccaaagtcactcctgttttgttttgtttttctttgggggttttgtttatttttggggctggcaatccaaaatagaaaatctgatcctttgaggctctaaaggaaaatcagctgcctctaccaaccaccctctatcagcagtggcccaggaaggaggtcaagcatcttcggccgatatttaaacatgggcagcttccttcaggatgatcaccgaggctcccgtgactttgaactccctactctccagaatccaggggctatagcgatggggactgcggaattacgagggctggctgttttacaccggtcacattttctattggcagtgactgattcatgggaaagggctttgaaggaactacttcagtgcacacacaaggtacgaacctctcaggcctttcgaagaactttcataattcatgaaagcccagttctgaagattcacgtatccatctggagacctacaggaagaaagtgattgggttcctctggttcttgcctgcttcactgtggatgggaagaggtgacaacctcagtctccctttgggacctgtccaagggtaggcaaccmccttcaccttcacacagattgaggagacactggactttttacccattttctttaatcttcaatattaatattgtgtttrcattgatgagaacaagagttaatgccctaccctctgctgggctgtttgtattgagttgcaatgtgaccagcgaaagctgcatttaataaatgaaagtacagactgtttcttccccattcccctcccactcttgcaggaagctactgagacacaccttgacatagagagctaaattgcagtggataaacagcaacttcacactttctgttcccccattctatttttctcatcatttgaactttagccttttttttccccttttgcctgaagttagatcccactctgtctctaactcaaaccatcttcaagttttccattccgcatctttctc

SEQ ID NO: 1321 - DNA, 2673 bp, Homo sapiens
ttggagtcagtggcaataaccaggggcaataaccaggcgtgtcccaggggggagccccgctctgcagccctgtgcgccgtagagagctggacttaggctggcagcatggccgagttcagggtcagggtgtccaccggagaagccttcggggctggcacatgggacaaagtgtctgtcagcatcgtggggacccggggagagagccccccactgcccctggacaatctcggcaaggagttcactgcgggcgctgaggaggacttccaggtgacgctcccggaggacgtaggccgagtgctgctgctgcgcgtgcacaaggcgcccccagtgctgcccctgctggggcccctggccccggatgcctggttctgccgctggttccagctgacaccgccgcggggcggccacctcctcttcccctgctaccagtggctggagggggcggggaccctggtgctgcaggagggtacagccaaggtgtcctgggcagaccaccaccctgtgctccagcaacagcgccaggaggagcttcaggcccggcaggagatgtaccagtggaaggcttacaacccaggttggcctcactgcctggatgaaaagacagtggaagacttggagctcaatatcaaatactccacagccaagaatgccaacttttatctacaggctggctctgcttttgcagagatgaaaatcaaggggttgctggaccgcaaggggctctggaggagtctgaatgagatgaaaaggatcttcaacttccggaggaccccagcagctgagcacgcatttgagcactggcaggaggaygccttcttcgcctcccagttcctgaatggtctcaaccctgtcctgatccgccgctgtcactacctcccaaagaacttccccgtcactgatgccatggtggcctcagtgttgggtcctgggaccagcttgcaggctgagctagagaagggctccctgttcttggtggatcacggcatcctctctggcatccagaccaatgtcattaatgggaagcctcagttctctgcggccccaatgaccctgctataccagagcccaggctgcgggccgctgctgcctctcgccatccagctcagccagacccccggcccaaacagccccatcttcctgcccactgatgacaagtgggactggttgctggccaagacctgggtgcgcaatgccgagttctccttccatgaggccctcacgcacctgctgcactcacatctgctgcctgaggtcttcaccctggctaccctgcgtcagctgccccactgccaccctctcttcaagctgctgatcccgcacacccgatacaccctgcacatcaacacactcgccmgggagctgcttatcgtgccagggcaggtggtggacaggtccacaggcatcggcattgaaggcttctctgagttgatacagaggaacatgaagcagctgaactattctctcctgtgtctgcctgaggatatccggacccgaggagttgaagacatcccaggctactactaccgtgatgatgggatgcagatytggggtgcagtggaacrctttgtctctgaaatcatcggtatctactacccaagtgatgagtctgtccaagatgacagagagctccaggcctgggtcagagagatcttctccaagggcttcctaaaccaggagagctcaggtataccctcctcactggagacccgggaagccctggtgcagtatgtcaccatggtgatattcacctgctcmgccaarcatgcggctgtcagtgcagggcaggtgaggaaaggccagcgcccgaggtggcaggctggaggtgacccagctcctcagcctcattctgccctctcggccttcagtttgactcctgtgcttggatgcccaacctgccacccagcatgcagctgccaccacccacctccaaaggcctggcaacatgcgagggyttcatagccaccctcccacctgtcaatgccacatgtgatgtcatccttgctctctggttgctgagcaaggagcctggagaccaaaggcccctgggcacctatccggatgagcacttcacagaggaggcccctcggcrgagcatcgccaccttccagagccgcctggcccagatctcgaggggcatccaggagcggaaccrgggcctggtgctgccctacacctacctagaccctcccctcatcgagaacagcgtctccrtctaaatcccaggggaacacaggcccagatgacatccctttgaccacatcgctctaggataactggcacccagagaaaaggactcctcagaaaaaacaggcccccatgtgcctctcctgggacaacmagactctgtaactcacccccaccaccatacacacacacaaaaacagaaacaaaatcaaaacagagaaagcagaaaatctaccaagaacagagtctcaggacagwaccactgagtcttttggaggctccaagcctcaaagtgcccgcagagcccaccttgagggttttgctagttggttttgttttgccccaactcaaggacagccaccaagaagtggctgccaaagagactgggcgcagtggctcatgcccataatcccagcactttgggagatggaggcgggaaaatcatttgaggtcagaagttcaaggccagcctggacgacatagcgagac

SEQ ID NO: 1322 - DNA, 2371 bp, Homo sapiens
ttggagtcagtggcaataaccaggggcaataaccaggcgtgtcccaggggggagccccgctctgcagccctgtgcgccgtagagagctggacttaggctggcagcatggccgagttcagggtcagggtgtccaccggagaagccttcggggctggcacatgggacaaagtgtctgtcagcatcgtggggacccggggagagagccccccactgcccctggacaatctcggcaaggagttcactgcgggcgctgaggaggacttccaggtgacgctcccggaggacgtaggccgagtgctgctgctgcgcgtgcacaaggcgcccccagtgctgcccctgctggggcccctggccccggatgcctggttctgccgctggttccagctgacaccgccgcggggcggccacctcctcttcccctgctaccagtggctggagggggcggggaccctggtgctgcaggagggtacagccaaggtgtcctgggcagaccaccaccctgtgctccagcaacagcgccaggaggagcttcaggcccggcaggagatgtaccagtggaaggcttacaacccaggttggcctcactgcctggatgaaaagacagtggaagacttggagctcaatatcaaatactccacagccaagaatgccaacttttatctacaggctggctctgcttttgcagagatgaaaatcaaggggttgctggaccgcaaggggctctggaggagtctgaatgagatgaaaaggatcttcaacttccggaggaccccagcagctgagcacgcatttgagcactggcaggaggaygccttcttcgcctcccagttcctgaatggtctcaaccctgtcctgatccgccgctgtcactacctcccaaagaacttccccgtcactgatgccatggtggcctcagtgttgggtcctgggaccagcttgcaggctgagctagagaagggctccctgttcttggtggatcacggcatcctctctggcatccagaccaatgtcattaatgggaagcctcagttctctgcggccccaatgaccctgctataccagagcccaggctgcgggccgctgctgcctctcgccatccagctcagccagacccccggcccaaacagccccatcttcctgcccactgatgacaagtgggactggttgctggccaagacctgggtgcgcaatgccgagttctccttccatgaggccctcacgcacctgctgcactcacatctgctgcctgaggtcttcaccctggctaccctgcgtcagctgccccactgccaccctctcttcaagtccacaggcatcggcattgaaggcttctctgagttgatacagaggaacatgaagcagctgaactattctctcctgtgtctgcctgaggatatccggacccgaggagttgaagacatcccaggctactactaccgtgatgatgggatgcagatytggggtataccctcctcactggagacccgggaagccctggtgcagtatgtcaccatggtgatattcacctgctcmgccaarcatgcggctgtcagtgcagggcagtttgactcctgtgcttggatgcccaacctgccacccagcatgcagctgccaccacccacctccaaaggcctggcaacatgcgagggyttcatagccaccctcccacctgtcaatgccacatgtgatgtcatccttgctctctggttgctgagcaaggagcctggagaccaaaggcccctgggcacctatccggatgagcacttcacagaggaggcccctcggcrgagcatcgccaccttccagagccgcctggcccagatctcgaggggcatccaggagcggaaccrgggcctggtgctgccctacacctacctagaccctcccctcatcgagaacagcgtctccrtctaaatcccaggggaacacaggcccagatgacatccctttgaccacatcgctctaggataactggcacccagagaaaaggactcctcagaaaaaacaggcccccatgtgcctctcctgggacaacmagactctgtaactcacccccaccaccatacacacacacaaaaacagaaacaaaatcaaaacagagaaagcagaaaatctaccaagaacagagtctcaggacagwaccactgagtcttttggaggctccaagcctcaaagtgcccgcagagcccaccttgagggttttgctagttggttttgttttgccccaactcaaggacagccaccaagaagtggctgccaaagagactgggcgcagtggctcatgcccataatcccagcactttgggagatggaggcgggaaaatcatttgaggtcagaagttcaaggccagcctggacgacatagcgagac

SEQ ID NO: 1323 - DNA, 2707 bp, Homo sapiens
ttggagtcagtggcaataaccaggggcaataaccaggcgtgtcccaggggggagccccgctctgcagccctgtgcgccgtagagagctggacttaggctggcagcatggccgagttcagggtcagggtgtccaccggagaagccttcggggctggcacatgggacaaagtgtctgtcagcatcgtggggacccggggagagagccccccactgcccctggacaatctcggcaaggagttcactgcgggcgctgaggaggacttccaggtgacgctcccggaggacgtaggccgagtgctgctgctgcgcgtgcacaaggcgcccccagtgctgcccctgctggggcccctggccccggatgcctggttctgccgctggttccagctgacaccgccgcggggcggccacctcctcttcccctgctaccagtggctggagggggcggggaccctggtgctgcaggagggtacagccaaggtgtcctgggcagaccaccaccctgtgctccagcaacagcgccaggaggagcttcaggcccggcaggagatgtaccagtggaaggcttacaacccaggttggcctcactgcctggatgaaaagacagtggaagacttggagctcaatatcaaatactccacagccaagaatgccaacttttatctacaggctggctctgcttttgcagagatgaaaatcaaggggttgctggaccgcaaggggctctggaggagtctgaatgagatgaaaaggatcttcaacttccggaggaccccagcagctgagcacgcatttgagcactggcaggaggaygccttcttcgcctcccagttcctgaatggtctcaaccctgtcctgatccgccgctgtcactacctcccaaagaacttccccgtcactgatgccatggtggcctcagtgttgggtcctgggaccagcttgcaggctgagctagagaagggctccctgttcttggtggatcacggcatcctctctggcatccagaccaatgtcattaatgggaagcctcagttctctgcggccccaatgaccctgctataccagagcccaggctgcgggccgctgctgcctctcgccatccagctcagccagacccccggcccaaacagccccatcttcctgcccactgatgacaagtgggactggttgctggccaagacctgggtgcgcaatgccgagttctccttccatgaggccctcacgcacctgctgcactcacatctgctgcctgaggtcttcaccctggctaccctgcgtcagctgccccactgccaccctctcttcaagctgctgatcccgcacacccgatacaccctgcacatcaacacactcgccmgggagctgcttatcgtgccagggcaggtggtggacaggtccacaggcatcggcattgaaggcttctctgagttgatacagaggaacatgaagcagctgaactattctctcctgtgtctgcctgaggatatccggacccgaggagttgaagacatcccaggctactactaccgtgatgatgggatgcagatytggggtgcagtggaacrctttgtctctgaaatcatcggtatctactacccaagtgatgagtctgtccaagatgacagagagctccaggcctgggtcagagagatcttctccaagggcttcctaaaccaggagagctcaggtataccctcctcactggagacccgggaagccctggtgcagtatgtcaccatggtgatattcacctgctcmgccaarcatgcggctgtcagtgcagggcagtttgactcctgtgcttggatgcccaacctgccacccagcatgcagctgccaccacccacctccaaaggcctggcaacatgcgagggyttcatagccaccctcccacctgtcaatgccacatgtgatgtcatccttgctctctggttgctgagcaaggagcctggagaccaaaggcccctgggcacctatccggatgagcacttcacagaggaggcccctcggcrgagcatcgccaccttccagagccgcctggcccagatctcgaggggcatccaggagcggaaccrgggcctggtgctgccctacacctacctagaccctcccctcatcgagaacagcgtctccrtctaaatcccaggggaacacaggcccagatgacatccctttgaccacatcgctctaggataactggcacccagagaaaaggactcctcagaaaaaacaggcccccatgtgcctctcctgggacaacmagactctgtaactcacccccaccaccatacacacacacaaaaacagaaacaaaatcaaaacagagaaagcagaaaatctaccaagaacagagtctcaggacagwaccactgagtcttttggaggctccaagcctcaaagtgcccgcagagcccaccttgagggttttgctagttggttttgttttgcgttttacagccgtggggggaagcacataatcccgccccrgggcccactagcatccactgattggaccttatggtcacccaactcaaggacagccaccaagaagtggctgccaaagagactgggcgcagtggctcatgcccataatcccagcactttgggagatggaggcgggaaaatcatttgaggtcagaagttcaaggccagcctggacgacatagcgagactccacctctaccaaaaaataaaaattaaaaaacaaatt

SEQ ID NO: 1324 - DNA, 2506 bp, Homo sapiens
ttggagtcagtggcaataaccaggggcaataaccaggcgtgtcccaggggggagccccgctctgcagccctgtgcgccgtagagagctggacttaggctggcagcatggccgagttcagggtcagggtgtccaccggagaagccttcggggctggcacatgggacaaagtgtctgtcagcatcgtggggacccggggagagagccccccactgcccctggacaatctcggcaaggagttcactgcgggcgctgaggaggacttccaggtgacgctcccggaggacgtaggccgagtgctgctgctgcgcgtgcacaaggcgcccccagtgctgcccctgctggggcccctggccccggatgcctggttctgccgctggttccagctgacaccgccgcggggcggccacctcctcttcccctgctaccagtggctggagggggcggggaccctggtgctgcaggagggtacagccaaggtgtcctgggcagaccaccaccctgtgctccagcaacagcgccaggaggagcttcaggcccggcaggagatgtaccagtggaaggcttacaacccaggttggcctcactgcctggatgaaaagacagtggaagacttggagctcaatatcaaatactccacagccaagaatgccaacttttatctacaggctggctctgcttttgcagagatgaaaatcaaggggttgctggaccgcaaggggctctggaggagtctgaatgagatgaaaaggatcttcaacttccggaggaccccagcagctgagcacgcatttgagcactggcaggaggaygccttcttcgcctcccagttcctgaatggtctcaaccctgtcctgatccgccgctgtcactacctcccaaagaacttccccgtcactgatgccatggtggcctcagtgttgggtcctgggaccagcttgcaggctgagctagagaagggctccctgttcttggtggatcacggcatcctctctggcatccagaccaatgtcattaatgggaagcctcagttctctgcggccccaatgaccctgctataccagagcccaggctgcgggccgctgctgcctctcgccatccagctcagccagacccccggcccaaacagccccatcttcctgcccactgatgacaagtgggactggttgctggccaagacctgggtgcgcaatgccgagttctccttccatgaggccctcacgcacctgctgcactcacatctgctgcctgaggtcttcaccctggctaccctgcgtcagctgccccactgccaccctctcttcaagtccacaggcatcggcattgaaggcttctctgagttgatacagaggaacatgaagcagctgaactattctctcctgtgtctgcctgaggatatccggacccgaggagttgaagacatcccaggctactactaccgtgatgatgggatgcagatytggggtgcagtggaacrctttgtctctgaaatcatcggtatctactacccaagtgatgagtctgtccaagatgacagagagctccaggcctgggtcagagagatcttctccaagggcttcctaaaccaggagagctcaggtataccctcctcactggagacccgggaagccctggtgcagtatgtcaccatggtgatattcacctgctcmgccaarcatgcggctgtcagtgcagggcagtttgactcctgtgcttggatgcccaacctgccacccagcatgcagctgccaccacccacctccaaaggcctggcaacatgcgagggyttcatagccaccctcccacctgtcaatgccacatgtgatgtcatccttgctctctggttgctgagcaaggagcctggagaccaaaggcccctgggcacctatccggatgagcacttcacagaggaggcccctcggcrgagcatcgccaccttccagagccgcctggcccagatctcgaggggcatccaggagcggaaccrgggcctggtgctgccctacacctacctagaccctcccctcatcgagaacagcgtctccrtctaaatcccaggggaacacaggcccagatgacatccctttgaccacatcgctctaggataactggcacccagagaaaaggactcctcagaaaaaacaggcccccatgtgcctctcctgggacaacmagactctgtaactcacccccaccaccatacacacacacaaaaacagaaacaaaatcaaaacagagaaagcagaaaatctaccaagaacagagtctcaggacagwaccactgagtcttttggaggctccaagcctcaaagtgcccgcagagcccaccttgagggttttgctagttggttttgttttgccccaactcaaggacagccaccaagaagtggctgccaaagagactgggcgcagtggctcatgcccataatcccagcactttgggagatggaggcgggaaaatcatttgaggtcagaagttcaaggccagcctggacgacatagcgagac

SEQ ID NO: 1325 - DNA, 2593 bp, Homo sapiens
ttggagtcagtggcaataaccaggggcaataaccaggcgtgtcccaggggggagccccgctctgcagccctgtgcgccgtagagagctggacttaggctggcagcatggccgagttcagggtcagggtgtccaccggagaagccttcggggctggcacatgggacaaagtgtctgtcagcatcgtggggacccggggagagagccccccactgcccctggacaatctcggcaaggagttcactgcgggcgctgaggaggacttccaggtgacgctcccggaggacgtaggccgagtgctgctgctgcgcgtgcacaaggcgcccccagtgctgcccctgctggggcccctggccccggatgcctggttctgccgctggttccagctgacaccgccgcggggcggccacctcctcttcccctgctaccagtggctggagggggcggggaccctggtgctgcaggagggtacagccaaggtgtcctgggcagaccaccaccctgtgctccagcaacagcgccaggaggagcttcaggcccggcaggagatgtaccagtggaaggcttacaacccaggttggcctcactgcctggatgaaaagacagtggaagacttggagctcaatatcaaatactccacagccaagaatgccaacttttatctacaggctggctctgcttttgcagagatgaaaatcaaggggttgctggaccgcaaggggctctggaggagtctgaatgagatgaaaaggatcttcaacttccggaggaccccagcagctgagcacgcatttgagcactggcaggaggaygccttcttcgcctcccagttcctgaatggtctcaaccctgtcctgatccgccgctgtcactacctcccaaagaacttccccgtcactgatgccatggtggcctcagtgttgggtcctgggaccagcttgcaggctgagctagagaagggctccctgttcttggtggatcacggcatcctctctggcatccagaccaatgtcattaatgggaagcctcagttctctgcggccccaatgaccctgctataccagagcccaggctgcgggccgctgctgcctctcgccatccagctcagccagacccccggcccaaacagccccatcttcctgcccactgatgacaagtgggactggttgctggccaagacctgggtgcgcaatgccgagttctccttccatgaggccctcacgcacctgctgcactcacatctgctgcctgaggtcttcaccctggctaccctgcgtcagctgccccactgccaccctctcttcaagctgctgatcccgcacacccgatacaccctgcacatcaacacactcgccmgggagctgcttatcgtgccagggcaggtggtggacaggtccacaggcatcggcattgaaggcttctctgagttgatacagaggaacatgaagcagctgaactattctctcctgtgtctgcctgaggatatccggacccgaggagttgaagacatcccaggctactactaccgtgatgatgggatgcagatytggggtgcagtggaacrctttgtctctgaaatcatcggtatctactacccaagtgatgagtctgtccaagatgacagagagctccaggcctgggtcagagagatcttctccaagggcttcctaaaccaggagagctcaggtataccctcctcactggagacccgggaagccctggtgcagtatgtcaccatggtgatattcacctgctcmgccaarcatgcggctgtcagtgcagggcagtttgactcctgtgcttggatgcccaacctgccacccagcatgcagctgccaccacccacctccaaaggcctggcaacatgcgagggyttcatagccaccctcccacctgtcaatgccacatgtgatgtcatccttgctctctggttgctgagcaaggagcctggagaccaaaggcccctgggcacctatccggatgagcacttcacagaggaggcccctcggcrgagcatcgccaccttccagagccgcctggcccagatctcgaggggcatccaggagcggaaccrgggcctggtgctgccctacacctacctagaccctcccctcatcgagaacagcgtctccrtctaaatcccaggggaacacaggcccagatgacatccctttgaccacatcgctctaggataactggcacccagagaaaaggactcctcagaaaaaacaggcccccatgtgcctctcctgggacaacmagactctgtaactcacccccaccaccatacacacacacaaaaacagaaacaaaatcaaaacagagaaagcagaaaatctaccaagaacagagtctcaggacagwaccactgagtcttttggaggctccaagcctcaaagtgcccgcagagcccaccttgagggttttgctagttggttttgttttgccccaactcaaggacagccaccaagaagtggctgccaaagagactgggcgcagtggctcatgcccataatcccagcactttgggagatggaggcgggaaaatcatttgaggtcagaagttcaaggccagcctggacgacatagcgagac

SEQ ID NO: 1326 - DNA, 1077 bp, Homo sapiens
aagccccagacggtatctcctggatgccagtgagcggctgagagctgaagctccctggacactcaaggctcttgtggtgacagtctgacgtaaaggcgtgcagggaggcctagctctgtctcctggacttagagatttcagacacagaagtctgtccatggctccttgtcacatccgcaaataccaggagagcgaccgccagtgggttgtgggcttgctctcccgggggatggccgagcatgccccagccaccttccggcaattgctgaagctgcctcgaaccstcatactcttacttggggggcccctcgccctactcctggtctctggatcctggcttctagccctcgtgttcagcatcagcctcttccctgccctgtggttccttgccaaaaaaccctggacggagtatgtggacatgacattgtgcacagacatgtctgacattaccaaatcctacctgagtragcgtggctcctgcttctgggtggctgagtctgaagagaaggtggtgggcayggtaggagctctgcctgttgatgatcccaccttgagggagaagcggttgcagctgtttcatctctytgtggacagtgagcaccgtcgtcaggggatagcaaaagccctggtcaggactgtcctccagtttgcccgggaccagggctacagtgaagttatcctggacaccrgcamcatccagctctctgctatggscctctaccagagcwtgggcttcaagaagacgggccagtccttcttctrtgtgtgggccaggctrgtggmtcttcatacagttcatttcatctaycacctcccttctkctmaggyagggmgtctrtgatytctttctgtstgtattggtcagaatagaatccattcrgctgtagcagcaagcaatccccaacctytsactgcaatgacctttcaatgcaataaaagcttattgtccattcacatctgagtcccaygtgattgcttgtggggtagcttctgggtttctgcttcattcagtcttyttgattcccatctgtttcatttttctagtgccagcataatgttgcataagaacaaccacca

SEQ ID NO: 1327 - DNA, 830 bp, Homo sapiens
ctggactcagtgacttcagacacagaagtctgtccatggctccttatcacatccgcaaayaccaggagagcgaccgcaagtaggtcgtgggcttgctctccsgggggatggccgaacacgccccagccaccttccggcgattactgaagctgcctcgaaccctcatactcttacttgggggggcccttgccctactcctggtctctggctcctggattctggccctcgtgttcagcctcagcctccttcctgccctgtggttccttgccaaaaaaccctggacgcggtatgtagacatagcattgcgcacagacatgtctgacatcaccaaatcctacctgagtgagtgtggctcctgcttctgggtggstgartctgaagagaaggtgktgggcacagtaggagctctgcccrttgatgatcccaccttgagggagaagcggttgcagctgtttcatctctstgtggacaatgagcaccgtggtcaggggatagcaaaagccctggtcaggactgtcctccagtttgcccgggacyagggctacagtgaagttgtcctggacaccagcaacatccagctctctgccatgggcctctaccagagcttgggcttcaagaagacgggccagtccttcttccacgtgtgggccaggctggtggatcttcatacagttcatttcatctatcacctcccttctgctcargcagggcgtctatgatttctttccttctgtattggtcagaatagaatccattcggctgtagcagcaagcaatccccaacctctgactgcaatgacctttctgtgcaataaaagcttattgtccatt

SEQ ID NO: 1328 - DNA, 1515 bp, Homo sapiens
tagtttcctgagctcgaactctactttttgcaacaagcagaatgtacacatgttaaacaagggcacacaagcaggtaacttggagattgtgaacggtgccgaaaaacacactcgagccaactccaagttccagcgaggctaaattggaagaggacagtgatgtgacttcttggtcagaagaaaaacatgaagagaaaatgctctttaccagttatcctgaggacagaaagttaaaaaagaacaagaagaatkcccatgaaggagtttcctggtttgttcctttggaaaatgtggagtctagataaaaagaaggaaaacatgctcaagactcatgaccctggcatctcccggttggaaccagtaaccaagaccaagccgtggagggagccactgtgggagcggarctggcaggggcagcacctggacagtcggggctacctggcaggcccaggcagagaggatggcagaaacccactgaagctgtttgtgagagcaaccctgcaggaatcgcttcagtttcacagacctgacttcatctcccacattggggagcggataaagcgtctgaagttaatagtccaggagagaaagctgcagagcatgttaaagagcgagcgggatgcgctattcgacattgacagggaacggcagggccaccagaatcgcatgcgcccactacccaagagagtcttcctggctgtccagaagaacaagcctatcagcaagaaggaaatgattcagaggtccaaacggacacacgcaggaggaacagtagcacaaaggcttcccggtgccttgtgggtgaaagaaaggcttccagggaaaggagagaaacacccagggatcccggtgacgtcgggaagcagcacccagaccataaaaatgaaacagatgggaatcaaaaagactgaatgaagcagaaacccagaagctaccccacaggcaatcgcatgggactcagatgttaatggacaataagcttttattgcacagaaaggtcattgcagtcagaggttggggattgcttgctgctacagccgaatggattctattctgaccaatacagaaggaaagaaatcatagacgccctgcytgagcagaagggaggtgatagatgaaatgaactgtatgaagatccaccagcctggcccacacgtggaagaaggactggcccgtcttcttgaagcccaagctctggtagaggcccatggcagagagctggatgttgctggtgtccaggacaacttcactgtagccctrgtcccgggcaaactggaggacagtcctgaccagggcttttgctatcccctgaccacggtgctcattgtccacasagagatgaaacagctgcaaccgcttctccctcaaggtgggatcatcaaygggcagagctcctactgtgcccamcaccttctcttcagaytcasccacccagaagcaggagccacactcactcaggtaggatttggtgatgtcagacatgtctgtgcgcaatgctatgtctacataccgcgt

SEQ ID NO: 1329 - DNA, 1673 bp, Homo sapiens
ggccaattcctgtccccccagcagcatggcatcgtgtgctgaaccctctgagccctctgccccactgcccgccggggtcccaccgctcgaggacttcgaggtactggatggggttgaggatgcagagggtgaggaggaagaggaggaggaagaggaggaagaggatgacctgagtgagctgccaccgctggaggacatgggacaacccccggcggaggaggctgarcagcctggggccctggcccgagagttccttgctgccatggagcccgagcccgccccagycccggccccagaagagtggctggacattctggggaacgggctgttgaggaagaagacgctggtcccagggccgccaggttcgagccgcccggtcaagggccaggtggtcaccgtacatctgcagacgtcgctggagaatggcacacgggtgcaggaggagccggagctggtgttcactctgggtgactgtgacgtcatccaggccctggatctcagtgtcccactcatggacgtgggggagacggccatggtcactgctgactccaagtactgctacggcccccaaggcagcaggagcccatacatccccccgcacgcggccctgtgcctggaggtgaccctgaagacggctgtggacgggcctgayctgsagatgctcacggggcaggagcgcgtggccctggccaaccggaagcgggagtgcggcaacgcccactaccagcgggcggacttcgtcctggccgccaactcctacgacctcgccatcaaggctatcacctccagcgccaaagtggacatgacgttcgaggaggaggcacagctcctgcagttgaaggtgaagtgtctgaacaacctggcggcctcgcagctgaagctcgaccactaccgcgcagccctgcgctcctgcagccttgtgctggagcaccagccagacaacatcaaggctctcttccgcaagggcaaggtgctggcycagcagggggagtacagtgaggccatccccatcctgagggcagccctgaagctggaaccttccaacaagacgatccacgcagagctctcaaagctggtgaagaagcatgcggcgcagcggagcacggagaccgccttgtaccggaaaatgctgggcaaccccagccggctgcctgctaagtgccctggcaagggtgcctggtccatcccatggaagtggctgtttggggcractgctgttgccttggggggtgtggcactctctgtggtcatcgctgccaggaactgaccacctaggtggctgccaccccctctgcacaccatggaccctgccctgcgctccccaactcccccaggctccctgtccactgccctccctggtytggccccctcctccgggttaggggagcaaggattgggggtcgtgcagcccagccagcaggagggactgaggccctctaggaggaaagcccagagggagggggccctcattccttcagacccagttttcccccaccctccttaccccgctgggstaggtctccgcyagggctggcctcagtttytcctcaacaggcctgggggcagcccttcccctgcctagtccccgcctgagtgccagccccccaccccgcctgccgccccctgtccaggttccctccccgccacagtgaaataaagcatcccmccctgca

SEQ ID NO: 1330 - DNA, 1773 bp, Homo sapiens
gatgggtcattcagcaaccccagagctgccctgcccgtcaagcttgaactctttaaggaaataacatttagagtggactgtgcccccagcagcccccaagggccaattcctgtccccccagcagcatggcatcgtgtgctgaaccctctgagccctctgccccactgcccgccggggtcccaccgctcgaggacttcgaggtactggatggggttgaggatgcagagggtgaggaggaagaggaggaggaagaggaggaagaggatgacctgagtgagctgccaccgctggaggacatgggacaacccccggcggaggaggctgarcagcctggggccctggcccgagagttccttgctgccatggagcccgagcccgccccagycccggccccagaagagtggctggacattctggggaacgggctgttgaggaagaagacgctggtcccagggccgccaggttcgagccgcccggtcaagggccaggtggtcaccgtacatctgcagacgtcgctggagaatggcacacgggtgcaggaggagccggagctggtgttcactctgggtgactgtgacgtcatccaggccctggatctcagtgtcccactcatggacgtgggggagacggccatggtcactgctgactccaagtactgctacggcccccaaggcagcaggagcccatacatccccccgcacgcggccctgtgcctggaggtgaccctgaagacggctgtggacgggcctgayctgsagatgctcacggggcaggagcgcgtggccctggccaaccggaagcgggagtgcggcaacgcccactaccagcgggcggacttcgtcctggccgccaactcctacgacctcgccatcaaggctatcacctccagcgccaaagtggacatgacgttcgaggaggaggcacagctcctgcagttgaaggtgaagtgtctgaacaacctggcggcctcgcagctgaagctcgaccactaccgcgcagccctgcgctcctgcagccttgtgctggagcaccagccagacaacatcaaggctctcttccgcaagggcaaggtgctggcycagcagggggagtacagtgaggccatccccatcctgagggcagccctgaagctggaaccttccaacaagacgatccacgcagagctctcaaagctggtgaagaagcatgcggcgcagcggagcacggagaccgccttgtaccggaaaatgctgggcaaccccagccggctgcctgctaagtgccctggcaagggtgcctggtccatcccatggaagtggctgtttggggcractgctgttgccttggggggtgtggcactctctgtggtcatcgctgccaggaactgaccacctaggtggctgccaccccctctgcacaccatggaccctgccctgcgctccccaactcccccaggctccctgtccactgccctccctggtytggccccctcctccgggttaggggagcaaggattgggggtcgtgcagcccagccagcaggagggactgaggccctctaggaggaaagcccagagggagggggccctcattccttcagacccagttttcccccaccctccttaccccgctgggstaggtctccgcyagggctggcctcagtttytcctcaacaggcctgggggcagcccttcccctgcctagtccccgcctgagtgccagccccccaccccgcctgccgccccctgtccaggttccctccccgccacagtgaaataaagcatcccmccctgca

SEQ ID NO: 1331 - DNA, 1643 bp, Homo sapiens
gatgggtcattcagcaaccccagagctgccctgcccgtcaagcttgaactctttaaggaaataacatttagagtggactgtgcccccagcagcccccaagggccaattcctgtccccccagcagcatggcatcgtgtgctgaaccctctgagccctctgccccactgcccgccggggtcccaccgctcgaggacttcgaggtactggatggggttgaggatgcagagggtgaggaggaagaggaggaggaagaggaggaagaggatgacctgagtgagctgccaccgctggaggacatgggacaacccccggcggaggaggctgarcagcctggggccctggcccgagagttccttgctgccatggagcccgagcccgccccagycccggccccagaagagtggctggacattctggggaacgggctgttgaggaagaagacgctggtcccagggccgccaggttcgagccgcccggtcaagggccaggtggtcaccgtacatctgcagacgtcgctggagaatggcacacgggtgcaggaggagccggagctggtgttcactctgggtgactgtgacgtcatccaggccctggatctcagtgtcccactcatggacgtgggggagacggccatggtcactgctgactccaagtactgctacggcccccaaggcaggagcccatacatccccccgcacgcggccctgtgcctggaggtgaccctgaagacggctgtggacgggcctgayctgsagatgctcacggggcaggagcgcgtggccctggccaaccggaagcgggagtgcggcaacgcccactaccagcgggcggacttcgtcctggccgccaactcctacgacctcgccatcaaggctatcacctccagcgccaaagtggacatgacgttcgaggaggaggcacagctcctgcagttgaaggtgaagtgtctgaacaacctggcggcctcgcagctgaagctcgaccactaccgcgcagccctgcgctcctgcagccttgtgctggagcaccagccagacaacatcaaggctctcttccgcaagggcaaggtgctggcycagcagggggagtacagtgaggccatccccatcctgagggcagccctgaagctggaaccttccaacaagacgatccacgcagagctctcaaagctggtgaagaagcatgcggcgcagcggagcacggagaccgccttgtaccggaaaatgctgggcaaccccagccggctgcctgctaagtgccctggcaagggtgcctggtccatcccatggaagtggctgtttggggcractgctgttgccttggggggtgtggcactctctgtggtcatcgctgccaggaactgaccacctaggtggctgccaccccctctgcacaccatggaccctgccctgcgctccccaactcccccaggctccctgtccactgccctccctggtytggccccctcctccgggttaggggagcaaggattgggggtcgtgcagcccagccagcaggagggactgaggccctctaggaggaaagcccagagggagggggccctcattccttcagacccagttttcccccacccccgcctgccgccccctgtccaggttccctccccgccacagtgaaataaa

SEQ ID NO: 1332 - DNA, 1750 bp, Homo sapiens
ttcccgaggcgcggcggccgcggctgggggcggggaggggggcgcaggaccccaagtgggggtcccggagccagaggcaaggccaattcctgtccccccagcagcatggcatcgtgtgctgaaccctctgagccctctgccccactgcccgccggggtcccaccgctcgaggacttcgaggtactggatggggttgaggatgcagagggtgaggaggaagaggaggaggaagaggaggaagaggatgacctgagtgagctgccaccgctggaggacatgggacaacccccggcggaggaggctgarcagcctggggccctggcccgagagttccttgctgccatggagcccgagcccgccccagycccggccccagaagagtggctggacattctggggaacgggctgttgaggaagaagacgctggtcccagggccgccaggttcgagccgcccggtcaagggccaggtggtcaccgtacatctgcagacgtcgctggagaatggcacacgggtgcaggaggagccggagctggtgttcactctgggtgactgtgacgtcatccaggccctggatctcagtgtcccactcatggacgtgggggagacggccatggtcactgctgactccaagtactgctacggcccccaaggcaggagcccatacatccccccgcacgcggccctgtgcctggaggtgaccctgaagacggctgtggacgggcctgayctgsagatgctcacggggcaggagcgcgtggccctggccaaccggaagcgggagtgcggcaacgcccactaccagcgggcggacttcgtcctggccgccaactcctacgacctcgccatcaaggctatcacctccagcgccaaagtggacatgacgttcgaggaggaggcacagctcctgcagttgaaggtgaagtgtctgaacaacctggcggcctcgcagctgaagctcgaccactaccgcgcagccctgcgctcctgcagccttgtgctggagcaccagccagacaacatcaaggctctcttccgcaagggcaaggtgctggcycagcagggggagtacagtgaggccatccccatcctgagggcagccctgaagctggaaccttccaacaagacgatccacgcagagctctcaaagctggtgaagaagcatgcggcgcagcggagcacggagaccgccttgtaccggaaaatgctgggcaaccccagccggctgcctgctaagtgccctggcaagggtgcctggtccatcccatggaagtggctgtttggggcractgctgttgccttggggggtgtggcactctctgtggtcatcgctgccaggaactgaccacctaggtggctgccaccccctctgcacaccatggaccctgccctgcgctccccaactcccccaggctccctgtccactgccctccctggtytggccccctcctccgggttaggggagcaaggattgggggtcgtgcagcccagccagcaggagggactgaggccctctaggaggaaagcccagagggagggggccctcattccttcagacccagttttcccccaccctccttaccccgctgggstaggtctccgcyagggctggcctcagtttytcctcaacaggcctgggggcagcccttcccctgcctagtccccgcctgagtgccagccccccaccccgcctgccgccccctgtccaggttccctccccgccacagtgaaataaagcatcccmccctgca

SEQ ID NO: 1333 - DNA, 1196 bp, Homo sapiens
agaccagaacccaagatrgctgcgctgttgctgagacacgttggtcgtcattgcctccgagcccactttagccctcagctctgtatcagaaattggtctcttcccatggcgatgtccatctgccaccgtggcactggtattgctttgagtgcaggggtctctctttttggcatgtyggccgtgttactccctgggaactttgagtcttatttggaacttgtgaagtccctgtgtctggggccagcactgatccacacagctaagtttgcactcgtcttccctctcatgtatcatacctggaatgggatcygacacttgatgtgggacctaggaaaaggcctgaagattccccagctataccagtctggagtggttgtcctggttcttactgtgttgtcctctatggggctggcagccatgtgaagaaaggaggctcccagcatcatcttcctacacattattacattcacccatctttctgtttgtcattcttatctccagcctgggaaaagttctccttatttgtttagatccttttgtattttcagatctccttggagcagtagagtacctggtagaccttaatagtggaaaagggtctagttttccccttgtttctaaagatgaggtggctgcaaaaactccccttttttgcccacagcttgcctactctcggcctagaagcagttattctctctccatattgggctttgatttgtgctgagggtcagcttttggctccttcttcctgagacagtggaaacaatgccagctctgtggcttctgccctggggacgggccgggtggggggtgggttggtgaggctttgggtgccactacctgtgggttgctggcttaaaggacaattctcttcattggtgagagcccaggccattaacacctacacagtgttattgaaagaagagaggtgggggtggaggggaattagtctgtcccagctagagggagataaagagggctagttagttcttggagcagctgcttttgaggagaaaatatatagctttggacacgaggaagatccagaaaattatcattgaacatattaatggttatttctttttcttggatttccagaaaagcctcttaattttatgctttctcatcgaagtaatgtaccctttttttctgaaactgaattaaatactcattttatctttgaaaaaaaaaaaaag

SEQ ID NO: 1334 - DNA, 1072 bp, Homo sapiens
cacgccactccctgcgccagcttctgctttccggcgtggctgtggtcaagcctgagtcagtcccacgggaccacgccgctgcagtcgccacacctttgcccctgctgckatgaccctgtcgccacttctgctgttcctgccaccgctgctgctgctgctggacgtccccacggcggcggtgcaggcgtcccctctgcaagcgttagacttctttgggaatgggccaccagttaactacaagacaggcaatctatacctgcgggggcccctgaagaagtccaatgcaccgcttgtcaatgtgaccctctactatgaagcactgtgcggtggctgccragccttcctgatccgggagctcttcccaacatggctgttggtcatggagatcctcaatgtcacsctggtgccctacggaaacgcacaggaacaaaatgtcagtggcaggtgggagttcaagtgccagcatggagaagaggagtgcaaattcaacaaggtggaggcctgcgtgttggatgaacttgacatggagctagccttcctgaccatkgtctgcatggaagagtttgaggacatggagagaagtctgccactatgcctgcagctctacgccccagggctgtcgccagacactatcatggagtgtgcartgggggaccgcggcatgcagctcatgcacgccaacgcccagcggacagatgctctccagccaccrcacgagtatgtgccctgggtcaccgtcaatgggaaacccttggaagatcagasycagctccttacccttgtctgccagttgtaccagggcaagaagccggatgtctgcccttcctcaaccagctccctcaggagtgtttgcttcaagtgatggccggtgagctgcggagagctcatggaaggckagtgggaacccggctgcctgcctttttttctgatccagaccctcggcacctgctrcttaccaactgraaaattttatgcatcccatgaagcccagatacacaaaattccmccccatgatcaagaatcctgctccactaagaayggtgctaaagtaaaactagtttaataagccctt

SEQ ID NO: 1335 - DNA, 978 bp, Homo sapiens
cacgccactccctgcgccagcttctgctttccggcgtggctgtggtcaagcctgagtcagtcccacgggaccacgccgctgcagtcgccacacctttgcccctgctgckatgaccctgtcgccacttctgctgttcctgccaccgctgctgctgctgctggacgtccccacggcggcggtgcaggcgtcccctctgcaagcgttagacttctttgggaatgggccaccagttaactacaagacaggcaatctatacctgcgggggcccctgaagaagtccaatgcaccgcttgtcaatgtgaccctctactatgaagcactgtgcggtggctgccragccttcctgatccgggagctcttcccaacatggctgttggtcatggagatcctcaatgtcacsctggtgccctacggaaacgcacaggaacaaaatgtcagtggcaggtgggagttcaagtgccagcatggagaagaggagtgcaaattcaacaaggtggaggcctgcgtgttggatgaacttgacatggagctagccttcctgaccatkgtctgcatggaagagtttgaggacatggagagaagtctgccactatgcctgcagctctacgccccagggctgtcgccagacactatcatggagtgtgcartgggggaccgcggcatgcagctcatgcacgccaacgcccagcggacagatgctctccagccaccrcacgagtatgtgccctgggtcaccgtcaatgggaaacccttggaagatcagasycagctccttacccttgtctgccagttgtaccagggcaagaagccggatgtctgcccttcctcaaccagctccctcaggagtgtttgcttcaagtgatggccggtgagctgcggagagctcatggaaggckagtgggaacccggctgcctgcctttttttctgatccaaatcctgctccactaagaayggtgctaaagtaaaactagtttaat

SEQ ID NO: 1336 - DNA, 997 bp, Homo sapiens
ccgctgcagtcgccacacctttgcccctgctgckatgaccctgtcgccacttctgctgttcctgccaccgctgctgctgctgctggacgtccccacggcggcggtgcaggcgtcccctctgcaagcgttagacttctttgggaatgggccaccagttaactacaagacaggcaatctatacctgcgggggcccctgaagaagtccaatgcaccgcttgtcaatgtgaccctctactatgaagcactgtgcggtggctgccragccttcctgatccgggagctcttcccaacatggctgttggtcatggagatcctcaatgtcacsctggtgccctacggaaacgcacaggaacaaaatgtcagtggcaggtgggagttcaagtgccagcatggagaagaggagtgcaaattcaacaaggtggaggcctgcgtgttggatgaacttgacatggagctagccttcctgaccatkgtctgcatggaagagtttgaggacatggagagaagtctgccactatgcctgcagctctacgccccagggctgtcgccagacactatcatggagtgtgcartgggggaccgcggcatgcagctcatgcacgccaacgcccagcggacagatgctctccagccaccrcacgagtatgtgccctgggtcaccgtcaatgggaaacccttggaagatcagasycagctccttacccttgtctgccagttgtaccagggcaagaagccggatgtctgcccttcctcaaccagctccctcaggagtgtttgcttcaagtgatggccggtgagctgcggagagctcatggaaggckagtgggaacccggctgcctgcctttttttctgatccagaccctcggcacctgctrcttaccaactgraaaattttatgcatcccatgaagcccagatacacaaaattccmccccatgatcaagaatcctgctccactaagaayggtgctaaagtaaaactagtttaataagccctt

SEQ ID NO: 1337 - DNA, 954 bp, Homo sapiens
agcggtgagactgtctctcggctgcagccctggtgcgacccggcccgttgccgtagagatgggcagggctggatggagtggggtgcggtgagctgagctgaccctgcttcgccacggggactgcagtgaccccggcttgccggcagggcgggtaacaggttgagccagggtggggctgctcaggggcgtggagccgaggccaggatttctctgaagacccggcacaggctattcctttctgcgacgagcccattgctatggaaaccaaagcgttaggccagcggggattgaggctgcgggatcatgaygggtctctctcccgaagaaccttgcctaaggcttccccaagcggctacttcctgagcgaacccgcccacccgcctgaaggagagagagccctgcattttaacttccctatcagaagcgagaaaaatagttatcattttgagagggcttactctatgccaagccctgagaaaactctttacgtggattatctcgtttaatttcacaacatccttttaagttttccatggacacagcctagcagaaagacgcagccttsgtgcttcgctgactgctgaccactgacccaccgccttgrtgacagcaccctcgtgtgccttcccagttcagttccggcagccctcagtcagcggcctctcgcagataaccaaaagcctgtatatcagcaatggtgtggccgccaacaacaagctcatgctgtctagcaaccagatcaccatggtcatcaatgtctcagtggagcgtggagatgaagcagggccgtactttgctgcactgtgctgctggtgtgagccgctcagctgccctgtgcctcgcctacctcatgaagtaccacgccatgtccctgctggacgcccacacgtggaccaagtcatgccggcccatcatccgacccaacagcggcttttgggagcagctcatccacta

SEQ ID NO: 1338 - DNA, 1819 bp, Homo sapiens
agcggtgagactgtctctcggctgcagccctggtgcgacccggcccgttgccgtagagatgggcagggctggatggagtggggtgcggtgagctgagctgaccctgcttcgccacggggactgcagtgaccccggcttgccggcagggcgggtaacaggttgagccagggtggggctgctcaggggcgtggagccgaggccaggatttctctgaagacccggcacaggctattcctttctgcgacgagcccattgctatggaaaccaaagcgttaggccagcggggattgaggctgcgggatcatgaygggtctctctcccgaagaaccttgcctaaggcttccccaagcggctacttcctgagcgaacccgcccacccgcctgaaggagagagagccctgcattttaacttccctatcagaagcgagaaaaatagttatcattttgagagggcttactctatgccaagccctgagaaaactctttacgtggattatctcgtttaatttcacaacatccttttaagttttccatggacacagcctagcagaaagacgcagccttsgtgcttcgctgactgctgaccactgacccaccgccttgrtgacagcaccctcgtgtgccttcccagttcagttccggcagccctcagtcagcggcctctcgcagataaccaaaagcctgtatatcagcaatggtgtggccgccaacaacaagctcatgctgtctagcaaccagatcaccatggtcatcaatgtctcagtggaggtagtgaacaccttgtatgaggatatccagtacatgcaggtacctgtggctgactcccctaactcacgtctctgtgacttctttgaccctattgctgaccatatccacagcgtggagatgaagcagggccgtactttgctgcactgtgctgctggtgtgagccgctcagctgccctgtgcctcgcctacctcatgaagtaccacgccatgtccctgctggacgcccacacgtggaccaagtcatgccggcccatcatccgacccaacagcggcttttgggagcagctcatccactatgagttccaattgtttggcaagaacactgtgcacatggtcagttccccagtgggaatgatccctgacatctatgagaaggaagtccgtttgatgattccactgtgagccatcccacgagcccctgcattggagtcagaggtacagatctattgttgatcttacaccaagatccaaacttgaacattctacttttgttgatacagaaaaaaacagatgatgccttttatgagcacaaaaaagagttgctgtagcttttaactttataatccattttttttmagattaaactaattgtgagatggtgaagataaattttctgccctgtgagtgacactggccaggggataggttgaggcagatggtgcccagaagaaagagggcagcacccattgcacatggcaggcctggaatcctgcagccctccccaaaaacagattgacccaggaatgaatctgctacaattccacctcattctttcacacccagagccagagccttaagcatcatggtacctcttgcgcttcttacagtgagtgccaatctactagataaatggccttcaggcagtgctccaggaatcctggggggtcccaggccacctctgcttccaccttcactataagtggcccagttctggttttctagattgtacttatgcataagatagtttttaaagaaagcattccactgtgtaaatttttttttgtctttttttgaaactgtcctgctctgtcacccatcctagagtgcagta

SEQ ID NO: 1339 - DNA, 1652 bp, Homo sapiens
cgccccgccctgctcccttaggcagcgcctcctcaactgccctcagtttcccaatcaggtagtgagagtggcacgaaccagccgttctcctgagccaccccccgcgcccccggactcctcaatatcccaggtgggaacgctcaccagggacatccagcgcccgtcgccctgtacgtcctgcaccggcgtgggcttgctggctgggttctcctctccactcatcttggcgccgcagctcctgcaggatgagcgagtcgggtcggcccgggagtgttccgaacsgagctggctccgccacgcccactcctacccctcgcggcaacaaaggaccgtcccaacgctagcacacccgcggaggacgaaggccgatacagggcgccgcctcctctccagggacggaagccttcacttaggaggacaccatggatacccagggaccagtctcccagccttttcagcagcctgagaaacctggtcgtgtccgtcgtcggaagactaggcgggaacgtaacaaggccctggtgggcagccycggccattagcccaccacgatcctcctgtggccattcgggatccacctgtggtccctactgcctccaagctcgtggtcataacccagggccggctgagccgggagcaccggggtctcttcaaccacgaggtgaaatccctagatgttgcaaggctgcttagcagtgggaccctggtgccaggcagccccacactccccgccaagccctccccaagcccaggcagggcccaggaaccagccccacggtccagggacaaagagaaccaggtgcctggaggttcgggcccaggcccacccagttccccagagttgtctggcgtggggcagctgctggcagagctgcagtgtcagctgagtttgccacaggccttcccccggaggaacctgattcaggatgccagggatgccatmgtgcacaccttgcaggcctgtcatggttgtgtgcctgaccttgccctggtgcttcggggctgccagccacccttgccaggtgagcgtccctcctgcccctgtactcccctttcctttgtcggctctagctcagctagcctctatgcttctttcctctgtgccaggggccaagcctggggtctctgagagaaagatgacacccttctggattaatagccctgatcaagtcccagagcaggagaggcaaaggaagcaacaagggacaaaggagttcaccttccccatgccctacacctccagcatgcccactgcgcacagggggagtctggcaccgccaagaggtccctggccaccatactttccctcactgtcttcgccatctggaacagcctggggtcccccaacagcgtttgacttgttaaaaagcatctggctggtagccacgccacyccctcctcggccctggggggttggcctccctcagcccctgcctcagccttcatcacccctgttgccccgaacctctgtcctggactggagccccagccccscttccccactgcccagcctctcctgggtagtagcccagagcagtccggaagcctggtcttttccacccatgagactgtactgaggagaggctgaggctagggctggggacagatatcttgtactcccagtgacctcaataaagtacttttcatggtcc

SEQ ID NO: 1340 - DNA, 1337 bp, Homo sapiens
actggccgagaagggctgagcaactcctggaggggagcacctgaagcctgagttcctgaaggtgaaccccctggggaaggtgcctgccctcagagatggcgacttcctactagcagagaggctggagaaaagatctctgacaccccctgcccacagcatggtcatcgttttatacctgagtcgaaagtaccagatacggggacactggtacccacctgagctgcaagcccgcacctgcgtggatgagtacttggcgtggaagcatgtcaccatccagctgcctgccaccaatgtctacctgtgcaagcctgcagatgctgcacagctggagcggctgttggggaggctgaygccagccctgcagcacctggatkggggggtsctggtggccaggcccttcctggcaatggagcagatctccctggaagacttggtgctgacggaggtgatgcaggcccatatgaaggctgcccttggtactgagctcttcctggaggcccacaagctcatactccagcctctgaaccacagtgaggctcggcaggacccccagctggcccagaagcaggcccaggtctgtggctggcyagctgcagctgtggggcctggcatgtgtctcaacatggccctggagctctacatggacctgctgtcagcaccctgccgtgccgtctacatcttctcgaagaagcatgacatccagttcaactttcagtttgtggatctgctgaaaggtcaccaccacagcaaagaatacattgacatcaaccccctcaggaagctkcccagcctcaaagatgggaaatttatcttaagtgaaagttgctgatcccaaagataacagggraggaagtttcagctgagaagatggagcatgcagtggaagaggtgaagaacagcctgcagctctttgaggagtattttctgcaggataagatgttcatcaccgggaaccaaatctcactggctgacctggtggccgtggtggagatgatgcagcccatggcagccaactataatgtcttcctcaacagctccaagctagctgagtggcgtatgcaggtggagctgaatattggctctggcctctttagggaggcccatgatcgactaatgcagttggccgactgggacttttcaacaytggattcaatggtcaaggagaatatttctgagttgctgaagaagagcaggtgaccctaggcgcagcctgtcccgcagggcctggctggcttagcaatctgagccaccttccttaaaggaaatrytaaaaaamwaaaacaaaaamacaaaaaaacaactgttctttgcctaataaagaactggaacaaccatca

SEQ ID NO: 1341 - DNA, 630 bp, Homo sapiens
atgctatccacttttgccaggcagaatgacatcccttttcagctgcagacagtggagttggcttggggggagcacctgaagcctgagttcctgaaggtgaaccccctggggaaggtgcctgccctcagagatggcgacttcctactagcagagaggctggagaaaagatctctgacaccccctgcccacagcatggtcatcgttttatacctgagtcgaaagtaccagatacggggacactggtacccacctgagctgcaagcccgcacctgcgtggatgagtacttggcgtggaagcatgtcaccatccagctgcctgccaccaatgtctacctgtgcaagcctgcagatgctgcacagctggagcggctgttggggaggctgaygccagccctgcagcacctggatkggggggtsctggtggccaggcccttcctggcaatggagcagatctccctggaagacttggtgctgacggaggtgatgcaggcccatatgaaggctgcccttggtactgagctcttcctggaggcccacaagctcatactccagcctctgaaccacagtgaggctcggcaggacccccagctggcccagaagcaggtgcagttgctgcaggagtggctccac

SEQ ID NO: 1342 - DNA, 769 bp, Homo sapiens
gcccaggtctgtggctggcyagctgcagctgtggggcctggcatgtgtctcaacatggccctggagctctacatggacctgctgtcagcaccctgccgtgccgtctacatcttctcgaagaagcatgacatccagttcaactttcagtttgtggatctgctgaaaggtcaccaccacagcaaagaatacattgacatcaaccccctcaggaagctkcccagcctcaaagatgggaaatttatcttaagtgaaagttgctgatcccaaagataacagggraggaagtttcagctgagaagatggagcatgcagtggaagaggtgaagaacagcctgcagctctttgaggagtattttctgcaggataagatgttcatcaccgggaaccaaatctcactggctgacctggtggccgtggtggagatgatgcagcccatggcagccaactataatgtcttcctcaacagctccaagctagctgagtggcgtatgcaggtggagctgaatattggctctggcctctttagggaggcccatgatcgactaatgcagttggccgactgggacttttcaacaytggattcaatggtcaaggagaatatttctgagttgctgaagaagagcaggtgaccctaggcgcagcctgtcccgcagggcctggctggcttagcaatctgagccaccttccttaaaggaaatrytaaaaaamwaaaacaaaaamacaaaaaaacaactgttctttgcctaataaagaactggaacaaccatca

SEQ ID NO: 1343 - DNA, 4690 bp, Homo sapiens
ctattagagatgctgcaaggagaatgagagagatgcctggttagctagcagttcttccacctagctcagctgaatcaccaggtgtgtgagtggggtaattttggatttcagccccaaatgagtgtgcagaaaactgcttctgcatgaatggcctatgtgagatcagcagaaaagccagcyagctgagccttgctcarattgtaaaatcataagcagatacacagtcatgttaagccattaaatttgggagtgttttgttttgtagaaatagatatctgaaatacccagtgacttacacatttacttcatctccatatactgaagaccgagtgttagtttctatcatacctatgcccgtcccaagatactgggccctcaggcaaggtgaggttctagttcctctaggaaaggcaaagaaatttaagggatatggggtgttaaaattagacaagtgaagatgcagttggtataagaaaattcatatcaactatcagaaggctgcttttgcaagaggaatatagttggttttgagaattcaaggaatgggaagataaaacatgttgagaatccacatatgaataaatatatttaacttcagtgtgatgaagctttctttacaggtgcttcacaaaggggctttggctttccaccttgttgagataygtgactgttgtggaggtgtgcttcttggtcttccttcaagaaagagcttgttcttcagctatgaggaatacagatagatgacaggtcttggctcccaaacctttagaatcctctgcaggattcaagctaaggtcatacttttccagatcatctcccagccaatgactgagcatgatggggtactagggacctgaccatttcttccaatgtaggattcacttgaccagttgtctttttggcagagtgccacatgggttagtcaagacagtgtggaatttttattgcattccctgcattgttctccatgtccaattcttcttaccctcttttttccccccacaaatgtcagatctgccttgtggtctgaaggctttctctgcataaccctttttcattcccctttacctttcctggtgttactcccagcaatctcgtacttctaactctggctcagcatctgcttctgagcaaggtacagttgagagaactaaaatggcaaatctatcagattaatatgatctgtagtttgtttgcttttaggtagagttggataatcattttacaacaattctaagaaaacttagtgtgttttactgcatgagatgccttttgaagtagagaagacatctgtctaaatcaccaactttatactttgggaaatctgtgttttttgccgaattgcaaaattgcattcgtcttatagtccttaaaatttattttacttcctaatatttgtaactacacagagtcatttgaatctgctaaacatagcacaaaaggtggatatacatcagtatttagtaaaagacatctatttaaattaagcaccttgcaacatgtattcagctatgaggaattttccgagcaagtagcattaacattgaaaattattatagagcttatggggggaggagccaagatggccgaataggaacagctctggtctacagctcccagcgtgagcgacgcagaagatgggtgatttctgcattttcgtctgaggtactgggttcatctyactagggagtgccagacagtgggcrcaagtcaatgggtgcgcgcaccatgcacgagccgaagcagggcgaggcattgcctcactcgggaagcgcaaagagtcagggagttccctttcctagtcaaagaaaggggtgacagatggcacctggaaaatcgggtcacttccacccgaatacagcgcttttccgacgggcttaaaaaacgccgcaccaggagattatatcccgcacctggctcggagggtcctacgcccatggagtctcactgattgctagcacagcagtctgagatcaaactgcaaggtggcagcgaggcttggggaggggcgcccgccattgcccaggcttgcttaggtaaacagagcagccgggaagctccaactgggtggagcccaccacagctcaaggaggcctgcctgcctctggaggctccacctctgggggcagggcacacacaaacaaaaagaccgcagtaacctctgcagacttaaatgtccctgtctgacagctttgaagagagcagtgtttctcccagcacgcagctggagatctgagaacgggcagactgcctcctcaagtgggtccctgacccctgacccccgagcagcctaactgggaggcaccccccagcaggggcagactgacacctcacagggctgggtactccaacagacctgcagctgagggtcctgtcagatagaaggaaaactaaaacagaaaggacatccacaccaaaaacccatctgtatatcaccatcatcaaagaccaaaagtagataaaaccacmaagatggggaaaaaacagagcagaaaaactggaaactctaaaamgcagagcgcctctcctcctccaaaggaacataattcatcaccagcaacggaacaaagctggacggagaatgactttgacgagctgagagaagaaggcttcagatgatcaaattactccgagctacaggaggaaattcaaaccaaaggcaaagaagttgaaaactttgagaaaagtttagaagaatgtataactagaataaccaatacagagaagtgcttaaaggagctgatggagctgaagaccaaggctcgagaactacgtgaagaatgcagaagcctcaggagccgatgcgatcaactggaagaaagggtatcagcgatggaagatgaagtgaatgaaatgaagcaagaagggaactttagagaaaaaagaataaaaagaaacgagcaaagcctccaagaaatatgggactacgtgtaaagacgaaatctacgtctgattggtgtaactgaaagtgatggggagaatggaaccaagttggaaaacactctgcaggatgtcatccaggagaacttccccaatctagcaaggcaggccaacattcagattcagaaatacagagaacgccacaaagctactcctcgagaagagcaactccaagacacataattgtcagattcattgaagttgaaatgaaggaaaatatgttaagggcagccagagagaaaggtcgggttacccacaaagggaagcccatcagactgacagcagatctctcagcagaaattctacaagccagaagagagtgggggccaatattcaacattcttaaagaaaagaattttcaacccagaatttcatatccagccaaactaagctttataagtgagggagaaataaaatactttacagacaagcaaatgctgagagattttgtcaccaccaggcctgccctaaaagtgctcctgaaggaagtgccaaacatggaaaggaacaactgataccagccgctgcaaaatcatgccaaaatgtaaagaccatcgagactaggaagaaactgcatgaactaatgagcaaaataaccagctaacatcataatgacaggatcaaattcacacataacaatattacctttaaatgtaactggactaaatgctccaattaaaagacacagactggcaaattggataaagagtcatgacccatcagtgtgctgtattcaggaaacccatctcacatgcagagacacacgtaggctcaaaataaaaggatagaggaagatctacgaagcaaatggaaaacaaaaaaaggcaggggttgcaatcctagtctctgataaaacagactttaaaccaacaaagatcaaaagagacaaagaaggccattacataatgggaaagggatcaattcaacaagaagagctaactatcctaaatatatatgcacccaaaataggagcacccagattcataaggcaagtcctgagcgacctacaaagagacttagactcccacacrwtaataatgggagactttaacaccccactgtcaacattagacagatcaaygagacagaaagttagcaaggatatccaggagttggactcagctctgcaccaagcggacctaatagacatctacagaactctccaccccatatcaacagaatatacatttttttcagcaccacaccacacctattccaaaattgaccacatacttggaagtaaagstctcctcagcaaatgtaaaagaacagaaattataacaaactgtctctcagaccacagtgcaatcaaactagaactcaggatgaagaaactcactcaaaaccgctcaactacatggaaactgaacaacctgctcctgaatgactactgggtatataacgaaatgaaggcagaaataaagatgttctttgaaaccaacgagaacaaagacacaacataccagaatctctgggatgcattcaaagcagtgtgtagagggaaatttatagcactaaatgcccacaagaggaagcaggaaagatccaaaattgacaccctaacatcacaattaaaagaaccagaaaagcaagagcaaacacattcaaaagctagcagaaggcaagaaataactaaaatcagagcagaactgaaggaaatagagacacaaaaaacccttcaaaaaattaatgaatccaggagctggttttttgaaaggatcaacaaaattgatagaccgctagcaagact

SEQ ID NO: 1344 - DNA, 935 bp, Homo sapiens
cagaccgagatacgtggtggtgacccggtgaagctgatgcagagtctagtggttggagacactgcagagctgaggccaaaccagaggacactgttgctgtttaccaatgaggctggaggcaccttagatgacttgattgtgaccagcacttctgaggggcacctayatgtgatgtccaacactggctgctgggaaaaagacttggccttcatgcaggacaaggtcagagaacttyagaggcagggcagagatgtgggyctggaggtagtggatactgccctgctagccctgaaagggccccctgtggcccaggtgctacaggccagcacggcagctgacctgaggaaactgccttcatgactagtgctgtgatggaggtgtttgacgtgtctggccgccaccttacacactgtggctgcacaggagagaatggtgtggacatcttggtgccagcagcgggggcagttcacccsgcatcagctcttctggaaaacccagaggcaaagctggcagtgctggcagcttgcgcctggaggcaggcctccggctgtacaggagtgacactgatgaacacactacccctgtggagggcagcctcagttggacattggggaagtgccactgagctgctctcgacttccctggagccaaggtcattgttccccagctgaagggaaagtgcagtggaggcgtgtggggttgatgtgtgagggggccctgatgcaggcacacagtcccacctgagcatggagggcccatgattggtactgtgaccagtggctgtcccttgccctacctgaagaagactgtggcaatgagttacatgccctgccagtagtcagccagggataatgctgctggtagaggtgcggcagaagcagcagatgggcgcagtcagcaagatgccctttgcgcccatgaactgctctaccctc

SEQ ID NO: 1345 - DNA, 721 bp, Homo sapiens
aaagcagtctttgcagacgctgccactgccgggagcaccctactatcagccatggtcaaccccaccgtgtacttccacattgccattgacacggagcccttgggccgcgtctccttcgagctgtttgcagacgaggttccaaagacagcagaaaactttcgtgctctgagcgctggaaagaaaggatttgggtgtgagggttcctgctttcacagaattattacagggtttatatgtcagggtggtgacttcacatgccatatggcactggtggcaagtccatctacaggtagaaatttgatgaggagaacttcatcctgaagcatagaggtactggcatcttgcccatggcaaatgctggacccaacacaaatggttcccagtttttcatgtgccctgccaagactcagtggttggatggcaagcatgtggtctttggcatggtgaaggcatgaatatcrtggaggccatggaacactttgggtccaggaatgataaggccagcaagaagatcaccattgctgactgtggacagctctactaagtttgacttgtgttttctcttaaccaccagaccattccttctgtagctcaggagactaccyctccaccccatttgctcgcagtatcctagaatctttgtattgtcgctgcaattccctttgggttccatgttttccttgttccctagctggattgcagagttaagtttatgattatg

SEQ ID NO: 1346 - DNA, 586 bp, Homo sapiens
aggaytttgacaaggactcygtcgtcccggatgatagtgctcaggttaatgccagtgggagggcggcgcccaatagtaacttcctttggaggttgtagtaccgcccccagagccaattttccacttccgcttccggcgctgcggcagtccagatcaaaaatggcggtagttggtgtgtcctcggtttctcggctgctgggtcggtcccgcccacagctggggcggcctatgtcgagtggcgcccatggcgaagagggctcagctcgcatgtggaagactctcaccttcttcgtcgcgctccccggggtggcagtcagcrtgctgaatgtgtacctgaagtcgcaccacggagagcacgagagacccgagttcatcgcctacccccatctccgcatcaggaccaagccgtttccctggggagatggtaaccatactctattccataaccctcatgtgaatccacttccaactggctacgaagatgaataaagagaatctggaccactacccgggcaccagggaccacaaagctcaccttctttacttgtatcaaatgatgactggtatactggtctcccatcccttt

SEQ ID NO: 1347 - DNA, 693 bp, Homo sapiens
aggaytttgacaaggactcygtcgtcccggatgatagtgctcaggttaatgccagtgggagggcggcgcccaatagtaacttcctttggaggttgtagtaccgcccccagagccaattttccacttccgcttccggcgctgcggcagtccagatcaaaaatggcggtagttggtgtgtcctcggtttctcggctgctgggtcggtcccgcccacagctggggcggcctatgtcgagtggcgcccatggcgaagagggctcagctcgcatgtggaagactctcaccttcttcgtcgcgctccccggggtggcagtcagcrtgctgaatgtgtacctgaagtcgcaccacggagagcacgagagacccgagttcatcgcctacccccatctccgcatcaggaccaagccgtttccctggggagatggtaaccatactctattccataaccctcatgtgaatccacttccaactggctacgaagatgaataaagagaatctggaccactacccgggcaccagggaccacagcactggtttggaccgttactctgcacatggaccagaaaaagtatatgggaccttaagctcaccttctttacttgtatcaaatgatgactggtatactggtctcccatccctttgcttgtggcaggagatggcttaaataaataacttaaayttagattggtcatg

SEQ ID NO: 1348 - DNA, 1794 bp, Homo sapiens
atggaggccgccgtccaattcttggtccagagccgggacgtggtctttggcctcraggccatcgaggctcagtacaagtaccagacaacgcgcgtcagaagcaagggcggcgtcctcgaggtgcacctcaagtccacgcacttcaccttccggaccgcccggcccgcatgtgcccaggctacgggtcatgcttgtcgcctgcggtggtaacaacggttccacgctcaccgccgcggtgctggccaacctactgcgtctgtcctggcccacgcgcaggggtcgcaagggggccaactactacggttcactgtctcaggtgggcaccgtgagcccggtcttggacgccaagggccaggaggtgttcgcgcccttccgcggctgctgcccatggtggcgcccaacgacctcgtgttcgatggctgggacatcttgtcgccgaacctggccgaggcgatgcggctcgcgaaggtgctgattgagggctgcaggagcaactgtggccgcacatggaggccctgcagccccggcctttggtatacatcccacagttcatcgcggccaaccagaacgcgcgcgcggacagcctcatcccgggcacgcgcgcgcagcagctagagcagatccgccgggacatccgatgacttccggtctagcgcagggctggacaaagtcatagcgctgtgaacggcgaacatggagcgcttctgtgaggtggtcccaggtctcaacaacacggccgagaccctgctgcgcaccatcgagcttggtctgaaggtgtcgccctccacgctcttcgccgtggccagcatcctggagggctgtgccttcctctgggtccccacagaacactctggtgcccggagcccttgagctcgcgtggcagcgccaggtttacgtgggcagagatgacttcaagtcaggccagaacaaagtcaagtccgtgctcgtggacttcctcatcggctatggcctcaagaccaagtcgattgtgaattataaccacctggggaacaacgaccggcagaacctgttggcgccatcgctgttccctctgaggcggtgtccaagagcaacgtagtggacgacatggcgcaaagacacccagtgctctacgcgcctggcgaggagcctgaccgctgcgtggtcatcaagtacatgccgtacgcgggtgaccccaagcgtgcgctggatgagtctaccttggagctgatgctgggcgtaaccaacacgctggtactgcacaacacgtgcgaggactcgctgctggccgcccccatcatcctggacctggcgctggtgaccgagctgtgccactgcgtgagcttctgcaccaatgacaacaccgagccacagaccttccaccccatgccgtccctgcttagcatctcttcaaggcgccgctggtgccgccgggcagcccggtggtcagtgcgcttttccgccagctcagctgcatcgagaacatccacagggcctgtgtggggcttccgccacagaaccacgtggtcctggtgcacaagatggagctcccagtgcctggcctcaggtgagtcggacccgtggctgccgcctgccctgtgtcgaacaagaaaggaccggtacccgctgccaccaatggctgtaccagtgataccaatggacacccacaagtggaggaaccccagatgcacaccacctgaggccctggtcacacagcttcccggcctttccttgctgccccccaggacccaacctttccaggcccccacaaagacagtaaagccggtgccactctcaaaaaaaaaaaaaaattag

SEQ ID NO: 1349 - DNA, 2690 bp, Homo sapiens
actctttcttcggctcgcgagctgagaggagcaggtagaggggcagaggcgggactgtcgtctgggggagccgcccaggaggctcctcaggccgaccccagaccctggctggccaggatgaagtatctccggcaccggcggcccaatgccaccctcattctggccatcggcgctttcaccctcctcctcttcagtctgctagtgtcaccacccacctgcaaggtccaggagcagccaccggcgatccccgaggccctggcctggcccactccacccacccgcccagccccggccccgtgccatgccaacacctctatggtcacccacccggacttcgccacgcagccgcagcacgttcagaacttcctcctgtacagacactgccgccactttcccctgctgcaggacgtgcccccctctaagtgcgcgcagccggtcttcctgctgctggtgatcaagtcctcccctagcaactatgtgcgccgcgagctgctgcggcgcacgtggggccgcgagcgcaaggtwcggggtttgcagctgcgcctcctcttcctggtgggcacagcctccaacccgcacgaggcccgcaaggtcaaccggctgctggagctggaggcacagactcacggagacatcctgcagtgggacttccacgactccttcttcaacctcacgctcaagcaggtcctgttcttacagtggcaggagacaaggtgcgccaacgccagcttcgtgctcaacggggatgatgacgtctttgcacacacagacaacatggtcttctacctgcaggaccatgaccctggccgccacctcttcgtggggcaactgatccaaaacgtgggccccatccgggctttttggagcaagtactatgtgccagaggtggtgactcagaatgagcggtacccaccctattgtgggggtggtggcttcttgctgtcccgcttcacggccgctgccctgcgccgtgctgcccatgtcttggacatcttccccattgatgatgtcttcctgggtatgtgtctggagcttgagggactgaagcctgcctcccacagcggcatccgcacgtctggcgtgcgggctccatcgcaacrcctgtcctcctttgacccctgcttctaccgagacctgctgctggtgcaccgcttcctaccttatgagatgctgctcatgtgggatgcgctgaaccagcccaacctcacctgcggcaatcagacacagatctactgagtcagcatcagggtccccagcctctgggctcctgtttccataggaaggggcgacaccttcctcccaggaagctgagacctttgtggtctgagcataagggagtgccagggaaggtttgaggtttgatgagtgaatattctggctggcgaactcctacacatccttcaaaacccacctggtactgttccagcatcttccctggatggctggaggaactccagaaaatatscatcttctttttgtggctgctaatggcagaagtgcctgtgctagagttccaactgtggatgcatccgtcccgtttgagtcaaagtcttacttccctgctctcacctactcacagacgggatgctaagcagtgcacctgcagtggtttaatggcagataagctccgtctgcagttccaggccagccagaaactcctgtgtccacatagagctgacgtgagaaatatctttcagcccaggagagaggggtcctgatcttaaccctttcctgggtctcagacaactcagaaggttggggggataccagagaggtggtggaataggaccgccccctccttacttgtgggatcaaatgctgtaatggtggaggtgtgggcagaggagggaggcaagtgtcctttgaaagttgtgagagctcagagtttctggggtcctcattaggagcccccatccctgtgttccccaagaattcagagaacagcactggggctggaatgatctttaatgggcccaaggccaacaggcatatgcctcactactgcctggagaagggagagattcaggtcctccagcagcctccctcacccagtatgttttacagattacggggggaccgggtgagccagtgaccccctgyagcccccagcttcaggcctcagtgtctgccagtcaagcttcacaggcattgtgatggggcagccttggggaatataaaattttgtgaagacttggagatctttttttttttttaagcaaatttacaagtttcaacagacaagtccacattcatccctaaaagtctcattttccagtagaaaatatacactggtaaaaacggggcatggggccgtggctcagggctgtaattctagcacattgggagaccaaagtgggaggatcacttgagcccaggagttctggatcctgtctctgcacaaaataaaaaattactcaggcgtggtggtgctcacatgcctgtagtcccagctatacttgggaggctgaggcgagaggatcgcttgagcccaggagttggaggctgcagtgaaccatgattgcgccactgtactccactgggcggcaataagaagacaaaaacataaaacaggacatgtgtgaggcaaaagctgcaggaatttctatcaggcagatctgacctcatcccacccaccccctgctcagatacccttcatagctccttattgctttcagctcataaccccacat

SEQ ID NO: 1350 - DNA, 1149 bp, Homo sapiens
ccgtgggaccctggaggctttgaaacaggacaatgggctggctagacaggtgcaggctatggccaggaaaccccccaaatacaacggaattgaaagactcctgttggaatgctggcccccgcaggaaccaccatgatcccgattcacccaggagggccaccctcccgtccagccccccaagagcagcagggctccctcttgcccttgaacctcctctgccctgacaggcggcgtcacccagggctcaggatcctggcttccagcattccagaggtgactcaccaaccaaagtgtcactcaccaaccgaaggaccttgcacaaatgcaccagcctccccatgcctcagtctccccatctgtaaatgagtgttatgacggtactgtcataaactccctggaggatccaggtggtcacgttactgttggtgacattgtccctctgttggctgcagacgcatcttctctccagactgccgatcccagaaagccaggtgatcaccattaaccccgagctgcctgtggaggaggcggctgaggactacgccaagaagctgagacaggcattccaaggggactccatcccggttttcgacctgctgatcctgggggtgggccccgatggtcacacctgctcactcttcccagaccaccccctcctacaggagcgggagaagattgtggctcccatcagtgactccccgaagccaccgccacagcgtgtgaccctcacrctacctgtcctgaatgcagcacgaactgtcatctttgtggcaactggagaaggcaaggcagctgttctgaagcgcattttggaggaccaggaggaaaacccgctgcccgccgccctggtccagccccacaccgggaaactgtgctggttcttggacgaggcggccgcccgcctcctgaccgtgcccttcgagaagcattccactttgtagctggccagagggacgccgcagctgggaccaggcacgcggcccatggggctgggcccctgctggccgccactctccgggctctcctttcaaaaagccacgtcgtgctgctgctggaagccaacagcctccggccagcagccctacccggggctcaacacacaggctgtggctctggacatccggatattaaaaggagcgttgctggaag

SEQ ID NO: 1351 - DNA, 1036 bp, Homo sapiens
actagcgacggccgtagggagcgcttcctcctccccgccgccgccctcgccatggccgcgccggccccgggcctcatctcggtgttctcgagttcccaggagctgggtgcggcgctagcgcagctggtggcccagcgcgcagcatgctgcctggcaggggcccgcgcccgtttcgcgctcggcctgtcgggcgggagcctcgtctcgatgctagcccgcgagctacccgccgccgtcgcccctgccgggccagctagcttagcgcgctggacgctgggcttctgcgacgagcgcctcgtgcccttcgatcacgccgagagcacgtacggcctctaccggacgcatcttctctccagactgccgatcccagaaagccaggtgatcaccattaaccccgagctgcctgtggaggaggcggctgaggactacgccaagaagctgagacaggcattccaaggggactccatcccggttttcgacctgctgatcctgggggtgggccccgatggtcacacctgctcactcttcccagaccaccccctcctacaggagcgggagaagattgtggctcccatcagtgactccccgaagccaccgccacagcgtgtgaccctcacrctacctgtcctgaatgcagcacgaactgtcatctttgtggcaactggagaaggcaaggcagctgttctgaagcgcattttggaggaccaggaggaaaacccgctgcccgccgccctggtccagccccacaccgggaaactgtgctggttcttggacgaggcggccgcccgcctcctgaccgtgcccttcgagaagcattccactttgtagctggccagagggacgccgcagctgggaccaggcacgcggcccatggggctgggcccctgctggccgccactctccgggctctcctttcaaaaagccacgtcgtgctgctgctggaagccaacagcctccggccagcagccctacccggggctcaacacacaggctgtggctctggacatccggatattaaaaggagcgttgctggaag

SEQ ID NO: 1352 - DNA, 1477 bp, Homo sapiens
ctatgcaatacacctgctttatgcacttgagcagggaagaaatccacaaggactcaccagtctcctggtctgcagagaagacagaatcaacatgagcacagcaggaaaagtaatcaaatgcaaagcagctgtgctatgggagttaaagaaacccttttccattgaggaggtggaggttgcacctcctaaggcccatgaagttcgtattaagatggtggctgtaggaatctgtggcacagatgaccacgtggttagtggtaccatggtgaccccacttcctgtgattttaggccatgaggcagccggcatcgtggagartgttggagaaggggtgactacagtcaaaccaggtgataaagtcatcccactcgctattcctcagtgtggaaaatgcagaatttgtaaaaacccggagagcaactaytgcttgaaaaacgatgtaagcaatcctcaggggaccctgcaggatggcaccagcaggttcacctgcaggaggaagcccatccaccacttccttggcatcagcaccttctcacagtacacagtggtggatgaaaatgcagtagccaaaattgatgcagcctcgcctctagagaaagtctgtctcattggctgtggattttcaactggttatgggtctgcagtcaatgttgccaaggtcaccccaggctctacctgtgctgtgtttggcctgggaggggtcggcctatctgytattatgggctgtaaagcagctggrgcagccagaatcattgcrgtggacatcaacaaggacaaatttgcaaaggccaaagwgttgggtgccactgaatgcatcaaccctcaagactacaagaaacccatccaggaggtgctaaaggaaatgactgatggaggtgtggatttttcatttgaagtcatcggtcrgcttgacaccatgatggcttccctgttatgttgtcatgaggcatgtggcacaagtgtcatcgtaggggtacctcctgattcccaaaacctctcaatgaaccctatgctgctactgactggacgtacctggaagggagctattcttggtggctttaaaagtaaagaatgtgtcccaaaacttgtggctgattttatggctaagaagttttcattggatgcattaataacccatgttttaccttttgaaaaaataaatgaaggatttgacctgcttcactctgggaaaagtatccgtaccattctgatgttttgagacaatacagatgttttcccttgtggcagtcttcagcctcctctaccctacatgatctggagcaacagctgggaaatatcattaattctgctcatcacagattttatcaataaattacatttgggggctttccaaagaaatggaaattgatgtaaaattatttttcaagcaaatgtttaaaatccaaatgagaactaaataaagtgttgaacatcagctggggaattgaagccaataaaccttccttcttaaccattc

SEQ ID NO: 1353 - DNA, 2085 bp, Homo sapiens
tgtattactctgtattgttttaataaacacttggtatttctacatcatctcagtaattacatgtttaagcatctgccaagaacattttcaggataatttaaaatacatcaatacatcatcaaaacacttttggaacattcagatggtttgtagtttggttctcacagagaagactggatggtacatctttgtttttggattgggcttcttaggttatttcccaactcccttcacaggaggaatgtaagcaaacattttgatctctcacacatgctcttcttggcaggattccaggctccacagccgctgcaagaccagcaagtatttccgctccctcgacatcttgggcttcattatttaacccccaaaatgaaggatttgaactgaagataatttctgcaagttacagtattctttgtcaggcccatgtaaattatggacctctgcggaaaagaagacagttggatctcttgcagggatgctggtctgtccttctccaggctttggagtcacatcttcgcactgctcatcattacctctgttgcaaacatggccatctargatctgcgggtaggcacatctccgtctttgatctcagcctggaaaagctatgcaatacacctgctttatgcacttgagcagggaagaaatccacaaggactcaccagtctcctggtctgcagagaagacagaatcaacatgagcacagcaggaaaagtaatcaaatgcaaagcagctgtgctatgggagttaaagaaacccttttccattgaggaggtggaggttgcacctcctaaggcccatgaagttcgtattaagatggtggctgtaggaatctgtggcacagatgaccacgtggttagtggtaccatggtgaccccacttcctgtgattttaggccatgaggcagccggcatcgtggagartgttggagaaggggtgactacagtcaaaccaggtgataaagtcatcccactcgctattcctcagtgtggaaaatgcagaatttgtaaaaacccggagagcaactaytgcttgaaaaacgatgtaagcaatcctcaggggaccctgcaggatggcaccagcaggttcacctgcaggaggaagcccatccaccacttccttggcatcagcaccttctcacagtacacagtggtggatgaaaatgcagtagccaaaattgatgcagcctcgcctctagagaaagtctgtctcattggctgtggattttcaactggttatgggtctgcagtcaatgttgccaaggtcaccccaggctctacctgtgctgtgtttggcctgggaggggtcggcctatctgytattatgggctgtaaagcagctggrgcagccagaatcattgcrgtggacatcaacaaggacaaatttgcaaaggccaaagwgttgggtgccactgaatgcatcaaccctcaagactacaagaaacccatccaggaggtgctaaaggaaatgactgatggaggtgtggatttttcatttgaagtcatcggtcrgcttgacaccatgatggcttccctgttatgttgtcatgaggcatgtggcacaagtgtcatcgtaggggtacctcctgattcccaaaacctctcaatgaaccctatgctgctactgactggacgtacctggaagggagctattcttggtggctttaaaagtaaagaatgtgtcccaaaacttgtggctgattttatggctaagaagttttcattggatgcattaataacccatgttttaccttttgaaaaaataaatgaaggatttgacctgcttcactctgggaaaagtatccgtaccattctgatgttttgagacaatacagatgttttcccttgtggcagtcttcagcctcctctaccctacatgatctggagcaacagctgggaaatatcattaattctgctcatcacagattttatcaataaattacatttgggggctttccaaagaaatggaaattgatgtaaaattatttttcaagcaaatgtttaaaatccaaatgagaactaaataaagtgttgaacatcagctggggaattgaagccaataaaccttccttcttaaccattc

SEQ ID NO: 1354 - DNA, 2115 bp, Homo sapiens
tgtattactctgtattgttttaataaacacttggtatttctacatcatctcagtaattacatgtttaagcatctgccaagaacattttcaggataatttaaaatacatcaatacatcatcaaaacacttttggaacattcagatggtttgtagtttggttctcacagagaagactggatggtacatctttgtttttggattgggcttcttaggttatttcccaactcccttcacaggaggaatgtaagcaaacattttgatctctcacacatgctcttcttggcaggattccaggctccacagccgctgcaagaccagcaagtatttccgctccctcgacatcttgggcttcattatttaacccccaaaatgaaggatttgaactgaagataatttctgcaagttacagtattctttgtcaggcccatgtaaattatggacctctgcggaaaagaagacagttggatctcttgcagggatgctggtctgtccttctccaggctttggagtcacatcttcgcactgctcatcattacctctgttgcaaacatggccatctargatctgcgggtaggcacatctccgtctttgatctcagcctggaaaagctatgcaatacacctgctttatgcacttgagcagggaagaaatccacaaggactcaccagtctcctggtctgcagagaagacagaatcaacatgagcacagcaggaaaagtaatcaaatgcaaagcagctgtgctatgggagttaaagaaacccttttccattgaggaggtggaggttgcacctcctaaggcccatgaagttcgtattaagatggtggctgtaggaatctgtggcacagatgaccacgtggttagtggtaccatggtgaccccacttcctgtgattttaggccatgaggcagccggcatcgtggagartgttggagaaggggtgactacagtcaaaccaggtgataaagtcatcccactcgctattcctcagtgtggaaaatgcagaatttgtaaaaacccggagagcaactaytgcttgaaaaacgatgtaagcaatcctcaggggaccctgcaggatggcaccagcaggttcacctgcaggaggaagcccatccaccacttccttggcatcagcaccttctcacagtacacagtggtggatgaaaatgcagtagccaaaattgatgcagcctcgcctctagagaaagtctgtctcattggctgtggattttcaactggttatgggtctgcagtcaatgttgccaaggtcaccccaggctctacctgtgctgtgtttggcctgggaggggtcggcctatctgytattatgggctgtaaagcagctggrgcagccagaatcattgcrgtggacatcaacaaggacaaatttgcaaaggccaaagwgttgggtgccactgaatgcatcaaccctcaagactacaagaaacccatccaggaggtgctaaaggaaatgactgatggaggtgtggatttttcatttgaagtcatcggtcrgcttgacaccatggtatgtaccatgacatgccctgaratttctatggcttccctgttatgttgtcatgaggcatgtggcacaagtgtcatcgtaggggtacctcctgattcccaaaacctctcaatgaaccctatgctgctactgactggacgtacctggaagggagctattcttggtggctttaaaagtaaagaatgtgtcccaaaacttgtggctgattttatggctaagaagttttcattggatgcattaataacccatgttttaccttttgaaaaaataaatgaaggatttgacctgcttcactctgggaaaagtatccgtaccattctgatgttttgagacaatacagatgttttcccttgtggcagtcttcagcctcctctaccctacatgatctggagcaacagctgggaaatatcattaattctgctcatcacagattttatcaataaattacatttgggggctttccaaagaaatggaaattgatgtaaaattatttttcaagcaaatgtttaaaatccaaatgagaactaaataaagtgttgaacatcagctggggaattgaagccaataaaccttccttcttaaccattc

SEQ ID NO: 1355 - DNA, 1579 bp, Homo sapiens
atgcactcaagcagagaagaaatccacaagtactcaccarcctcctggtctgcagagaagacagaatcaatatgagcacagcaggaaaaatggagtatctttctattgcccaggttggagtgcaatggtgatctcggctcactgcaacctctgcctcccgggttcaagtgattctcctgcctcagcctcacaagtagctgagtttacaggtaatcaaatgcaaagcagctgtgctatgggagttaaagaaacccttttccattgaggaggtagaggttgcacctcctaaggctcatgaagttcgcattaagatggtggctkcaggaatctgtcgttcagatgagcatgtggttagtggcaacctggtgaccccccttcctgtgattttaggccatgaggcagccggcatcgtggaaagtgttggagaaggggtgactacagtcaaaccaggtgataaagtcatcccgctctttactcctcagtgtggaaaatgcagaatttgtaaaaacccagaaagcaactactgcttgaaaaatgatctrggcaatcctcgggggaccctrcaggatggcaccaggaggttcacctgcagcgggaagcccatccaccacttcgtcggcgtcagcaccttctcccagtacacagtggtggatgagaatgcagtggccaaaattgatgcagcctcgcccctggagaaagtctgcctcattggctgtggattttcgactggttatgggtctgcagtcaaagttgccaaggtcaccccagggtctacctgtgctgtgtttggcctgggaggggtcggcctatctgttgttatgggctgtaaagcagctggagcagccagaatcattgctgtggacatcaacaaggacaaatttgcaaaggctaaagagttgggtgccactgaatgcatcaaccctcaagactacaagaaacccattcaggaagtgctaaaggaaatgactgatggaggtgtggatttttcgtttgaagtcatcggtcggcttgacaccatgatggcttccctgttatgttgtcatgaggcatgtggcacaagtgtcattgtaggggtacctcctgattcccagaacctctcaataaaccctatgctgctactgactggacgcacgtggdaaggagctatttttggaggctttaagagtaaagaatctgtccccaaacttgtggctgactttatggctaagaagttttcacrggatgcattaataacaaatattttaccttttgaaaaaataaatgaaggatttgacctgcttcgctctggaaagagtatccgtaccgtcctgacgttttgaaacaatacagatgccttcccttgtagcagttttcagcctcctctaccctacatgatctggagcaacagctaggaaatatcattaattctgctcttcagagatgttaaaaataaattacacgtgggagctttccaaagaaatggaaattgatgggaaattatttgtcaagcaaatgtttaaaatccaaatgagaactaaataaagtgttgaacatcaactggggaattgaagccaataaaccttccttcttaaccattcaa

SEQ ID NO: 1356 - DNA, 1459 bp, Homo sapiens
atgcactcaagcagagaagaaatccacaagtactcaccarcctcctggtctgcagagaagacagaatcaatatgagcacagcaggaaaagtaatcaaatgcaaagcagctgtgctatgggagttaaagaaacccttttccattgaggaggtagaggttgcacctcctaaggctcatgaagttcgcattaagatggtggctgcaggaatctgtcgttcagatgagcatgtggttagtggcaacctggtgaccccccttcctgtgattttaggccatgaggcagccggcatcgtggaaagtgttkgagaaggggtgactacagtcaaaccaggtgataaagtcatcccgctctttactcctcagtgtggaaaatgcagaatttgyaaaaacccagaaagcaactactgcttgaaaaatgatctaggcaatcctcgggggaccctgcaggatggcaccaggaggttcacctgcagcgggaagcccatccaccacttcgtcggcgtcagcaccttctcccagtacacrgtggtggatgagaatgcagtrgccaaaattgatgcagcctcgcccctggagaaagtctgcctcattggctgtggattttcgactggttatgggtctgcagtcaaagttgccaaggtcaccccagggtctacctgtgctgtgtttggcctgggaggggtcggcctatctgttgttatgggctgtaaagcagctggagcagccagaatcattgctgtggacatcaayaaggacaaatttgcaaaggctaaagagttgggtgccactgaatgcatcaaccctcaagactacaagaaacccattcaggaagtgctaaaggaaatgactgatggaggtgtggatttttcgtttgaagtcatcggtcrgcttgacaccatgatggcttccctgttatgttgtcatgaggcatgtggcacaagtgtcattgtaggggtacctcctgattcccagaacctctcaataaaccctatgctgctactgactggacgcacgtggaaaggagctatttttggaggctttaagagtaaagaatctgtcccsaaacttgtggctgactttatggctaagaagttttcactggatgcattaataacaaatdttttaccttttgaaaaaataaatgaaggatttgacctgcttcgctctggaaagagtatccgtaccgtcctgacgttttgaarcaatacagatgccttcccttgtagcagttttcagcctcctctaccctacatgatctggagcaacagctaggaaatatcattaattctgctcttcagagatgttaaaaataaattacacgtgggagctttccaaagaaatggaaattgatgggaaattatttgtcaagcaaatgtttaaaatccaaatgagaactaaataaagtgttgaacatcaactggggaattgaagccaataaaccttccttcttaaccattcaa

SEQ ID NO: 1357 - DNA, 3671 bp, Homo sapiens
aatctcgtggaacagtgtcatagctgcaaagtggaattctatcctcaaatttcataggaaatagtcgaactgtacaatgaaagattatgcaaatcttcaaggagcatctaatcaatcaccgcggtgtgagcggaatgcagcccatcgctgaattagcttctgttggaatgtattcatgtgtaacatcccactgactggatgacatcacaacagctccaggtccttgaaagtcttgaggatgattagctgaaggaattggctgtttctgccaatcataatccggcaaagctgcctttatagttctggagatgtgagagagagggagggagggaaagaccgactacagctaaacaagaggcacagcagcactagcaacagcagagcaggagcagctggtattccggtgattaaatagttctcatagcctttttgctgtactcggtctgctccctggtgtaattctcgtgtccaagaaggaagctgcattttaacggtgtgctgaacagaggtttgaatcattccagctggctgcttgttttgaaaaggacaatgtgtgtataaataaaaggactctgctggaagagttcagacactaagactggagctagagagtgctcttggaatattgttgaggcagattgcatgaactgaaagctccttctaattaacctggagccaagtgaacctgaatactggatatctcatgttctaacacgggataaattcaagttagaaaaagacaaaatattgaaatgcttctctagattatgcttagaggattctgcagcaattctcagtattggacatattcaaaatctcctcaacgtatatccttcccatctatygccttccagctttaactcagttgtgctcccttcaaacattttacatgatttgcgatggttacatgaactctggggaagtgatatttgcaacatctcatactttattcactatggcactttaggaaacgaaattgggaaaaagcttccaaaacaytattctaaaaaatgaatcttattgtgaaacttcggagaagttttcraacattgattgttctcttagctaccttttgcttggtgagcattgtcatttctgcctattttctctactctggctacaaacaggaaatgacacttattgaaaccactgcagaagcagaatgcactgacatcaaaattctaccatataggtcaatggagctgaaaacagttaaacctattgacacatccaaaacggaccctactgtccttctcttcgtggagagccaatactctcaactcggtcaagatatcatagctattttggagtccagccgatttcagtaccacatggttattgcccctggaaagggagatatacctcctcttacagataatggcaaagggaaatatactttagttatttatgaaaatattctgaagtatgtcagcatggactcatggaatcgagagcttttagaaaaatactgtgtggaatacagtgttagtataatcggttttcataaagccaatgagaacagcttaccaagtacacaattaaaaggctttccgttaaaycttttcaataatctagctctaaaggactgttttgttaaccctcaatctcctttgctgcatattaccaaagcccccaaggttgagaaaggccctcttcctggggaagactggactattttccaatataatcattcaacctaccagcctgtacttttaackgagttacagacagaaaaatccctgtcatccttgtctagcaaaacactctttgcaacggtgattcaggatctggggcttcatgatggaattcagagagtactttttggcaacaacttgaacttttggctgcacaagctcatcttcatagatgccatctccttcttgtcagggaagaggctgacattgtccttggacaggtacatccttgtggacattgatgatatatttgttgggaaagagggaacaaggatgaatgtcaaagatgtgaaggcattactagagactcaaaatttactgcgcactcaggttgcaaattttaccttcaaccttggattttcagggaagttttaccacacagggactgaagaggaagatgaaggagatgaccttttacttcggtctgtggatgagttctggtggtttcctcacatgtggagccacatgcagccccacctcttccacaacgagtcatctttagtagagcagatgattctcaacaaggaatttgcactggaacatggaataccaatcaacatgggctatgctgtggccccacatcactcaggggtctacccggttcacattcagctgtatgcagcttggaagaaggtctggggtattcaagtcaccagcactgaagaatatccacatctgaaacctgcccggtacagaaagggcttcattcacaatagcatcatggtcctccctcgacagacttgtgggttgttcactcacactattttctacaaagaatatccaggaggaccccaagaactggataaaagtatcagaggaggtgaactttttctcacaatccttctaaacccaatcagcattttcatgacccatttatcaaactatggaaatgaccgcctagggttatatacctttgtgaacttggtcaactttgtgcagagctggaccaacctgaaattgcaaactctgcctccagtgcaactggcccaccagtattttgagctcttccctgagcagaaagaccctctatggcagaatccatgtgatgataaacgacacaaagacatctggtccagagagaaaacttgtgaccacttaccaaaatttctagtaattggtccacaaaaaacaggaacaactgcactttatttatttcttcttatgcatccttcaatcatcagcaatctccctagtccaaagacatttgaggaagttcagttctttaatggcaacaactatcacaaaggaatagactggtatatggactttttccctacaccatccaatactacaagtgactttctgtttgaaaagagtgctaattacttccattcggaagaagctccaagacgagccgcatctcttgtccccaaagccaagatcatcaccatcctcattgacccctcagacagggcataytcttggtaccagcaccaacgatcacatgaagatccagctgctctgaggttcaatttctatgaagttatttcaacaggacattgggctccatctgacttaaaaactttgcagagaagatgcctagtacctggatggtatgcagtccacatagaaagatggctaacttactttgctacttctcagttgctaattattgatggacagcagctgagatctgacccagctactgtgatggatgaagtccagaagtttctgggagttacacctcgttataattactctgaagcactaacgtttgatccccaaaagggtttttggtgtcaattactggaaggaggaaagacaaaatgccttggaaaaagcaaaggccgaaaatatccacctatggatccagagtctagaacgttcctctctaattactaccgagatcataatgtggaactatccaaactgctacacagactgggacagcctctgccatcrtggctgagacaggaactgcagaaagtgagatagcactggagacaagaactaagcctctcaagatacttttagtgt

SEQ ID NO: 1358 - DNA, 3786 bp, Homo sapiens
atttcacattcacaaaaatagaacttttacctcccgctgatcccactgacgcattctggtggcttcatgcatctggcagccttcagcaccaccatggcccccctctcagcatgagaatctcgtggaacagtgtcatagctgcaaagtggaattctatcctcaaatttcataggaaatagtcgaactgtacaatgaaagattatgcaaatcttcaaggagcatctaatcaatcaccgcggtgtgagcggaatgcagcccatcgctgaattagcttctgttggaatgtattcatgtgtaacatcccactgactggatgacatcacaacagctccaggtccttgaaagtcttgaggatgattagctgaaggaattggctgtttctgccaatcataatccggcaaagctgcctttatagttctggagatgtgagagagagggagggagggaaagaccgactacagctaaacaagaggcacagcagcactagcaacagcagagcaggagcagctggtattccggtgattaaatagttctcatagcctttttgctgtactcggtctgctccctggtgtaattctcgtgtccaagaaggaagctgcattttaacggtgtgctgaacagaggtttgaatcattccagctggctgcttgttttgaaaaggacaatgtgtgtataaataaaaggactctgctggaagagttcagacactaagactggagctagagagtgctcttggaatattgttgaggcagattgcatgaactgaaagctccttctaattaacctggagccaagtgaacctgaatactggatatctcatgttctaacacgggataaattcaagttagaaaaagacaaaatattgaaatgcttctctagattatgcttagaggattctgcagcaattctcagtattggacatattcaaaatctcctcaacgtatatccttcccatctatygccttccagctttaactcagttgtgctcccttcaaacattttacatgatttgcgatggttacatgaactctggggaagtgatatttgcaacatctcatactttattcactatggcactttaggaaacgaaattgggaaaaagcttccaaaacaytattctaaaaaatgaatcttattgtgaaacttcggagaagttttcraacattgattgttctcttagctaccttttgcttggtgagcattgtcatttctgcctattttctctactctggctacaaacaggaaatgacacttattgaaaccactgcagaagcagaatgcactgacatcaaaattctaccatataggtcaatggagctgaaaacagttaaacctattgacacatccaaaacggaccctactgtccttctcttcgtggagagccaatactctcaactcggtcaagatatcatagctattttggagtccagccgatttcagtaccacatggttattgcccctggaaagggagatatacctcctcttacagataatggcaaagggaaatatactttagttatttatgaaaatattctgaagtatgtcagcatggactcatggaatcgagagcttttagaaaaatactgtgtggaatacagtgttagtataatcggttttcataaagccaatgagaacagcttaccaagtacacaattaaaaggctttccgttaaaycttttcaataatctagctctaaaggactgttttgttaaccctcaatctcctttgctgcatattaccaaagcccccaaggttgagaaaggccctcttcctggggaagactggactattttccaatataatcattcaacctaccagcctgtacttttaackgagttacagacagaaaaatccctgtcatccttgtctagcaaaacactctttgcaacggtgattcaggatctggggcttcatgatggaattcagagagtactttttggcaacaacttgaacttttggctgcacaagctcatcttcatagatgccatctccttcttgtcagggaagaggctgacattgtccttggacaggtacatccttgtggacattgatgatatatttgttgggaaagagggaacaaggatgaatgtcaaagatgtgaaggcattactagagactcaaaatttactgcgcactcaggttgcaaattttaccttcaaccttggattttcagggaagttttaccacacagggactgaagaggaagatgaaggagatgaccttttacttcggtctgtggatgagttctggtggtttcctcacatgtggagccacatgcagccccacctcttccacaacgagtcatctttagtagagcagatgattctcaacaaggaatttgcactggaacatggaataccaatcaacatgggctatgctgtggccccacatcactcaggggtctacccggttcacattcagctgtatgcagcttggaagaaggtctggggtattcaagtcaccagcactgaagaatatccacatctgaaacctgcccggtacagaaagggcttcattcacaatagcatcatggtcctccctcgacagacttgtgggttgttcactcacactattttctacaaagaatatccaggaggaccccaagaactggataaaagtatcagaggaggtgaactttttctcacaatccttctaaacccaatcagcattttcatgacccatttatcaaactatggaaatgaccgcctagggttatatacctttgtgaacttggtcaactttgtgcagagctggaccaacctgaaattgcaaactctgcctccagtgcaactggcccaccagtattttgagctcttccctgagcagaaagaccctctatggcagaatccatgtgatgataaacgacacaaagacatctggtccagagagaaaacttgtgaccacttaccaaaatttctagtaattggtccacaaaaaacaggaacaactgcactttatttatttcttcttatgcatccttcaatcatcagcaatctccctagtccaaagacatttgaggaagttcagttctttaatggcaacaactatcacaaaggaatagactggtatatggactttttccctacaccatccaatactacaagtgactttctgtttgaaaagagtgctaattacttccattcggaagaagctccaagacgagccgcatctcttgtccccaaagccaagatcatcaccatcctcattgacccctcagacagggcataytcttggtaccagcaccaacgatcacatgaagatccagctgctctgaggttcaatttctatgaagttatttcaacaggacattgggctccatctgacttaaaaactttgcagagaagatgcctagtacctggatggtatgcagtccacatagaaagatggctaacttactttgctacttctcagttgctaattattgatggacagcagctgagatctgacccagctactgtgatggatgaagtccagaagtttctgggagttacacctcgttataattactctgaagcactaacgtttgatccccaaaagggtttttggtgtcaattactggaaggaggaaagacaaaatgccttggaaaaagcaaaggccgaaaatatccacctatggatccagagtctagaacgttcctctctaattactaccgagatcataatgtggaactatccaaactgctacacagactgggacagcctctgccatcrtggctgagacaggaactgcagaaagtgagatagcactggagacaagaactaagcctctcaagatacttttagtgt

SEQ ID NO: 1359 - DNA, 1006 bp, Homo sapiens
agccccgggacgcacaggcccaggagccccgggacgcacgggaagccccyatcgcggcggaaactgcggccagcggtgccggggccggtggagggacggccrgarcagcggagaacgagcggagccgattctcccgcaacagtggacgcgcccggggcggggcctgggggggttcttcgcgtgcggcccggccgggccgggcagtctgggacgcgccgccgccatgatcatccctgtacgctgcttcacttgtggcaagatcgtcggcaacaagtgggaggcttacctggggctgctgcaggccgagtacaccgagggggaygcgctggatgccctgggcctgaagcgctactgctgccgccggatgctgctggcccacgtggacctgatcgagaagctgctcaattatgcacccctggagaagtgaccamkctgraacccacccacmcgctgtgctgaccatgggccctgagcgtcctrccccgaattcacgaggctgaggcatccgggagctggcgtaatgcctggccgcagtgtgtgtgtatccsataccccactctggaaggaaccatccagtaaaggtctttcagaaccactaaggtcccagccctcactaggatgtcaggagccaggtctaggcccagctttcacactgtggcagcccagtgaagcagactgggccatgaactctcctagccctggggccagcctgttccacaggcacccctgcaggaggcgctgccaggagagccttccatctcgggkctctttgaggttccctccttctgggtgttcttcaggctgagcagagaggctcctgtaccctctctctcggaatctgaagagccagatttaggccgggcaaaggggctcacccctataatcccaggactttgggaggccaaggcaggaggatcacttgagtccagaaattcaagacccgcctgggcatcataatgagaccccatctctacaacaaaatttaataaattagctgggcacagtg

SEQ ID NO: 1360 - DNA, 2562 bp, Homo sapiens
cacactccccacctacagggaccactcccatctcttccacaggtcctgtcactgcaacatccttccatgccaccactacctatccaacaccatcacaccctcagaccacacttcccactcacgttccatctttctccacctccttggtgactccaagtactcacatagtcatcacccctacccacgcacagatggccacttctgcctccatccactcaatgccaacaggcaccattcctccaccgaccacgatcaaggccacagggtccacccacacagccccaccaatgacaccgaccaccagtgggaccagccaatccccaagctcatttagcacggccaaaacttctacatccctaccttaccacacttcctcaacacaccatcctgaagtcaccccaacttctaccaccaacatcacccccaaacacaccagtacaggcaccagaacccctgtggcccacaccacctcggccagcagcagcaggctacccacacccttcaccacacactccccacctacagggagcagtcccttctcttccacaggtcctatgactgcaacatccttccagaccaccactacctatccaaccccatcacaccctcagaccacacttcccactcacgttccacctttctccacctccttggtgactccaagtactcacacagtcatcatcactacccacacacagatggccacttctgcctccatccactcaacgccaacaggcaccgttcctccaccaacaacgctcaaggccacagggtccacccacacagccccaccaatgacagtgaccaccagtgggaccagccaaacccacagctcattcagcacagctacagcctcttcttccttcatatcctcctcgtcttggctgcctcagaactctagctcaaggccaccgtcatcacctatcaccacacaactcccccacttgagttctgcaaccactcctgtttccacaactaatcagctgtcctcctcattttctcccagtccttctgccccctctactgtttcttcttatgtgccctcctcccactcctctccccagacttcatcgccttctgttggcacatcttcctctttcgtgtccgcccccgtgcactccacaaccctgagctcggggtcacactcctcattgtccactcatcccacgactgcatcagtgtctgcatctcctctttttccttcttctccagctgcctctactaccattagggccactctcccccacactatctcctctcctttcaccctctctgctctactccccatatccactgttaccgtgtctcccaccccatccagccacctagcctccagcaccattgcatttccgtccacgcccaggaccacggccagcacccacaccgcccctgccttctcctctcagtccaccacctcgcggtccacttctctcaccacccgagttcccacatcaggctttgtgtcactcacctcgggggtgacgggtatccccacctctccagtcaccaaccttaccaccaggcaccctggtcccaccttgtcgcctaccacacggttcctgaccagctccctcactgcccatggaagcacccctgcttctgccccggtatcttctctcgggacacctacgcccacctcacccggggtctgcagtgtgygggagcagcaggaggagatcacgttcaaggggtgcatggcgaacgtgacggtaacccgctgtgarggcgcctgcatttccgctgccagcttcaacatcatcacccagcaggtggatgcccgctgcagctgctgccgccccctccactcctatgagcagcagctggagctgccctgccccgatcccagcacgcctggccggcggctcgtactcaccctgcaggtgttcagccactgcgtgtgcagctctgtggcctgtggagactagcagggtcgctgcctgctctcctggggctgaaggactgcagatgacagacaggaaaacacccaccagcccccttcccgcttgtgccagcagctgctttcctggtcaccaggcctggcccccaagtgccctgggccgtggctccctggggcaccggttggagaggggctgccaagcaggggctcagactaccacactcctgcagaccctgagccagcagagagggactgaggcggacagtggtcacggacctcccaggcacacagggcactcccgaccacccctgcccacygtccaacacctcccagcccctgaacttggccccagccctgctgggcccagaaccctgcagatgaagccacagagcaggcgctcgaccagacccatcaggggcgaggagggcacggaaacctgtgccgagatgggggcaagaggcccaggcagccaccagcacagagaagaggagatccccagagtcagggagggcagagggtggcagcgagggcagggcagccgcccccgctcccagccaggcagaaggcccccaccagcaccacacccatccccagcagcctgtccttgggagagggcgtcacccggtcagagactccaaataaaccggttcttgtcaaggcacaga

SEQ ID NO: 1361 - DNA, 717 bp, Homo sapiens
atgtggctctacctggyggtcctccwgggcctrtactaccttctgcactggtactgggagaggcaggtggtgagtcasctgagagacaagtacgtgttcatcatgagctgtgactcacgcttcaggaagctactggccagacaactgaatgcacaggcttgcgggagctgcatgtaggacagagaaggggaccaagcagctgaggggccagacttcagacaggctggagacggtgaccatggacatcaccaagacagagagcattgctgcagctgcccagtgggtgaaggagtgtgtgggggacagagggaccacctcaatccctcctagtgcctgactttgtgacctgttggtcacaaagtgaccaactttgtgatggaactggacatgaacctgttggggatgattgatgtgactctgatcctgctgccctaatgaggaaggccaggggctgcatggtcaacctctccagcatcgcaggccrggtttcactttttggtgcaggctactgcatctccaagtacagcgtggaggccttctccgactccctctggagggagctctcccactttggagtgaaggtgtctgtgattgaacctggtcacttcaggaccagtatggccggctctgagaggcatttacagaacctcaaggagctgtcggactaggccagccccgaggtcaaggagacgtatggggagaagtttctgatatccc

SEQ ID NO: 1362 - DNA, 1087 bp, Homo sapiens
acagcagcgaacatggcgctgtgagtggtgcggagcgtgcgggccctgctctgcaccctgcacgcsgtcccgtcacccgccgcgccctgcccgccaaggccctggcagctgggtgtggacgccgtccgtacgctgcrcactggacccgctctgctctgggtgcgtaaattcacagagaaacatgaatgcgtaacaacagaaaatggcattggaacagtgggaatcagcaatttggcacaggaagctttgggagatgttgtttactatagtctgcctgaagttgggacaaaattgaacaaacaagatgagtttggtgctttggaaagtgtgaaagctgctagtgaactctgttctcctttatcaggagaagtaactgaaattaatgaagctcttgcagaaaatccaggactygtaaacaaatcttgttatgaagatggttggcagatcaagatgacactgagtaacccttcagaactagatgaacttatgagtgaagaagcttatgagaaatacataaaatctattgaggagtgaaaatggaactcctaaataaactagtatgaaataacgcaasccagcagagttgtcttaaattagtggtggatagacttacaatagmaacttttarcattaccgatggggaagaaaaaactactgttaacactgctaatgaaagaaaatgccctttaactttctaatgattatagataaatagaatatgcgtctttttcacaatatcctatgatttttagactaggctctagtgttcagaattcatgaaattatccatggtaaaaactagttataaacattacaaaattcaaagataacattgttattcttaagctttaataatattgtaacttgcatgtatccatacctggatttgggatgaaatacttaatgatctttccattggaaataactggaagtgaagaggtttttgttgcttgtacagtgtcagatgaggaacaccactatcttaattttacaatacactgaattttttggtggtgctatttttatacagtgaagcaacagctttgcagcaaaataataaaatacttcttcattaaaacaacaacaa

SEQ ID NO: 1363 - DNA, 673 bp, Homo sapiens
acagcagcgaacatggcgctgtgagtggtgcggagcgtgcgggccctgctctgcaccctgcacgcsgtcccgtcacccgccgcgccctgcccgccaaggccctggcagctgggtgtggacgccgtccgtacgctgcrcactggacccgctctgctctgggtgcgtaaattcacagagaaacatgaatgcgtaacaacagaaaatggcattggaacagtgggaatcagcaatttggcacaatggttggcagatcaagatgacactgagtaacccttcagaactagatgaacttatgagtgaagaagcttatgagaaatacataaaatctattgaggagtgaaaatggaactcctaaataaactagtatgaaataacgcaasccagcagagttgtcttaaattagtggtggatagacttacaatagmaacttttarcattaccgatggggaagaaaaaactactgttaacactgctaatgaaagaaaatgccctttaactttctaatgattatagataaatagaatatgcgtctttttcacaatatcctatgatttttagactaggctctagtgttcagaattcatgaaattatccatggtaaaaactagttataaacattacaaaattcaaagataacattgttattcttaagctttaataatattgtaacttg

SEQ ID NO: 1364 - DNA, 738 bp, Homo sapiens
gctgcccctgaaccccagaacaaccagctggatcagttctcacaggagctacagcgckgagactgggaaacatggttccaaaactgttcacttcccaaatttgtctgcttcttctgttggggcttctggctgtggagggctcactccatgtcaaacctccacagtttacctgggctcaatggtttgaaacccagcacatcaatatgacctcccagcaatgcaccaatgcaatgcaggtcattaacaattatcaacggcgatgcaaaaaccaaaatactttccttcttacaacttttgctaacgtagttaatgtttgtggtaacccaaatatgacctgtcctagtaacaaaactmgcaaaaaytgtcaccacagtggaagccaggtgcctttaatccactgtaacctcacaactccaagtccacagaatatttcaaactgcaggtatgcgcagacaccagcaaacatgttctatatagttgcatgtgacaacagagatcaacgacgrgaccctccacagtatccggtggttccagttcacctggatagaatcatctaagctcctgtatcagcactcctcatcatcactcatctgccaagctcctcaatcatagccaagatcccatctctccatatactttgggtatcarcatctgtcctcatcagtctccataccccttcagctttcctgagctgaagtgccttgtgaaccctgcaataaactgctttgcaaattcatc

SEQ ID NO: 1365 - DNA, 1548 bp, Homo sapiens
tggagctaagctgtttccagggtgacagagtggcgacctcggtggtcgattgagcaggtctgagaattgttcccaaagggttgtgcgtcaccgagtcgttggcrctgtcatggcgggtgtgctgaagaagaccactggccttgtgggattggctgtgtgcaatactcctcacgaggctaagaatattgtacacaaagattcttgatgttcttgaggaaatccctaaaaatgcagcatatagaaagtatacagaacagattacaaatgagaagctggctatggttaaagcggaaccagatgttaaaaaattagaagaccaacttcaaggcggtcaattagaagaggtgattcttcaggctgracatgaactaaatctggcaagaaaaatgagggaatggaaactatgggagccattagtggaagagcctcctgccgatcagtggaaatggccaatataattattaagtgactttggtgtgttcatgggaaactgatgtaattaaatattctgttatattaagagcgtgttcttattactgacattttgtaatcaagaaaagtgatatagaaaatatgtaggagactgttaaaattggtgattatggtaatatggtcatgtgaatcaatttttgatttataaagtactcacacaagttgtttcaaagatgatatttctgtgaacagagaggccatgggaagatttgaaaattattaaagaaaaattcctacagattttcaatgcagagaccataatcaaaaagtaaactttctttagtagtatgttcaatacatcatttaattttttaagttatcctgaagaaggaaaggtccttaattattatagtctaaacaaatttatagattactgtttgaagtaaataatacgagtgaatattttcaaatgtgataaaatagcacaagtggctggtgataaaatttgaaattatggttaacctcagctgtgatcttatgtatgtaaagtgaaatttaaatagataattataggttgattacaaaatccatagtgtcattttattttagtcattattgaattataccatttactctgttttcttatagtcttaattttattatattttgttgttactgtattatatttgaaaaccttcaaattagaatacattgtacagttaaagaaattgacttggtacttaaaagaaagatttcccattgcatacaggttattggagaaattttccytttgttgcatttgtggaagttagttttctggcccgtggcctttaattttcttaatcaacctaattacatcaggatagaggtagagtttctgtaaaagaagagacattaagagttcctgaaatttatatctggcatacsgataggcttatattcaaaacatyttagtcatacgaccataaattaaaagtggagtcactaaatagtttgcagtacgtttytaatataagtgtasgtgggtatcaaaacaagacaaatgctgttcagggaaagaagttggcaagcttaaggttaaacaaaaataaaattacatgtgttttcgccttccta

SEQ ID NO: 1366 - DNA, 1759 bp, Homo sapiens
tggagctaagctgtttccagggtgacagagtggcgacctcggtggtcgattgagcaggtctgagaattgttcccaaagggttgtgcgtcaccgagtcgttggcrctgtcatggcgggtgtgctgaagaagaccactggccttgtgggattggctgtgtgcaatactcctcacgagaaattcaaataagaaaaattaaaaaaaaaaatttgcagtgcttcggacctcactttgaaaaatactgattcaggctgggtgggctcacgcctgtaatcccagcactttgggaggctgaggtgggcggatcacctgaagtcaggagtttgagaccatcctggccaacatggcaaaaccctgtctctactaaaaatagaaaaaatagccagaggctaagaatattgtacacaaagattcttgatgttcttgaggaaatccctaaaaatgcagcatatagaaagtatacagaacagattacaaatgagaagctggctatggttaaagcggaaccagatgttaaaaaattagaagaccaacttcaaggcggtcaattagaagaggtgattcttcaggctgracatgaactaaatctggcaagaaaaatgagggaatggaaactatgggagccattagtggaagagcctcctgccgatcagtggaaatggccaatataattattaagtgactttggtgtgttcatgggaaactgatgtaattaaatattctgttatattaagagcgtgttcttattactgacattttgtaatcaagaaaagtgatatagaaaatatgtaggagactgttaaaattggtgattatggtaatatggtcatgtgaatcaatttttgatttataaagtactcacacaagttgtttcaaagatgatatttctgtgaacagagaggccatgggaagatttgaaaattattaaagaaaaattcctacagattttcaatgcagagaccataatcaaaaagtaaactttctttagtagtatgttcaatacatcatttaattttttaagttatcctgaagaaggaaaggtccttaattattatagtctaaacaaatttatagattactgtttgaagtaaataatacgagtgaatattttcaaatgtgataaaatagcacaagtggctggtgataaaatttgaaattatggttaacctcagctgtgatcttatgtatgtaaagtgaaatttaaatagataattataggttgattacaaaatccatagtgtcattttattttagtcattattgaattataccatttactctgttttcttatagtcttaattttattatattttgttgttactgtattatatttgaaaaccttcaaattagaatacattgtacagttaaagaaattgacttggtacttaaaagaaagatttcccattgcatacaggttattggagaaattttccytttgttgcatttgtggaagttagttttctggcccgtggcctttaattttcttaatcaacctaattacatcaggatagaggtagagtttctgtaaaagaagagacattaagagttcctgaaatttatatctggcatacsgataggcttatattcaaaacatyttagtcatacgaccataaattaaaagtggagtcactaaatagtttgcagtacgtttytaatataagtgtasgtgggtatcaaaacaagacaaatgctgttcagggaaagaagttggcaagcttaaggttaaacaaaaataaaattacatgtgttttcgccttccta

SEQ ID NO: 1367 - DNA, 1213 bp, Homo sapiens
gtttttgaacagaccactggccttgtgggattggctgtgtgcaatactcctcacgagaggctaagaatattgtacacaaagattcttgatgttcttgaggaaatccctaaaaatgcagcatatagaaagtatacagaacagattacaaatgagaagctggctatggttaaagcggaaccagatgttaaaaaattagaagaccaacttcaaggcggtcaattagaagaggtgattcttcaggctgracatgaactaaatctggcaagaaaaatgagggaatggaaactatgggagccattagtggaagagcctcctgccgatcagtggaaatggccaatataattattaagtgactttggtgtgttcatgggaaactgatgtaattaaatattctgttatattaagagcgtgttcttattactgacattttgtaatcaagaaaagtgatatagaaaatatgtaggagactgttaaaattggtgattatggtaatatggtcatgtgaatcaatttttgatttataaagtactcacacaagttgtttcaaagatgatatttctgtgaacagagaggccatgggaagatttgaaaattattaaagaaaaattcctacagattttcaatgcagagaccataatcaaaaattatcctgaagaaggaaaggtccttaattattatagtctaaacaaatttatagattactgtttgaagtttattgaattataccatttactctgttttcttatagtcttaattttattatattttgttgttactgtattatatttgaaaaccttcaaattagaatacattgtacagttaaagaaattgacttggtacttaaaagaaagatttcccattgcatacaggttattggagaaattttccytttgttgcatttgtggaagttagttttctggcccgtggcctttaattttcttaatcaacctaattacatcaggatagaggtagagtttctgtaaaagaagagacattaagagttcctgaaatttatatctggcatacsgataggcttatattcaaaacatyttagtcatacgaccataaattaaaagtggagtcactaaatagtttgcagtacgtttytaatataagtgtasgtgggtatcaaaacaagacaaatgctgttcagggaaagaagttggcaagcttaaggttaaacaaaaataaaattacatgtgttttcgccttc

SEQ ID NO: 1368 - DNA, 1550 bp, Homo sapiens
tggagctaagctgtttccagggtgacagagtggcgacctcggtggtcgattgagcaggtctgagaattgttcccaaagggttgtgcgtcaccgagtcgttggcrctgtcatggcgggtgtgctgaagaagaccactggccttgtgggattggctgtgtgcaatactcctcacgagaggctaagaatattgtacacaaagattcttgatgttcttgaggaaatccctaaaaatgcagcatatagaaagtatacagaacagattacaaatgagaagctggctatggttaaagcggaaccagatgttaaaaaattagaagaccaacttcaaggcggtcaattagaagaggtgattcttcaggctgracatgaactaaatctggcaagaaaaatgagggaatggaaactatgggagccattagtggaagagcctcctgccgatcagtggaaatggccaatataattattaagtgactttggtgtgttcatgggaaactgatgtaattaaatattctgttatattaagagcgtgttcttattactgacattttgtaatcaagaaaagtgatatagaaaatatgtaggagactgttaaaattggtgattatggtaatatggtcatgtgaatcaatttttgatttataaagtactcacacaagttgtttcaaagatgatatttctgtgaacagagaggccatgggaagatttgaaaattattaaagaaaaattcctacagattttcaatgcagagaccataatcaaaaagtaaactttctttagtagtatgttcaatacatcatttaattttttaagttatcctgaagaaggaaaggtccttaattattatagtctaaacaaatttatagattactgtttgaagtaaataatacgagtgaatattttcaaatgtgataaaatagcacaagtggctggtgataaaatttgaaattatggttaacctcagctgtgatcttatgtatgtaaagtgaaatttaaatagataattataggttgattacaaaatccatagtgtcattttattttagtcattattgaattataccatttactctgttttcttatagtcttaattttattatattttgttgttactgtattatatttgaaaaccttcaaattagaatacattgtacagttaaagaaattgacttggtacttaaaagaaagatttcccattgcatacaggttattggagaaattttccytttgttgcatttgtggaagttagttttctggcccgtggcctttaattttcttaatcaacctaattacatcaggatagaggtagagtttctgtaaaagaagagacattaagagttcctgaaatttatatctggcatacsgataggcttatattcaaaacatyttagtcatacgaccataaattaaaagtggagtcactaaatagtttgcagtacgtttytaatataagtgtasgtgggtatcaaaacaagacaaatgctgttcagggaaagaagttggcaagcttaaggttaaacaaaaataaaattacatgtgttttcgccttccta

SEQ ID NO: 1369 - DNA, 1347 bp, Homo sapiens
tggagctaagctgtttccagggtgacagagtggcgacctcggtggtcgattgagcaggtctgagaattgttcccaaagggttgtgcgtcaccgagtcgttggcrctgtcatggcgggtgtgctgaagaagaccactggccttgtgggattggctgtgtgcaatactcctcacgagaggctaagaatattgtacacaaagattcttgatgttcttgaggaaatccctaaaaatgcagcatatagaaagtatacagaacagattacaaatgagaagctggctatggttaaagcggaaccagatgttaaaaaattagaagaccaacttcaaggcggtcaattagaagaggtgattcttcaggctgracatgaactaaatctggcaagaaaaatgagggaatggaaactatgggagccattagtggaagagcctcctgccgatcagtggaaatggccaatataattattaagtgactttggtgtgttcatgggaaactgatgtaattaaatattctgttatattaagagcgtgttcttattactgacattttgtaatcaagaaaataaactttctttagtagtatgttcaatacatcatttaattttttaagttatcctgaagaaggaaaggtccttaattattatagtctaaacaaatttatagattactgtttgaagtaaataatacgagtgaatattttcaaatgtgataaaatagcacaagtggctggtgataaaatttgaaattatggttaacctcagctgtgatcttatgtatgtaaagtgaaatttaaatagataattataggttgattacaaaatccatagtgtcattttattttagtcattattgaattataccatttactctgttttcttatagtcttaattttattatattttgttgttactgtattatatttgaaaaccttcaaattagaatacattgtacagttaaagaaattgacttggtacttaaaagaaagatttcccattgcatacaggttattggagaaattttccytttgttgcatttgtggaagttagttttctggcccgtggcctttaattttcttaatcaacctaattacatcaggatagaggtagagtttctgtaaaagaagagacattaagagttcctgaaatttatatctggcatacsgataggcttatattcaaaacatyttagtcatacgaccataaattaaaagtggagtcactaaatagtttgcagtacgtttytaatataagtgtasgtgggtatcaaaacaagacaaatgctgttcagggaaagaagttggcaagcttaaggttaaacaaaaataaaattacatgtgttttcgccttcct

SEQ ID NO: 1370 - DNA, 1217 bp, Homo sapiens
gtttttgaacagaccactggccttgtgggattggctgtgtgcaatactcctcacgagaggctaagaatattgtacacaaagattcttgatgttcttgaggaaatccctaaaaatgcagcatatagaaagtatacagaacagattacaaatgagaagctggctatggttaaagcggaaccagatgttaaaaaattagaagaccaacttcaaggcggtcaattagaagaggctgracatgaactaaatctggcaagaaaaatgagggaatggaaactatgggagccattagtggaagagcctcctgccgatcagtggaaatggccaatataattattaagtgactttggtgtgttcatgggaaactgatgtaattaaatattctgttatattaagagcgtgttcttattactgacattttgtaatcaagaaaataaactttctttagtagtatgttcaatacatcatttaattttttaagttatcctgaagaaggaaaggtccttaattattatagtctaaacaaatttatagattactgtttgaagtaaataatacgagtgaatattttcaaatgtgataaaatagcacaagtggctggtgataaaatttgaaattatggttaacctcagctgtgatcttatgtatgtaaagtgaaatttaaatagataattataggttgattacaaaatccatagtgtcattttattttagtcattattgaattataccatttactctgttttcttatagtcttaattttattatattttgttgttactgtattatatttgaaaaccttcaaattagaatacattgtacagttaaagaaattgacttggtacttaaaagaaagatttcccattgcatacaggttattggagaaattttccytttgttgcatttgtggaagttagttttctggcccgtggcctttaattttcttaatcaacctaattacatcaggatagaggtagagtttctgtaaaagaagagacattaagagttcctgaaatttatatctggcatacsgataggcttatattcaaaacatyttagtcatacgaccataaattaaaagtggagtcactaaatagtttgcagtacgtttytaatataagtgtasgtgggtatcaaaacaagacaaatgctgttcagggaaagaagttggcaagcttaaggttaaacaaaaataaaattacatgtgttttcgccttcct

SEQ ID NO: 1371 - DNA, 1420 bp, Homo sapiens
gtttttgaacagaccactggccttgtgggattggctgtgtgcaatactcctcacgagaggctaagaatattgtacacaaagattcttgatgttcttgaggaaatccctaaaaatgcagcatatagaaagtatacagaacagattacaaatgagaagctggctatggttaaagcggaaccagatgttaaaaaattagaagaccaacttcaaggcggtcaattagaagaggctgracatgaactaaatctggcaagaaaaatgagggaatggaaactatgggagccattagtggaagagcctcctgccgatcagtggaaatggccaatataattattaagtgactttggtgtgttcatgggaaactgatgtaattaaatattctgttatattaagagcgtgttcttattactgacattttgtaatcaagaaaagtgatatagaaaatatgtaggagactgttaaaattggtgattatggtaatatggtcatgtgaatcaatttttgatttataaagtactcacacaagttgtttcaaagatgatatttctgtgaacagagaggccatgggaagatttgaaaattattaaagaaaaattcctacagattttcaatgcagagaccataatcaaaaagtaaactttctttagtagtatgttcaatacatcatttaattttttaagttatcctgaagaaggaaaggtccttaattattatagtctaaacaaatttatagattactgtttgaagtaaataatacgagtgaatattttcaaatgtgataaaatagcacaagtggctggtgataaaatttgaaattatggttaacctcagctgtgatcttatgtatgtaaagtgaaatttaaatagataattataggttgattacaaaatccatagtgtcattttattttagtcattattgaattataccatttactctgttttcttatagtcttaattttattatattttgttgttactgtattatatttgaaaaccttcaaattagaatacattgtacagttaaagaaattgacttggtacttaaaagaaagatttcccattgcatacaggttattggagaaattttccytttgttgcatttgtggaagttagttttctggcccgtggcctttaattttcttaatcaacctaattacatcaggatagaggtagagtttctgtaaaagaagagacattaagagttcctgaaatttatatctggcatacsgataggcttatattcaaaacatyttagtcatacgaccataaattaaaagtggagtcactaaatagtttgcagtacgtttytaatataagtgtasgtgggtatcaaaacaagacaaatgctgttcagggaaagaagttggcaagcttaaggttaaacaaaaataaaattacatgtgttttcgccttccta

SEQ ID NO: 1372 - DNA, 2333 bp, Homo sapiens
aaagrctttgctagattaaactattggatagagaagcttaaataggtagtaaaccactaaatatgcaaggaagtgattatcagggttgtgaaggagaagaacaggtaagttaaatgggcgattstgaggagtagaaatttcctttacttcataattatttgttaattcatctttatatgtttaatgggcttttctctattattttatatttttcaataaaagaaaaaagaawttaaaaaatcttggagctcactgggagcaatgdggtttgcagctgaagtccaatagtacaaatgatgtggtaagaggccggcagggctgtgaattacagcaacaaaggagaaaaggmagtgattggagaattaagcaacatgaatggtatttattcaaagacagctcattataggacacggaactccctgggtaggagtttgaagctttcttaactcagaaagaaacttccaacacagtttcccaaagaaaaatgggcaccaagggcaaagttattaaatgcaaagcagccatcgcctgggaagcaggcaagcccctttgcattgaagaggttgaagtagctccccccaaggctcatgaagttcgcattcagatcattgctacctcyctgtrccatactgatgccactgttatcgattctaaatttgagggcctagctttcccagtgatcgttggccatgaggctgcaggtattgtggaaagtaytgggccaggagtgaccaacgtcaaaccaggtgacaaagtaattccactttatgcacctctatgtagaaaatgcaagttttgtctgagtccactcacaaatttgtgtgggaaaatcagtaatctcaaaagtcctgctagtgatcaacaactaatggaagacaaaaccagcaggtttacctgcaaaggaaaaccagtttaccatttctttggaaccagtacattctctcagtacactgtggtgtcagatatcaatcttgccaaaatagatgatgatgcaaatttagagagagtttgtctgcttggatgtgggttttcaactggctatggggctgcaatcaacaatgccaaggtcacccctggttcgacttgtgctgtctttggcctaggaggtgtgggtctttctgctgtaatgggttgtaaagcagcaggagcttccagaatcataggtattgacatcaacagtgagaagtttgtgaaggctaaagccctgggagccactgactgcctcaatcctagagacttacataaacckatccaggaagttatcattgaattgaccaagggaggtgtggattttgcccttgactgtgcaggtggatctgaaaccatgaaagcagccctggactgtacaaccgcaggctggggatcatgtactttcattggagtagctgctggtagcaaaggattgactrtttttccagaggagctaataatcggccgtactataaatggaacattctttggtggttggaaaagtgtagattctatcccaaagctggtcactgactataagaataagaaattcaatctggatgcaytggtgacccataccctgccttttgacaaaatcagtgaggcatttgacctaatgaaccaaggaaaaagcrtccgaacaatcctcatcttttgaagatgccaggagcaattcrgaatactatctgattgaatgtgaacctgyctggttaatttattacctgatttgatgaaccaaggaaagccatgmgtttaaacaaatatttacatttaatatgggaacataaaagagctttaaatattatagactttgtacctgttatatatatgaatattccctaygttaaataataataataactagtgtttatgaatagaatcatatcatctttagaaattgtttaaaattagttctgggaagttgaaagtggggaatgaagagataataaataaaactagattggccatatgtttataatttttttagattgggtaatgaatacatggagtttcattatacttttctctccacttttgtctatgttgaaaattttctgggagctraatgatgagaacacatggacacatgatggggaacaacacacactrgggcctgttgagggcagggagtcggcagagagagagcatcaggaagaatagctaatggatgctgggcttcatacctgggtgatgagatgatctgtgcagcaaagcaccatggtacatgtttacctatgtaacaaacctgcacatcctgcacatgtaccctggaacttaataaaagttggaaattttcaacagcaatttaattgtatattttaatatgactaaaagagtataatggattgtttgtaacacaaata

SEQ ID NO: 1373 - DNA, 2585 bp, Homo sapiens
aaagrctttgctagattaaactattggatagagaagcttaaataggtagtaaaccactaaatatgcaaggaagtgattatcagggttgtgaaggagaagaacaggtaagttaaatgggcgattstgaggagtagaaatttcctttacttcataattatttgttaattcatctttatatgtttaatgggcttttctctattattttatatttttcaataaaagaaaaaagaawttaaaaaatcttggagctcactgggagcaatgdggtttgcagctgaagtccaatagtacaaatgatgtggtaagaggccggcagggctgtgaattacagcaacaaaggagaaaaggmagtgattggagaattaagcaacatgaatggtatttattcaaagacagctcattataggacacggaactccctgggtaggagtttgaagctttcttaactcagaaagaaacttccaacacagtttcccaaagaaaaatgggcaccaagggcaaagttattaaatgcaaagcagccatcgcctgggaagcaggcaagcccctttgcattgaagaggttgaagtagctccccccaaggctcatgaagttcgcattcagatcattgctacctcyctgtrccatactgatgccactgttatcgattctaaatttgagggcctagctttcccagtgatcgttggccatgaggctgcaggtattgtggaaagtaytgggccaggagtgaccaacgtcaaaccaggtgacaaagtaattccactttatgcacctctatgtagaaaatgcaagttttgtctgagtccactcacaaatttgtgtgggaaaatcagtaatctcaaaagtcctgctagtgatcaacaactaatggaagacaaaaccagcaggtttacctgcaaaggaaaaccagtttaccatttctttggaaccagtacattctctcagtacactgtggtgtcagatatcaatcttgccaaaatagatgatgatgcaaatttagagagagtttgtctgcttggatgtgggttttcaactggctatggggctgcaatcaacaatgccaaggtcacccctggttcgacttgtgctgtctttggcctaggaggtgtgggtctttctgctgtaatgggttgtaaagcagcaggagcttccagaatcataggtattgacatcaacagtgagaagtttgtgaaggctaaagccctgggagccactgactgcctcaatcctagagacttacataaacckatccaggaagttatcattgaattgaccaagggaggtgtggattttgcccttgactgtgcaggtggatctgaaaccatgaaagcagccctggactgtacaaccgcaggctggggatcatgtactttcattggagtagctgctggtagcaaaggattgactrtttttccagaggagctaataatcggccgtactataaatggaacattctttggtggttggaaaagtgtagattctatcccaaagctggtcactgactataagaataagaaattcaatctggatgcaytggtgacccataccctgccttttgacaaaatcagtgaggcatttgacctaatgaaccaaggaaaaagcrtccgaacaatcctcatcttttgaagatgccaggagcaattcrgaatactatctgattgaatgtgaacctgyctggttaatttattacctgatttgatgaaccaaggaaagccatgmgtttaaacaaatatttacatttaatatgggaacataaaagagctttaaatattatagactttgtacctgttatatatatgaatattccctaygttaaataataataataactagtgtttatgaatagaatcatatcatctttagaaattgtttaaaattagttctgggaagttgaaagtggggaatgaagagataataaataaaactagattggccatatgtttataatttttttagattgggtaatgaatacatggagtttcattatacttttctctccacttttgtctatgttgaaaattttctgggagctraatgatgagaacacatggacacatgatggggaacaacacacactrgggcctgttgagggcagggagtcggcagagagagagcatcaggaagaatagctaatggatgctgggcttcatacctgggtgatgagatgatctgtgcagcaaagcaccatggtacatgtttacctatgtaacaaacctgcacatcctgcacatgtaccctggaacttaataaaagttggaaatttttaaaaagaatgaataagacctggtatttgatagcacaacagggagactatagtcaacagcaatttaattgtatattttaatatgactaaaagagtataatggattgtttgtaacacaaataaatgcttgaggrgatggacaccccatattacatgatgtgattattacacattgcatgcctatatcaaaacatctcatgtaccccataaatatatacacctaatacccacaaaacttaaaatataaaatgttttaaataaaaataaagaaaagatttcccacaataaaaagatttttactggaaaaaaatcactrtattt

SEQ ID NO: 1374 - DNA, 1313 bp, Homo sapiens
gtggcttttccctaacttgacccttctttcagtgggagggaactattgagaggaacaaagagcttataaatacattaggacctggaattcggttgtccagccacaaaggtgacagcatttaacaaagcttagagaaacctccaggasactgctaccatggcagagaagcccaagctccactactccaatatacggggcagaatggagtccatccggtggctcctggctgcagctggagtagagtttgaagagaaatttataaaatctgcagaagatttggacaagttaagaaatgatggatatttgatgttccagcaagtgccaatggttgagattgaygggatgaagctggtgcagaccagagccattctcaactacattgccagcaaatacaacctctatgggaaagacataaaggagaaagccctgattgatatgtatatagaaggtatagcagatttgggtgaaatgatccttcttctgycctttastcaacctgaggaacaagatgccaagcttgccttgatccmagagaaaacaaaaaatcgctacttccctgcctttgaaaakgtcttaaagagccayggacaagactaccttgytggcaacaagctgagccgggctgacattcacctggtggaacttctctactacgtggaagagcttgactctagccttatttccagcttccctctgctgaaggccctgaaaaccagaatcagtaacctgcccacagtgaagaaktttctacagcctggcagcccaaggaagcctcccatggatgmgaaatctttagaagaatcaaggaagattttcaggttttaataaaccagccatagaggtcaaraacatgcaagaccagtattctaaagttttgcaamaattaagtgctttacctaagtgttgattgtgcctgttgtgaagctaatgaactctttcaaattatwtgctaattaaataatacaactcctatwcacccacttagttaaaattgatttcttctcattaggatctgatgtgaattcagttttccaatctcctcctagccaacaattttcttggaattacaaattcagtaaaaawggaaactataaattatgtggtttgtttgacttttccaagaattgccctgtaacatacaatttgtcatacaatctattaaaatgccaatgtaaaaatgcacctctgacattttcaggtatgcacaggagaagagttaccatcctggataatggcataaagacattttcttcttttcctgaacagtcattttatttctgataaaagcattctttctaatgcatttgcaaaac

SEQ ID NO: 1375 - DNA, 1304 bp, Homo sapiens
ttttccctaacttgacctttctcctttcagtgggagggaactattgaaaggaacaaagagcttataaatacattaagacctggaattcagttgcccagccacgacagtgacagagtttaacaaactaatcattcaggcttagagaaacctccaggagactgctatcatggcagagaagcccaagctccactactccaatgcacggggcagtatggagtccattcggtggctcctggctgcagctggagtagagttggaagagaaatttctagaatctgcagaagatttggacaagttaagaaatgatgggagtttgctgttccagcaartaccaatggttgagattgacgggatgaagctggtgcagaccagagccattcttaactacattgccagcaaatacaacctttatgggaaagacatgaaggaragagccctrattgatatgtacacagaaggtatagtagatttgactgaaatgatccttcttctgctcatatgtcaaccagaggaaagagatgccaagactgccttggtcaaagagaaaataaaaartcgctacttccctgcctttgaaaaagtcttaaagagccacagacaagactaccttgttggcaacaagctgagctgggctgacattcacctggtggaacttttctactacgtggaagagcttgactcgagtcttatctccagcttccctctgctgaaggccctgaaaaccagaatcagcaacctgcccacggtgaagaagtttctgcagcctggcagccagagaaagcctcccatggatgagaaatctttagaagaagcaaggaagattttcaggttttaataaagcagctatggaggccaagaacatgccagaccaatattctacagtttgcaacaatgaagtgctttacytaagtgtggattgtgcctcttgtaaagctaataaactctttccaattacatgctaattaaataataaataactcttatctgtcaacttagctaaaattgatttgttttcattagtatctgatatgaattcagatttctaatctcctcctaacctaccactttcttggaattaaaaatttggtaaaaaagaagaaactatagattatgtggtttgtttgacttttccaagaattgtcctgtaacatttgtcatacaatctattaaaatgtcaatgtagaaatgcactctgacattctcaggtatgcacaggagaagagttaccatcctgggtaatggcataaagacattttcttcttttcctggacagtcattttatttctgataaaagcgttcttcct

SEQ ID NO: 1376 - DNA, 1207 bp, Homo sapiens
ttttccctaacttgacctttctcctttcagtgggagggaactattgaaaggaacaaagagcttataaatacattaagacctggaattcagttgcccagccacgacagtgacagagtttaacaaactaatcattcaggcttagagaaacctccaggagactgctatcatggcagagaagcccaagctccactactccaatgcacggggcagtatggagtccattcggtggctcctggctgcagctggagtagagttggaagagaaatttctagaatctgcagaagatttggacaagttaagaaatgatgggagtttgctgttccagcaartaccaatggttgagattgacgggatgaagctggtgcagaccagagccattcttaactacattgccagcaaatacaacctttatgggaaagacatgaaggaragagccctrattgatatgtacacagaaggtatagtagatttgactgaaatgatccttcttctgctcatatgtcaaccagaggaaagagatgccaagactgccttggtcaaagagaaaataaaaartcgctacttccctgcctttgaaaaagtcttaaagagccacagacaagactaccttgttggcaacaagctgagctgggctgacattcacctggtggaacttttctactacgtggaagagcttgactcgagtcttatctccagcttccctctgctgaaggccctgaaaaccagaatcagcaacctgcccacggtgaagaagtttctgcagcctggcagccagagaaagcctcccatggatgagaaatctttagaagaagcaaggaagattttcagtgcgtgtgctcctggctcatcctcactctgctccttaaggctctgtgggggccaccgtcatgaacattccctcagttccctcagtgccactcaggcctgggctgccaagatacagatgtttgaagagaaatttctggaatctgcaaaagatttggaaaagttaagaaatagtaagatcaagtctctaagtgcctctgaggaggatgggagtttgttcttccagcaagtgccaatggttgagattgacgggatgaagctgatgcagaccagagccattctcaactacattgccagcaaatacaacctgtgtgggaaagacataaaggagagagccccatatagtatattttttgttcttccatcaacagagaacacagag

SEQ ID NO: 1377 - DNA, 381 bp, Homo sapiens
atgggagagtcagactggagagactcagggagaagcaggggtcccagccttactgcacatgtgatggagaaccaggggtcccagccttactgcccatgtgatcctgatttgattcctccaattctcgacgtcttaaagagcaatggacaagactaccttgttggcaacaagctgagctgggctgacattcacttggtggaacttctctactacatggaagagcttgamtctagccttatcttcagcttccctctgctgaaggccctgaaaaccagaatcagcaacctgcccatggtgaagaaatttctacagcctggcagcccaaggaagtctctcatggatgagaaatctttagaagaagcaaggaagattttcagattt

SEQ ID NO: 1378 - DNA, 579 bp, Homo sapiens
atggcttcagaaaaacaaccaggcagagcatgttgggtagataaatgtcgtggtagtccagaggtagaaaccagagccttcctaagatacatagctgcaaaatatgacttgtatggaaggaacatgaaggaacaagcctggattcacatgyatgtagaaggcttgaaggacctgagtgacatgattatgttccagccactctctctgcctgaagagaagatgaatcttgcatacatccttgaaagagccactacaagattattccctgtctgtgagaaggcactgagagaccacagacaagattttcttgtgggcaatcggctgagctgggctgatacacagcaacctgaagtcatcttaatgactgaagagtgcaaacccagtgtcctcttgggctttcctctgctacagaaattcaaggccagaatcagccacatccccacaattaataaatttctccaacctggaagccaaaggaagcctccactggatgaagaatccattgagactgtgaagaatatatttaaatttgaacatggcctgtttcttaaaaacatgagcactacagtagctgagtat

SEQ ID NO: 1379 - DNA, 692 bp, Homo sapiens
cagatttggtctgtgtgtccatgtactggagagtcagtgggcgctcatttctcaragttatgatgtccttggcctggcctgcttttactctgcttgcttagatctgctgctctatggaaaaggattgctgtgtcggccctttagtgagtgtctgcgtttcgttcaagtctacgagcacagccgtgttctaacctctcagagcaatgtcatgctgggggtccactcctccctggccatgtgtactgtaaggagttcttctctcaatgtgtgacctgccctgtctatcaccagtgggtatctgagcttaaggcctctgtaatgagatgtgaaaagagagaattgatgtccctgactaacagcatcagaccttttgacacctgcttgaccaggatttggataaaaggagaatttctgcaggaaaataactcttagaaaagaaacttaggaatacagagatttgacagagtggctgatgtcaaggagaacaaggatgcagaagaaactcaagatgtatgtattaaaacaaaagaacaataacctgaagggaccatgattctgttattgtatataacacaaggaaatgccccagattctcctttaaaagatataatgtacatattaagtatactagcctttatagttactgctatctacatgtttatcaaaataaaagactatttttttctaaaaca

SEQ ID NO: 1380 - DNA, 993 bp, Homo sapiens
cagatttggtctgtgtgtccatgtactggagagtcagtgggcgctcatttctcaragttatgatgtccttggcctggcctgcttttactctgcttgcttagatctgctgctctatggaaaaggattgctgtgtcggccctttagtgagtgtctgcgtttcgttcaagtctacgagcacagccgtgttctaacctctcagagcaatgtcatgctgggggtccactcctccctggccatgtggtttgcccaggaatcacagtgggacctgtttaagcactatttctccaacgcttgcagttggtgaaaagaaccaatgcctcgctatttggtgcacatggctttgtccgattcctagaatgccatgtgttaatgttacagaaaatgccagagggtatcttcatgcatattcctctagagcttcacagccaaacccttgaggtacctgtttctcagctgtcctttgactaacacctgattcacttagttctaccctatggtgctctttctaccacctgcatctcttccttttttcccttttactggctctgtttccctttactctttgaatcctttgtttctccacctagaaagtttctacctaccttatgtatccttcccgatattattgcatctagttctggactgggtttcttaactttccacctttgccagctgctacccagtatcattaaaatattaacatttagccttgctcaatggacctgtagtctatggttcagtctataatttgatacagctccctccagcccttctgagtctaaaacacattccaattcctctgttttccaggcttattttgccatcagtaactccttcctgttcccccagccatgagtgaatatgctgaatgaggacctttgtaagttctgatgaagtagcatgttaggagaatgaagcactaatcccagagctaatggaccttcctttcctttcagtactgtaaggagttcttctctcaatgtgtgacctgcc

SEQ ID NO: 1381 - DNA, 2058 bp, Homo sapiens
gtacacaccaggaatacccccagttctcatctcctcaccctgggctgcgtcaatagactccagagtaacccaaaccacaccctgctgcccagattcctaatgacacgtgaaaggccgttatgacttgctttcctcatgccctatgcacacctgggctccagccaaggatcctccttcatcaacccccatattagctacgatccttcatgctaatgtatcgctcagagctcaaaagactttgaagggcctgtgccttcgctatcgagcgcttaagttctttgccctccgcgtacttttgacaaatactgggcatcaaccatsttccaggaactaccctrggcaaagaaaataactgggcaaggtttcyatcggtgtctctgctrgcgggcatcgcccccgccgggccgccaccctgaacgagcccgtccggtcctctgggttccgccaccctgcgtagcgctgcgccagcacccggcccagcactccctcccgccgagggcgcccaggccggcttccgagggcgcccaggccggcttccgaggggcggttcccacaagcgagttccggcgcccagaacggcttcatcctctcgtcccgtccgcggcaaatgcatgcgcctggmaaacccgccaccctccagggcaactcacacctcacctcacgccgcggcgcaaccggactaggaccccgagcagggctgcccagggagcgcctgaaggaccctgcgagggccgcaggctatccarcgtggcgcctggtggccgggccctgtgccggaggacaaggtgaacccgcagccggacttctgctgcactggggctccgaatgacccagaatctggggagtgagatggcctcaatcttgcgaagccctcaggctctccagctcactctagccctgatcaagcctgacgcagtcgcccatccactgattctggaggctgttcatcagcagattctaagcaacaagttcctgattgtacgaatgagagaactactgtggagaaaggaagattgccagaggttttaccgagagcatgaagggcgttttttctatcagaggctggtggagttcatggccagcgggccaatccgagcctacatccttgcccacaaggatgccatccagctctggaggacgctcatgggacccaccagagtgttccgagcacgccatgtggccccagattctatccgtgggagtttcggcctcactgacacccgcaacaccacccatggttcggactctgtggtttcagccagcagagagattgcagccttcttccctgacttcagtgaacagcgctggtatgaggaggaagagccccagttgcgctgtggccctgtgtgctatagcccagagggaggtgtccactatgtagctggaacaggaggcctaggaccagcctgatgmaggtctatgaagaccagtggtagtgcccagacttctcctagacatctagtctaaaacattctcctaggaccagggaagcctggsttacagtgccatttctgctgggcaccaccacctgcctgagggcctagctcaccacagcacatcctccaggatctagccttctatctacctcttctctggaatgtttatggtggttcagaagaatgatgactcctctttgctgagaactgttcatccttcttcaagaagaagcttgccaggccgggcacggtggctcacgcctataatcccagcactttgggaggccgaggcgggcggatcacaaggtcaggaattcgagaccagcctgaccaacatggtgaaaccccatctctactaaaaatacaacaattagccaggcatggtggtgcatgcctgtaatcccagctactcagaggctgaggcaggagaattgcttgaacctgggaggcagagggtgcagtgagccgagatcgtgccattgcactccagcctgggcgacattctgtctcaaaaaaaaaaaaaaagaagcttgtctaattgacttgcctaaaaaatgcagtgactccaaacaacatttgacctgtcttcctcaataaaagtcagtgttctcctgaatccttt

SEQ ID NO: 1382 - DNA, 1176 bp, Homo sapiens
gaggaagttggtaaagcatccttagttgctgataaggttgttgaggaaataaaagacaaaggtggaaaagtggccagctatgattcagtgaaaacaggagagaaggttgtaaagacagcactggatgcttttggaatagatgttgtggtcaacaatgctggaattctgagggaccrttcttttgctaggataacatgggatcacatgaagatgcagaaatatggaaggatcattatcacttcatcagcttcaggaatatatggcagctttggccaggcaaattatagtgctgcgaagttgggtcttctgagttgtgaggagaatgggggcttgtttgaggttggagcaggatggattggaaaattattctgggaccggacccttggagtggttgtaagacaaaatcagccgatgactgctgaagcagtgaaggctaactggaagaagacatgtgacttcgagaatgccagcaagcctcagagtatccagaaatcaactggcagtatcattgtagttctaagtaaaatagattcagaaggaggagtttcaacaaatcatatcagtcatgcaacatctacagcaacatcaggatttgctggagctattggccataaactccctccgttttcttctgcttatacagaactggaagctattatgtatgcccttggagtgggagcatcaatcaaggatccaaaagattttaaatttgttcatgaaagaagctctgatttcttctgtttgcctacctttggagttatcataatatatccagggcaaactctacaaactgagatgtggaaggaaggaaacagaattcactttcaaaccacggtccaaggacctggagacactgtcatttcaaatgcatatgtgaatcttatgccaacatctgatatttcagctaagacaccctctgaaggtgaggaacttcagaatacccttgtatttgaggaaaaaggtcacttactgccttttaaggatgttgggcgtgagatggcaaagaaagtaaatgctgtatttgagtggcatattactaaagatgaagatttcatggaggtagttctaggcaagcttgaccctcagaaggcatctgttactggcagactgaaggccagagggaacattatgctgagccagaaacttcagatgattcttaaagactacaccaggttc

SEQ ID NO: 1383 - DNA, 2120 bp, Homo sapiens
ggaggactgcrcccagtctatgccctggctttcgtagaaaaaggagcactaattgttgtgaattatttaagaggaagttggtaaagcatccttagttgctgataaggttgttgaggaaataaaagacaaaggtggaaaagtggccagctatgattcagtgaaaacaggagagaaggttgtaaagacagcactggatgcttttggaatagatgttgtggtcaacaatgctggaattctgagggaccrttcttttgctaggataagtgatgaagactgggatatcatccacagagttcaattgcggggctcattccaagtgaccctggaaagcatgggatcacatgaagatgcagaaatatggaaggatcattatcacttcatcagcttcaggaatatatggcagctttggccaggcaaattatagtgctgcgaagttgggtcttctggtccttgcaaattctattgcagttgaaggcaggaaaagcaacattcattgtaacactatttctcctaatgctgaatcagggttgactcgattatgcctgaagattttgtggaagccctaaagccagattatgtagcatcgctggtccttcggctttgccaagagttgtgaggagaatgggggcttgtttgaggttggagcaggatggattggaaaattattctgggaccggacccttggagtggttgtaagacaaaatcagccgatgactgctgaagcagtgaaggctaactggaagaagacatgtgacttcgagaatgccagcaagcctcagagtatccagaaatcaactggcagtatcattgtagttctaagtaaaatagattcagaaggaggagtttcaacaaatcatatcagtcatgcaacatctacagcaacatcaggatttgctggagctattggccataaactccctccgttttcttctgcttatacagaactggaagctattatgtatgcccttggagtgggagcatcaatcaaggatccaaaagattttaaatttgttcatgaaagaagctctgatttcttctgtttgcctacctttggagttatcataagtcagaaatcgataatgggtggagaattagcagaagttcctgggatttcaaggaactttgcaaaggttctttatggggaacaatacttgcagttatataaaccacttcctagagcaggaaaatgaaaatgtgaaacagttgttgctgatgtcctagataaaggatctggtgtagtaattcttatggatgtctattcttattctaagaaggaatttatgtgctataatcagtcctctctctttctcattggctctggaggctttggtggaaaatggacctgaaagtcaaggtagctgtagccatacctaatagaccacctgatgctatacttgcagataccatttctcttaatcaggctgctttgtactgcctcagcagaaactgaaatctgttacacgttgatcctcactttgctagcctagcatgttttgacatgtgtacatggattatgtgtacatggattatgtacatttagattttttgccaggcatgttttataatctgtcaagattcaaagtgattaagacttgttttgcaaaaccagtatatccagggcaaactctacaaactgagatgtggaaggaaggaaacagaattcactttcaaaccacggtccaaggacctggagacactgtcatttcaaatgcatatgtgaatcttatgccaacatctgatatttcagctaagacaccctctgaaggtgaggaacttcagaatacccttgtatttgaggaaaaaggtcacttactgccttttaaggatgttgggcgtgagatggcaaagaaagtaaatgctgtatttgagtggcatattactaaaggtggaaatattgcagctaagtgacctgaaaagtggttctggaaaagtgtatcaaaacctggaaaaggttttgctgatgcatactttcagatgaagatttcatggaggtagttctaggcaagcttgaccctcagaaggcatctgttactggcagactgaaggccagagggaacattatgctgagccagaaacttcagatgattcttaaagactacaccaggttctggctgggcgcg

SEQ ID NO: 1384 - DNA, 630 bp, Homo sapiens
atgagagtccaaatcttccagctggagaacaaggtgctgcctggctttccatgggcttgcagagtggacctctatggccagattggatttgatgctgcagctcagtgcctttctctgagtgtaagtaaggcagagccactggtaaagaaggctccaccggagttgagggagcagctggccagaaaaactctcagtagtgataaccttaaatacctgtttgacaacaaagatatcatgaaggtaaaacaaagcaagaagaaaaaagagcacagtttcagaaagaataatggatgcattaaaatcatcgcgttcagcgaccatgccgaggacttccgcaagctgggctgcgaagtgctgggcatctcagtggactctcagttcacccacctggcttggatcaacaacccccagagggagggagacttgggccccytgaacatccccctgcttgctgagatcactgttaatgatttgcctgtgggacgctccgtggatgaggctctgcggctggtccaggccttccagtacgcagaagagcacgcggaagtttgtcccgctggctggaagcctggcactgacacgattaagctcaacgtgggtgacagcaaggaaaatttatccaaacacaat

SEQ ID NO: 1385 - DNA, 567 bp, Homo sapiens
cccgcccctgacttcaaggccaccgccgtggtggatggatagcgctttcaaagaagtgaagctgtaggactacaaagagaaatacgtggtcctctttttctaccctctgcacttcacttttgtgtgccccacggagatcatcgcgttcagcgaccatgccgaggacttccgcaagctgggctgcgaagtgctgggcatctcagtggactctcagttcacccacctggcttggatcaacaacccccagagggagggagacttgggccccytgaacatccccctgcttgctgaggtggccagtggcttgtctgaggattacgccgtgctgaaaacagatgcgggcattgcctacaggggccgctttrtcagtgatggcaagggtgtcctttccagatcactgttaatgatttgcctgtgggacgctccgtggatgaggctctgcggctggtccaggccttccagtacgcagaagagcacgcggaagtttgtcccgctggctggaagcctggcactgacacgattaagctcaacgtgggtgacagcaaggaaaatttatccaaacacaat

SEQ ID NO: 1386 - DNA, 1875 bp, Homo sapiens
ccagcaggagcggaacccggccggtccccaaccagccccggctccgcccccagtccgagccccagtccccaaaggccacgccttcctcccaggccccgcccctcggccccccgccctgccgccgcaagacccctgacccgggacagccgcgttcccccgccgcccgcctcaccggcacggctgygctgaggrcccgaaggacagactgacggaggcggggcctcggccgccggtcacggggtccggactgagcgcggcgctgggctcgggagccgccaaccgcccccctccgcggacgcgccccgcccccgcccccgcccggcccggatcctgcgcgcgatgagaccacaaggcccgccggcggtgcgcgtgcccggtggggcgccacgcgcacgctccgaccccgccgcgcccggcgctggcacctcctccaggaagccctcccgacgccccggctgagccagtcgtttccgagttctccggcccctgatggggacgtctgcgcccctcttctcaggccagaggttgtgctacgagccaaggactggctgccaggagctcctgggggcaccgcagtgtgggccaccagcttggaagcagaggtcccaccagatctagcgctcaataaggagcagcagctgcagatctccaaggagctggtcgacattcagatcacaacccaccacctacatgagcagcatgaggctgaaatcttccagctgaagagtgagatccttcggctggagagccgggtactggagctggagctgcgaggagatggcaccagccagggctgtgcagtcccagtggagtctgaccccaggcatccccgggcagcagcccaagagctcagacacaaagcccaggtgcctggacactctgatgaccacagattccaggtgcagcccaagaacaccatgaaccccgagaatgagcagcacaggctggggagcggcctgcagggggaagtgaagtgggcgctggagcatcaggaggcccggcagcaggcactrgtgacgcgtgtgtgagtggccatctcacctggggccccatcctggagcagagagaacccctgatcgtgggcctgctgagcctcacccccgtgtcttcagggcaaccctgggccggcagctgcagggagcccgagaggaggccagggcagccgggcagcgactggccacacaggctgtggtgctgtgcagctgccaaggccagctccgtcaggcagaggctgaaaatgcccggctgcagctgcagctcaagaaactgaaggatgagtacgtcctacggctgcaacactgcgccyggcaggcagtggagcacgcagatggtgcaggccaagcgccagccaccacggccctccggacattcctggaggcgactctggaggacatccgggcagcgcaccgcagccgtgagcagcagctggcccgggctgccygcagctaccacaagaggctggtggatctgagccgcaggcatgaagagytactggttgcctacaggggcctggacgctgcatcctgggcccagatccaccagaagctccgggacttctcccgcagcacccaggcagagctggaacgggagcgggcacagctgctggtccgggccacgatggctgaagagcaactttctgagctacaggagtacgtggaccagcacctgggcaggtacaagcacgaaatcctgaggctgaggaagctggcaggtgcaggggacccctggaaagtgggggctgtgcctccagccaagccccagcatccaaggaccggcagccactaggccgtctcccaaggagcagagcagagcagagctcctcagccagcacagaaccctcccacccagccccccataaaacatgagtcaggatag

SEQ ID NO: 1387 - DNA, 2009 bp, Homo sapiens
gccaggatgcctccagtctgggggaaaatgcttcctcatttgcttctcccagcccacctcaagcagtctccccaccccttgagtctcagcagygttaaagctgttactttcacagcttcctgggagcgagtgctttctcaagcccgtcttgcaaggtcttccacttcagcacaatgctactgcctaaaaaaatgaagctcctgctgtttctggtttcccagatggccatcttggctctattcttccacatgtacagccacaacatcagctccctgtctatgaaggcacagcccgagcgcatgcacgtgctggttctgtcttcctggcgctctggctcttcttttgtggggcagctttttgggcagcacccagatgttttctacctgatggagcccgcctggcacgtgtggatgaccttcaagcagagcaccgcctggatgctgcacatggctgtgcgggatctgatacgggccgtcttcttgtgcgacatgagcgtctttgatgcctacatggaacctggtccccggagacagtccagcctctttcagtgggagaacagccgggccctgtgttctgcacctgcctgtgacatcatcccacaagatgaaatcatcccccgggctcactgcaggctcctgtgcagtcaacagccctttgaggtggtggagaaggcctgccgctcctacagccacgtggtgctcaaggaggtgcgcttcttcaacctgcagtccctctacccgctgctgaaagacccctccctcaacctgcatatcgtgcacctggtccgggacccccgggccgtgttccgttcccgagaacgcacaaagggagatctcatgattgacagtcgcattgtgatggggcagcatgagcaaaaactcaagaaggaggaccaaccctactatgtgatgcaggtcatctgccaaagccagctggagatctacaagaccatccagtccttgcccaaggccctgcaggaacgctacctgcttgtgcgctatgaggacctggctcgagcccctgtggcccagacttcccgaatgtatgaattcgtgggattggaattcttgccccatcttcagacctgggtgcataacatcacccgaggcaagggcatgggtgaccacgctttccacacaaatgccagggatgcccttaatgtctcccaggcttggcgctggtctttgccctatgaaaaggtttctcgacttcagaaagcctgtggcgatgccatgaatttgctgggctaccgccamgtcagatctgaacaagaacagagaaacctgttgctggatcttctgtctacctggactgtccctgagcaaatccactaagagggttgagaaggctttgctgccacctggtgtcagcctcagtcactttctctgaatgcttctgagccttgcctacatctctgagccttaactacatgtctgtgggtatcacactgagtgtgagttgtgtccacacgtgctcaagcagaaggacttttgtgtccatgcttgtgtctagaaaacagactggggaaccttatgtgagcagcacatcccaccagtgaaacagggtattgctcttcttcttttcttgatcttcctgtctgggcagacttcagagactttgtggcctggaggcctattaagcacgacacagtatcagtggaattgatccataaacctccctgtccacatcttgcccaatggggaatggatctttcaccaaagagctcaccagcattttccacagagatgcaaattctgagcccttggagttcccagtggattcaaggaaggaagtgggaacaaggttggatgcctacttatgagcttgaccatcacagctatcggtaatcagaaatatgaaacaaaatctctgcacaaaagagcaagctcttaagttcacagggtgcctgggctgcatttgaatatcacttcccctctgcattttcccatcacatagaagactttgacctgtgaagctgccatctgttaatactaaaattcccaaataag

SEQ ID NO: 1388 - DNA, 3011 bp, Homo sapiens
cggactctgcggttcgcttgactgacggcgcagcctccgggcctagccacagcagcaacggcagaggccagcgggcgaggtcaagatggtggctccgcgggcgggggaggcagtggagggaggaggagtcagaccttagccagccggaaacaccgaaacccagagacctcctggggagccgccgccgccgccctctcggccatcgctgcctccgccgcctgctccacctcgagggacgcgagcgggcggcggggctggccgtgagagagacaggagaggaaggagggcaggggcggagttgcccgccttagcccccgcccccggccgcggccccgggccctgccccgcgcggccctgcccggcccaccgagccctggtgtggcagcggctcatggcggccgtggggcccccgcagcagcaggtgcggatggcccatcagcaggtctgggcggcgctcgaagtggcgctccgggtgccctgcctttacatcatcgacgccatcttcaactcctacccggattccagccaaagccggttctgcatcgtgctccagatcttcctccggctctttggtgtatttgcatccagtattgttctgatcttgtcacaacgatcacttttcaagttttacacgtacagctcagcctttctgttagctgcaacttcagtgttggtgaattattatgcttctttgcacattgacttctatggtgcctacaacacgtcagcytttggaattgagctgcttcctcgaaaaggtccctcgctgtggatggcacttatcgttctacagctaacatttggaattggatacgttacactactccagattcattccatctattcacaattaattattttggatctcttggttcctgtaataggcttaatcacagagctaccattacacatcagagagactttactgtttacttcttccttgattctcacattaaatacagtgtttgtcctggcagtgaaactgaagtggttttattattccacacgatatgtttatcttttggtgaggcacatgtatcgaatttayggattacagttattgatggaggacaratggaagaggattcgtttcccagacatactacgagtcttttggctaacaagagttacagctcaggctacagtgttaatgtacatcttaaggatggcaaatgaaactgattccttctttatttcttgggatgatttttgggacctcatttgcaatcttataattagtgggtgcgattctacactaactgtactgggcatgagtgctgtaatttcctcagtagcccattatttggggcttggaatattggcctttattggatcaactgaggaagatgacaggcgtcttggctttgttgcacctgttttattttttattttggctcttcagactgggttaagtgggctaagaccagaagagagacttattcgcttaagtagaaacatgtgccttttattaactgcagtcctgcattttatccatggaatgacagaccctgtattaatgtctctcagtgcctctcatgtgtcatcttttcgtagacattttcctgtgctgtttgtctctgcttgcctgtttattcttcctgtcttactcagttatgttctttggcatcactatgcactaaamacatggttgtttgcagttacagcattttgtgtggaactgtgcttaaaagtaattgtttctctcactgtttatacrttattcatgattgatggctactataatgtcctctgggaaaagcttgacgattatgtctactacgttcgttcaacaggcagtattattgaatttatatttggagttgtaatgtttggaaatggggcttacactatgatgtttgagtcrggaagtaaaattcgggcttttatgatgtgcctacatgcatattttaacatctacttacaagccaaaaatggctggaagacatttatgaatcgtaggactgctgtgaagaaaattaattcacttcctgaaataaaagggagccgcttacaagaaataaatgatgtatgtgcaatctgctatcatgagtttacaacatctgctcgtattacaccgtgtaatcattatttccatgcactttgccttcggaaatggctgtacattcaagatacttgtccaatgtgccatcagaaagtatacatcgaagatgatatcaaggataattcaaatgtatctaacaacaatggatttattccacccaatgaaactccagaggaagctgtaagagaagctgctgctgaatctgacagggaattgaacgaagatgacagtacagattgtgatgatgatgttcaaagagaaagaaatggagtgattcagcacacaggcgcagcagctgaagaatttaatgatgatactgactgatgaaaatagcatttattaatgattgaggtatttgtttaaaattcagttcatccaaaatggagtaatatccttcaccttcagtgtgtaaccaagcacaaaaacagtatcaatgttgaatctgtgaatggttttccgtttactgtgatgtgctactgtaaatatacctctttaattayttctggtctctttggtgacctgtttaaatttgtgtacattattgtacatagaataaaatgttttcacatttttatgacaaaatttgaacaaatagctttttaatagatgtaatgatcatatggtgcgtcacctgtgccaaatattcttcaatgaaattatataatgtaactttggacctcagtttttctttagaaatgggtgggagaatgaaaatgcaaatcaggaaaccacattaaagtcaaggaaataaaataatttgaccagaggataaaggacatgagagagtattttaaaactaaagaaaaaattagctgccagaagcaactgaggaccttttttgaaacttgagtagcagtgtaattgagctgagtttgaaagtcctgattcagagagagactgagggttgacaaataaactgtatcaactaaactttgatataaaccagaat

SEQ ID NO: 1389 - DNA, 670 bp, Homo sapiens
tgccggcggccrcttccgcttccgytggggaggtcctccatgcgcagtcatgagtcgcttcargtttatcgatattggtatcaacttgactgaccctatgttcagaggaatttataggggggttcaaaagcatcaagatgacttacaggatgtaatagggagagctgtcgagattggtgttaaaaagtttatgattacaggtggaaatctacaagacagtaaagatgcactgcatttggcacaaacaaatggtatgtttttcagtacagttggatgtcatcctacaagatgtggtgaatttgaaaagaataaccctgatctttacttaaaggagttgctaaatcttgctgaaaacaataaagggaaagttgtggcaataggagaatgyggacttgattttgaccgactgcagttttgtcccaaagatactcaactcaaatattttgaaaaacagtttgaactgtcagaacaaacaaaattaccaatgtttcttcattgtcgaaactcacatgctgaatttttggacataatgaaaagaaatagagatcggtgtgtagggggagtggtgcattcatttgatggtaccaaggaagcagcagctgctttgattgacttggatctttatataggatttaatggttgcattatgtatacatatacacgtcatatc

SEQ ID NO: 1390 - DNA, 1797 bp, Homo sapiens
tgccggcggccrcttccgcttccgytggggaggtcctccatgcgcagtcatgagtcgcttcargtttatcgatattggtatcaacttgactgaccctatgttcagaggaatttataggggggttcaaaagcatcaagatgacttacaggatgtaatagggagagctgtcgagattggtgttaaaaagtttatgattacaggtggaaatctacaagacagtaaagatgcactgcatttggcacaaacaaatggtatgtttttcagtacagttggatgtcatcctacaagatgtggtgaatttgaaaagaataaccctgatctttacttaaaggagttgctaaatcttgctgaaaacaataaagggaaagttgtggcaataggagaatgyggacttgattttgaccgactgcagttttgtcccaaagatactcaactcaaatattttgaaaaacagtttgaactgtcagaacaaacaaaattaccaatgtttcttcattgtcgaaactcacatgctgaatttttggacataatgaaaagaaatagagatcggtgtgtagggggagtggtgcattcatttgatggtaccaaggaagcagcagctgctttgattgacttggatctttatataggatttaatggttgctcactgaaaactgaagctaatttggaagttttgaagtcaattcctagtgaaaaattaatgattgagacagatgcaccttggtgtggagtcaaaagtacacatgctggatcaaaatatataagaactgcatttcctaccaaaaagaagtgggaaagtgggcactgcttaaaagacagaaatgaaccctgccatataattcaaatattggagataatgtcagcagtgagagatgaggatccactggaattagccaatacactatataacaatactattaaagtattttttcctggaatataattggtatatgtcttccactttccatcatgtatgtaaaatttcatagtaaaacttcctgatagtttcaataaagaaattatctgcaagttgtctaaagaaatactatatatcggtacacaccattccccaccattccccttctttttctcgtaaaatcagatcaggatgtttttatatcattgagtatcttagtttaaaacaatttaaaaaaaactatttttgttttgtaatatcttcaaaagaatgaaaggacaattttatgacaatactgcagacacagaatggctaacaaatatayaattttacataaaaaacayttagcacattctggtttatatcaaagtttagttgatacagtttatttgtcaaccctcagtctctctctgaatcaggactttcaaactcagctcaattacactgctactcaagtttcaaaaaaggtcctcagttgcttctggcagctaattttttctttagttttaaaatactctctcatgtcctttatcctctggtcaaattattttatttccttgactttaatgtggtttcctgatttgcattttcattctcccacccatttctaaagaaaaactgaggtccaaagttacattatataatttcattgaagaatatttggcacaggtgacgcaccatatgatcattacatctattaaaaagctatttgttcaaattttgtcataaaaatgtgaaaacattttattctatgtacaataatgtacacaaatttaaacaggtcaccaaagagaccagaartaattaaagaggtatatttacagtagcacatcacagtaaacggaaaaccattcacagattcaacattgatactgtttttg

SEQ ID NO: 1391 - DNA, 1923 bp, Homo sapiens
cagccggagccgcggtgtacaacggaacttgtagtctcctcgtggctagttcaggcggaaggagcagtcctctgaagcttgaggagcctctagaactatgagcccgaggccttcccctctcccagagcgcagaggctttgaaggctacctctgggaagccgctcaccgtcggaagctgcgggagctgaaactgcgccatcgtcactgtcggcggccatgacaccgctcgtctcccgcctgagtcgtctgtgggccatyatgaggaagccacgagcagccrtgggaagtggtcacaggaagcaggcagccagccaggaagggaggcagaagcatgctaagaacaacagtcaggccaagccttctgcctgtgatgggatgattgctgagtgtcctggggccccagcaggcctggccaggcagccggaagaggtggtattgcaggcctctgtctcctcataccatctattcagagacgtagctgaagtcacagccttcygagggagcctgctaagcyggtacgaccaagagaaacgggacctaccatggagaagacgggcagaagatgagatggacctggacaggcgggcatatgctgtgtgggtctcagaggtcatgctgcagcagacccaggttgccactgtgatcaactactataccggatggatgcagaagtggcctacactgcaggacctggccagtgcttccctggaggaggtgaatcaactctgggctggcctgggctactattctcgtggccggcggctgcaggagggagctcggaaggtggtagaggagctagggggccacatgccacgtacagcagagaccctgcagcagctcctgcctggcgtggggcgctacacagctggggccattgcctctatcgcctttggccaggcaaccggtgtggtggatggcaacgtagcacgggtgctgtgccgtgtccgagccattggtgctgatcccagcagcacccttgtttcccagcagctctggggtctagcccagcagctggtggacccagcccggccaggagatttcaaccaagcagccatggagctaggggccacagtgtgtaccccacagcgcccactgtgcagccagtgccctgtggagagcctgtgccgggcacgccagagagtggagcaggaacagctcttagcctcagggagcctgtcgggcagtcctgacgtggaggagtgtgctcccaacactggacastgccacctgtgcctgcctccctcggagccctgggaccagaccctgggagtggtcaacttccccagaaaggccagccgcaagccccccagggaggagagctctgccacctgtgttctggaacagcctggggcccttggggcccaaattctgctggtgcagaggcccaactcagrtctgctggcaggactgtgggagttcccgtccgtgacctgggagccctcagagcagcttcagcgcaaggccctgctgcaggaactacagcgttgggctgggcccctcccagccacgcacctccggcaccttggggaggttgtccacaccttctctcacatcaagctgacatatcaagtatatgggctggccttggaagggcagaccccagtgaccaccgtaccaccaggtgctcgctggctgacgcaggaggaatttcacaccgcagctgtttccaccgccatgaaaaaggttttccgtgtgtatcagggccaacagccagggacctgtatgggttccaaaaggtcccaggtgtcctctccgtgcagtcggaaaaagccccgcatgggccagcaagtcctggataatttctttcggtctcacatctccactgatgcacacagcctcaacagtgcagcccagtgacacctctgaaagcccccattccctgagaatcctgttgttagtaaagtgcttatttttgtagttatt

SEQ ID NO: 1392 - DNA, 2044 bp, Homo sapiens
aaggagcagtcctctgaagcttgaggagcctctagaactatgagcccgaggccttcccctctcccagagcgcagaggctttgaaggctacctctgggaagccgctcaccgtcggaagctgcgggagctgaaactgcgccatcgtcactgtcggcggccatgacaccgctcgtctcccgcctgagtcgtctgccatyatgaggaagccacgagcagccrtgggaagtggtcacaggaagcaggcagccagccaggaagggaggcagaagcatgctaagaacaacagtcaggccaagccttctgcctgtgatgggatgattgctgagtgtcctggggccccagcaggcctggccaggcagccggaagaggtggtattgcaggcctctgtctcctcataccatctattcagagacgtagctgaagtcacagccttcygagggagcctgctaagcyggtacgaccaagagaaacgggacctaccatggagaagacgggcagaagatgagatggacctggacaggcgggcatatgctgtgtgggtctcagaggtcatgctgcagcagacccaggttgccactgtgatcaactactataccggatggatgcagaagtggcctacactgcaggacctggccagtgcttccctggaggaggtgaatcaactctgggctggcctgggctactattctcgtggccggcggctgcaggagggagctcggaaggtggtagaggagctagggggccacatgccacgtacagcagagaccctgcagcagctcctgcctggcgtggggcgctacacagctggggccattgcctctatcgcctttggccaggcaaccggtgtggtggatggcaacgtagcacgggtgctgtgccgtgtccgagccattggtgctgatcccagcagcacccttgtttcccagcagctctggggtctagcccagcagctggtggacccagcccggccaggagatttcaaccaagcagccatggagctaggggccacagtgtgtaccccacagcgcccactgtgcagccagtgccctgtggagagcctgtgccgggcacgccagagagtggagcaggaacagctcttagcctcagggagcctgtcgggcagtcctgacgtggaggagtgtgctcccaacactggacastgccacctgtgcctgcctccctcggagccctgggaccagaccctgggagtggtcaacttccccagaaaggccagccgcaagccccccagggaggagagctctgccacctgtgttctggaacagcctggggcccttggggcccaaattctgctggtgcagaggcccaactcagrtctgctggcaggactgtgggagttcccgtccgtgacctgggagccctcagagcagcttcagcgcaaggccctgctgcaggaactacagcgttgggctgggcccctcccagccacgcacctccggcaccttggggaggttgtccacaccttctctcacatcaagctgacatatcaagtatatgggctggccttggaagggcagaccccagtgaccaccgtaccaccaggtgctcgctggctgacgcaggaggaatttcacaccgcagctgtttccaccgccatgaaaaaggttttccgtgtgtatcagggccaacagccagggacctgtatgtagagacagggtttcaccatgttgactaggctggtctcgaactcctgacctcaagtgatctgcccatcttggcctcccaaagtgctgggattacaggcgtgagccaccacacccatccatgggagctatcagttctaattgggagacggatcaggaaaggctgtttggaggaagcagctgggttccaaaaggtcccaggtgtcctctccgtgcagtcggaaaaagccccgcatgggccagcaagtcctggataatttctttcggtctcacatctccactgatgcacacagcctcaacagtgcagcccagtgacacctctgaaagcccccattccctgagaatcctgttgttagtaaagtgcttatttttgtagttatttta

SEQ ID NO: 1393 - DNA, 1684 bp, Homo sapiens
atagaggccaggtgcggtggctcgcgcttacattcctagcactttgggaggccaaggcgggcggatcacctgaggtcaggcgttggagaccagcctagccaacatgatgaaacctcgtctctactaaaaatacaaaaaattagctgggcgtggtggtgcgtgcttgtagtcccagacactccggaggtgaggcgggagaatcgcttgagcccgggaggtggaggttgcagtaagccaacaccgtgccactgcactacagcctgggcgacaggctgataggaagatgtcttcaggaaatgctaaaattgggcaccctgcccccaacttcaaagccacagctgttatgccagatggtcagtttaaagatatcagcctgtctgactacaaaggaaaatatgttgtgttcttcttttaccctcttgacttcacctttgtgtgccccacggagatcattgctttcagtgatagggcagaagaatttaagaaactcaactgccaagtgattggtgcttctgtggattctcacttctgtcatctagcatgggtcaatacacctaagaaacaaggaggactgggacccatgaacattcctttggtatcagacccgaagcgcaccattgctcaggattatggggtcttaaaggctgatgaaggcatctcgttcaggggcctttttatcattgatgataagggtattcttcggcagatcactgtaaatgacctccctgttggccgctctgtggatgagactttgagactagttcaggccttccagttcactgacaaacatggggaagtgtgcccagctggctggaaacctggcagtgataccatcaagcctgatgtccaaaagagcaaagaatatttctccaagcagaagtgagcgctgggctgttttagtgccaggctgcggtgggcagccatgagaacaaaacctcttctgtattttttttttccattagtaaaacacaagacttcagattcagccgaattgtggtgtcttacaaggcaggcctttcytacagggggtggaatgtattagtagagcaacccattaatcttttgtagtttgtattaaacttgaactgagaccttgatgagtctttattttaggaagcatattattagcttttgattttaagaggaatttactccttgctttccctgttttggggaaaatgaggagagctgcctccaaatcagggaattatattgacacaggtagayatagggaatggaactgaatgaacccaaggtgttacattttgtttcactacacatgagggagaagaataagccctgctatagtgttggccagagcactgcgactgacgccacaggstgggttaccagttaaagtctcagtgtgactacttggacacctatttttgtttagacacactattcaaagggctgcatgggaaccagaagcttggcctcttctgataaatgcctggtacctgctatgtaaaagagctggaggtttctgttctttttgaactgacagaggaaagaggaagacaaggctggtggccttgggtagggctttcagtagttgcacagtaytgggcaattcttagccttcccttggttcyagccttgattagagatagtcttttttagtgtcattatgttgcccagagtggttctgaattccttgcctcaggyggtcctccgcctcagc

SEQ ID NO: 1394 - DNA, 1754 bp, Homo sapiens
atagaggccaggtgcggtggctcgcgcttacattcctagcactttgggaggccaaggcgggcggatcacctgaggtcaggcgttggagaccagcctagccaacatgatgaaacctcgtctctactaaaaatacaaaaaattagctgggcgtggtggtgcgtgcttgtagtcccagacactccggaggtgaggcgggagaatcgcttgagcccgggaggtggaggttgcagtaagccaacaccgtgccactgcactacagcctgggcgacaggctgataggaagatgtcttcaggaaatgctaaaattgggcaccctgcccccaacttcaaagccacagctgttatgccagatggtcagtttaaagatatcagcctgtctgactacaaaggaaaatatgttgtgttcttcttttaccctcttgacttcacctttgtgtgccccacggagatcattgctttcagtgatagggcagaagaatttaagaaactcaactgccaagtgattggtgcttctgtggattctcacttctgtcatctagcatgggtcaatacacctaagaaacaaggaggactgggacccatgaacattcctttggtatcagacccgaagcgcaccattgctcaggattatggggtcttaaaggctgatgaaggcatctcgttcaggggcctttttatcattgatgataagggtattcttcggcagatcactgtaaatgacctccctgttggccgctctgtggatgagactttgagactagttcaggccttccagttcactgacaaacatggggaagtgtgcccagctggctggaaacctggcagtgataccatcaagcctgatgtccaaaagagcaaagaatatttctccaagcagaagtgagcgctgggctgttttagtgccaggctgcggtgggcagccatgagaacaaaacctcttctgtattttttttttccattagtaaaacacaagacttcagattcagccgaattgtggtgtcttacaaggcaggcctttcytacagggggtggagagaccagcctttcttcctttggtaggaatggcctgagttggcgttgtgggcaggctactggtttgtatgatgtattagtagagcaacccattaatcttttgtagtttgtattaaacttgaactgagaccttgatgagtctttattttaggaagcatattattagcttttgattttaagaggaatttactccttgctttccctgttttggggaaaatgaggagagctgcctccaaatcagggaattatattgacacaggtagayatagggaatggaactgaatgaacccaaggtgttacattttgtttcactacacatgagggagaagaataagccctgctatagtgttggccagagcactgcgactgacgccacaggstgggttaccagttaaagtctcagtgtgactacttggacacctatttttgtttagacacactattcaaagggctgcatgggaaccagaagcttggcctcttctgataaatgcctggtacctgctatgtaaaagagctggaggtttctgttctttttgaactgacagaggaaagaggaagacaaggctggtggccttgggtagggctttcagtagttgcacagtaytgggcaattcttagccttcccttggttcyagccttgattagagatagtcttttttagtgtcattatgttgcccagagtggttctgaattccttgcctcaggyggtcctccgcctcagc

SEQ ID NO: 1395 - DNA, 1745 bp, Homo sapiens
gcctggtgtcggtggttagtttctgcgacttgtgttgggactggtgagtgtgggcagtgcggcccctgcggagtgaggcgcggcgcgcccttcttgcctgttgcctcttcctcctcctgtccggggcccgcccgcgctcgggtgggggtgctgtgatgcgtgaggcagccgggggaggcccggagtccgagactgcttgagcgctgcgcacacccctctcgtgggccccccacgtaggtgcgggaacctggttgaaccccaagctgataggaagatgtcttcaggaaatgctaaaattgggcaccctgcccccaacttcaaagccacagctgttatgccagatggtcagtttaaagatatcagcctgtctgactacaaaggaaaatatgttgtgttcttcttttaccctcttgacttcacctttgtgtgccccacggagatcattgctttcagtgatagggcagaagaatttaagaaactcaactgccaagtgattggtgcttctgtggattctcacttctgtcatctagcatgggtcaatacacctaagaaacaaggaggactgggacccatgaacattcctttggtatcagacccgaagcgcaccattgctcaggattatggggtcttaaaggctgatgaaggcatctcgttcaggggcctttttatcattgatgataagggtattcttcggcagatcactgtaaatgacctccctgttggccgctctgtggatgagactttgagactagttcaggccttccagttcactgacaaacatggggaagtgtgcccagctggctggaaacctggcagtgataccatcaagcctgatgtccaaaagagcaaagaatatttctccaagcagaagtgagcgctgggctgttttagtgccaggctgcggtgggcagccatgagaacaaaacctcttctgtattttttttttccattagtaaaacacaagacttcagattcagccgaattgtggtgtcttacaaggcaggcctttcytacagggggtggagagaccagcctttcttcctttggtaggaatggcctgagttggcgttgtgggcaggctactggtttgtatgatgtattagtagagcaacccattaatcttttgtagtttgtattaaacttgaactgagaccttgatgagtctttattttaggaagcatattattagcttttgattttaagaggaatttactccttgctttccctgttttggggaaaatgaggagagctgcctccaaatcagggaattatattgacacaggtagayatagggaatggaactgaatgaacccaaggtgttacattttgtttcactacacatgagggagaagaataagccctgctatagtgttggccagagcactgcgactgacgccacaggstgggttaccagttaaagtctcagtgtgactacttggacacctatttttgtttagacacactattcaaagggctgcatgggaaccagaagcttggcctcttctgataaatgcctggtacctgctatgtaaaagagctggaggtttctgttctttttgaactgacagaggaaagaggaagacaaggctggtggccttgggtagggctttcagtagttgcacagtaytgggcaattcttagccttcccttggttcyagccttgattagagatagtcttttttagtgtcattatgttgcccagagtggttctgaattccttgcctcaggyggtcctccgcctcagc

SEQ ID NO: 1396 - DNA, 1890 bp, Homo sapiens
tcggtggttagtttctgcgacttgtgttgggactggtgagtgtgggcagtgcggcccctgcggagtgaggcgcggcgcgcccttcttgcctgttgcctcttcctcctcctgtccggggcccgcccgcgctcgggtgggggtgctgtgatgcgtgaggcagccgggggaggcccggagtccgagactgcttgagcgctgcgcacacccctctcgtgggccccccacgtaggtgcgggaacctggttgaaccccaaggcaagcgtggactcgagtcgagtcttcccccggcaactcgagcacgtggcgcggcgtctgggcgggctggtggtgggggtctccgagactagcctcctgccggacggggtgggttcgggaagcttctggaatggacctgtatccagactcgtggctgtagaagacagcctctatgtatttggctgttccgggtcctgagccttgactagctgcggagcttcggctgataggaagatgtcttcaggaaatgctaaaattgggcaccctgcccccaacttcaaagccacagctgttatgccagatggtcagtttaaagatatcagcctgtctgactacaaaggaaaatatgttgtgttcttcttttaccctcttgacttcacctttgtgtgccccacggagatcattgctttcagtgatagggcagaagaatttaagaaactcaactgccaagtgattggtgcttctgtggattctcacttctgtcatctagcatgggtcaatacacctaagaaacaaggaggactgggacccatgaacattcctttggtatcagacccgaagcgcaccattgctcaggattatggggtcttaaaggctgatgaaggcatctcgttcaggggcctttttatcattgatgataagggtattcttcggcagatcactgtaaatgacctccctgttggccgctctgtggatgagactttgagactagttcaggccttccagttcactgacaaacatggggaagtgtgcccagctggctggaaacctggcagtgataccatcaagcctgatgtccaaaagagcaaagaatatttctccaagcagaagtgagcgctgggctgttttagtgccaggctgcggtgggcagccatgagaacaaaacctcttctgtattttttttttccattagtaaaacacaagacttcagattcagccgaattgtggtgtcttacaaggcaggcctttcytacagggggtggaatgtattagtagagcaacccattaatcttttgtagtttgtattaaacttgaactgagaccttgatgagtctttattttaggaagcatattattagcttttgattttaagaggaatttactccttgctttccctgttttggggaaaatgaggagagctgcctccaaatcagggaattatattgacacaggtagayatagggaatggaactgaatgaacccaaggtgttacattttgtttcactacacatgagggagaagaataagccctgctatagtgttggccagagcactgcgactgacgccacaggstgggttaccagttaaagtctcagtgtgactacttggacacctatttttgtttagacacactattcaaagggctgcatgggaaccagaagcttggcctcttctgataaatgcctggtacctgctatgtaaaagagctggaggtttctgttctttttgaactgacagaggaaagaggaagacaaggctggtggccttgggtagggctttcagtagttgcacagtaytgggcaattcttagccttcccttggttcyagccttgattagagatagtcttttttagtgtcattatgttgcccagagtggttctgaattccttgcctcaggyggtcctccgcctcagc

SEQ ID NO: 1397 - DNA, 1585 bp, Homo sapiens
gcgagatccctactggctataaaggcagcgccccggagagctcttgcgcgtcttgttcttgcctggtgtcggtggttagtttctgcgacttgtgttgggactgctgataggaagatgtcttcaggaaatgctaaaattgggcaccctgcccccaacttcaaagccacagctgttatgccagatggtcagtttaaagatatcagcctgtctgactacaaaggaaaatatgttgtgttcttcttttaccctcttgacttcacctttgtgtgccccacggagatcattgctttcagtgatagggcagaagaatttaagaaactcaactgccaagtgattggtgcttctgtggattctcacttctgtcatctagcatgggtcaatacacctaagaaacaaggaggactgggacccatgaacattcctttggtatcagacccgaagcgcaccattgctcaggattatggggtcttaaaggctgatgaaggcatctcgttcaggggcctttttatcattgatgataagggtattcttcggcagatcactgtaaatgacctccctgttggccgctctgtggatgagactttgagactagttcaggccttccagttcactgacaaacatggggaagtgtgcccagctggctggaaacctggcagtgataccatcaagcctgatgtccaaaagagcaaagaatatttctccaagcagaagtgagcgctgggctgttttagtgccaggctgcggtgggcagccatgagaacaaaacctcttctgtattttttttttccattagtaaaacacaagacttcagattcagccgaattgtggtgtcttacaaggcaggcctttcytacagggggtggagagaccagcctttcttcctttggtaggaatggcctgagttggcgttgtgggcaggctactggtttgtatgatgtattagtagagcaacccattaatcttttgtagtttgtattaaacttgaactgagaccttgatgagtctttattttaggaagcatattattagcttttgattttaagaggaatttactccttgctttccctgttttggggaaaatgaggagagctgcctccaaatcagggaattatattgacacaggtagayatagggaatggaactgaatgaacccaaggtgttacattttgtttcactacacatgagggagaagaataagccctgctatagtgttggccagagcactgcgactgacgccacaggstgggttaccagttaaagtctcagtgtgactacttggacacctatttttgtttagacacactattcaaagggctgcatgggaaccagaagcttggcctcttctgataaatgcctggtacctgctatgtaaaagagctggaggtttctgttctttttgaactgacagaggaaagaggaagacaaggctggtggccttgggtagggctttcagtagttgcacagtaytgggcaattcttagccttcccttggttcyagccttgattagagatagtcttttttagtgtcattatgttgcccagagtggttctgaattccttgcctcaggyggtcctccgcctcagc

SEQ ID NO: 1398 - DNA, 1960 bp, Homo sapiens
tcggtggttagtttctgcgacttgtgttgggactggtgagtgtgggcagtgcggcccctgcggagtgaggcgcggcgcgcccttcttgcctgttgcctcttcctcctcctgtccggggcccgcccgcgctcgggtgggggtgctgtgatgcgtgaggcagccgggggaggcccggagtccgagactgcttgagcgctgcgcacacccctctcgtgggccccccacgtaggtgcgggaacctggttgaaccccaaggcaagcgtggactcgagtcgagtcttcccccggcaactcgagcacgtggcgcggcgtctgggcgggctggtggtgggggtctccgagactagcctcctgccggacggggtgggttcgggaagcttctggaatggacctgtatccagactcgtggctgtagaagacagcctctatgtatttggctgttccgggtcctgagccttgactagctgcggagcttcggctgataggaagatgtcttcaggaaatgctaaaattgggcaccctgcccccaacttcaaagccacagctgttatgccagatggtcagtttaaagatatcagcctgtctgactacaaaggaaaatatgttgtgttcttcttttaccctcttgacttcacctttgtgtgccccacggagatcattgctttcagtgatagggcagaagaatttaagaaactcaactgccaagtgattggtgcttctgtggattctcacttctgtcatctagcatgggtcaatacacctaagaaacaaggaggactgggacccatgaacattcctttggtatcagacccgaagcgcaccattgctcaggattatggggtcttaaaggctgatgaaggcatctcgttcaggggcctttttatcattgatgataagggtattcttcggcagatcactgtaaatgacctccctgttggccgctctgtggatgagactttgagactagttcaggccttccagttcactgacaaacatggggaagtgtgcccagctggctggaaacctggcagtgataccatcaagcctgatgtccaaaagagcaaagaatatttctccaagcagaagtgagcgctgggctgttttagtgccaggctgcggtgggcagccatgagaacaaaacctcttctgtattttttttttccattagtaaaacacaagacttcagattcagccgaattgtggtgtcttacaaggcaggcctttcytacagggggtggagagaccagcctttcttcctttggtaggaatggcctgagttggcgttgtgggcaggctactggtttgtatgatgtattagtagagcaacccattaatcttttgtagtttgtattaaacttgaactgagaccttgatgagtctttattttaggaagcatattattagcttttgattttaagaggaatttactccttgctttccctgttttggggaaaatgaggagagctgcctccaaatcagggaattatattgacacaggtagayatagggaatggaactgaatgaacccaaggtgttacattttgtttcactacacatgagggagaagaataagccctgctatagtgttggccagagcactgcgactgacgccacaggstgggttaccagttaaagtctcagtgtgactacttggacacctatttttgtttagacacactattcaaagggctgcatgggaaccagaagcttggcctcttctgataaatgcctggtacctgctatgtaaaagagctggaggtttctgttctttttgaactgacagaggaaagaggaagacaaggctggtggccttgggtagggctttcagtagttgcacagtaytgggcaattcttagccttcccttggttcyagccttgattagagatagtcttttttagtgtcattatgttgcccagagtggttctgaattccttgcctcaggyggtcctccgcctcagc

SEQ ID NO: 1399 - DNA, 917 bp, Homo sapiens
gcctgtagggttgcggctgtcactggctacaggcggcatctttctgtaaaaagcttttcaggcatgaaacccatttctgtatggactgggctgtgttgacggtggtgcttgggccttgtgtgccaggcctctctgggtcccctccctggcctttgccttcctctcaccttctcgaggccaagctgtgcgagacctggcattccttccaaacctcagttcctccacgcccctgcgctggtaaggaactcaacgcaaggcttcacagctttccaaggacagggaccggctctggagtggccgtgcgtgagatgtcaggcacgctcacacgcagggtcctgtgttggctcctgacccagcagggggacatggtgggcggatgtaccagcccttctggataacatgacagtcccaatttcaggaaagtttttattttaaatattggtgattctttaaccaggaatgcaaatgctactgaagtgctgtgtgtgtctctgtgagagccttcatataaataaattcatgcatctaaagagtccctggtcaggccgcatgctgatattcaatttggggaatggtgatgccaycacatgcatctgggggaggcagcagggaggcgtagggactttgtgtggcctgctctatcacagctcctgggagaattacagatctgagcccagggcatctctgggcttttggaaagggttcctgcttttcctgagttcccatggctgccctgctgccggggctgactaagcaggcggggctggctttctcagtgcatattttacatttttctccttcaaagagaagccagggagacaagctggagctacagaaggtgctctgtggggacttgggccgggtcagcaaccaagcccccacctgccccttgtggggtgagggcttggctcctcccc

SEQ ID NO: 1400 - DNA, 2915 bp, Homo sapiens
cgcccgggcagccacggcggcggggccgcggcgggcgccggctcagcccgcccctttctcccgccgcctccccgccccgccccgcgccgcgccggccgctgtcagctccctcagcgtccggccgaggcgcggtgtatgctgagccgctgccgcagcgggctgctccacgtcctgggccttagcttcctgctgcagacccgccggccgattctcctctgctctccacgtctcatgaagccgctggtcgtgttcgtcctcggcggccccggcgccggcaaggggacccagtgcgcccgcatcgtcgagaaatatggctacacacacctttctgcaggagagctgcttcgtgatgaaaggaagaacccagattcacaktatggtgaacttattgaaaagtacattaaagaaggaaagattgtaccagttgagataaccatcagtttattaaagagggaaatggatcagacaatggctgccaatgctcagaagaataaattcttgattgatgggtttccaagaaatcaagacaaccttcaaggatggaacaagaccatggatgggaaggcagatgtatctttcgttctcttttttgactgtaataatgagatttgtattgarcgatgtcttgagaggggaaagagtagtggtaggagtgatgacaacagagagagcttggaaaagagaattcagacctaccttcagtcaacaaagccaattattgacttatatgaagaaatggggaaagtcaagaaaatagatgcttctaaatctgttgatgaagtttttgatgaagttgtgcagatttttgacaaggaaggctaattctaaacctgaaagcatccttgaaatcatgcttgaatattgctttgatagctgctatcatgacccctttttaaggcaattctaatctttcataactacatctcaattagtggctggaaagtacatggtaaaacaaagtaaatttttttatgttcttttttttggtcacaggagtagacagtgaattcaggtttaacttcaccttagttatggtgctcaccaaacgaagggtatcagctattttttttwaaattcaaaaagaatatcccttttatagtttgtgccttctgtgagcaaaactttttagtacgcgtatatatccctctagtaatcacaacattttaggatttagggataccygcttcctctttttcttgcaagttttaaatttccaaccttaagtgaatttgtggaccaaatttcaaaggaactttttgtgtagtcagttcttgcacaatgtgtttggtaaacaaactcaaaatggattcttaggagcattttagtgtttattaaataactgaccatttgctgtagaaagatgagaaaacttaagctttgttttactacaacttgtacaaagttgtatgacagggcatattctttgcttccaagatttgggttgggggcactaggggttcagagcctggcagaattgtcagctttagtctgacataatctaagggtatggggcaaggatcacatctaatgcttgtgttccttatactctattatatagtgttattcatgattcagctgatcttaacaaaattcgtagcagtggaaccttgaaatgcatgtggctagatttatgctaaaatgattctcagttagcattttagtaacacttcaaaggtttttttttgtttgttttctagacttaataaaagcttaggattaattagaagaagcaatctagttaaatttcccatttgtatwttattttcttgaatacttttttcatagttatttgtttaaaaagatttaaaaatcattgcactttggtcagaaaaataataaatatatcttataaatgtttgattcccttccttgctatttttattcagtagatttttgtttggcatcatgttgaagcaccgaaagataaatgatttttaaaaggctatagagtccaaaggaatattcttttacaccaattcttcctttaaaaatctctgaggaatttgttttcgccttacttttttttcttctgtcacaatgctaagtggtatccgaggttcttaatatgagatttaaaatcttaaaatgtttcttattttcagcacttacatcatttggtacacagggtcaaatagggcaaataattttgtctttgtataatagatttgatatttaaagtcactggaaataggacaagttaatggatgtttttatattttaatagaatcatttatttctatgtgttatgaaattcacttaatgataaatttttcaacatacttgccattagaaaacaaagtattgctaagtactataacatattggccactaaaattcatattgagattatcttggtttcttggaagagataggaatgagttcttatctagtgttgcaggccagcaaatacagaggtggtttratcaaacagctctagtatgaagcaagagtaaagactaaggtttcgagagcattcctactcacataagtgaagaaatctgtcagataggaatctaaatatttatagtgagattgtgaaagcaaccttaaagttttgaagaagactgatgagactaggtgctttgcttcctttcatcaggtatctttctgtggcatttgagaacagaaaccaagaaacatggtaattactaaattatgaggctttgctttttgtttgcttttaagtagaaaaacatgttggcaacattgagttttggagttgattgagataatatgacttaactagttttgtcattccatttgttaaagatacagtcaccaagaatgttttgagttttttgaaagaccccaatttaagccttgcttatttttaaattatttccattcagtgatgttggatgtatatcarttatttagtaaataatctcaataaattttgtgctgtggcctttgct

SEQ ID NO: 1401 - DNA, 2445 bp, Homo sapiens
cgcccgggcagccacggcggcggggccgcggcgggcgccggctcagcccgcccctttctcccgccgcctccccgccccgccccgcgccgcgccggccgctgtcagctccctcagcgtccggccgaggcgcggtgtatgctgagccgctgccgcagcgggctgctccacgtcctgggccttagcttcctgctgcagacccgccggccgattctcctctgctctccacgtctcatgaagccgctggtcgtgttcgtcctcggcggccccggcgccggcaaggggacccagtgcgcccgcatcgtcgagaaatatggctacacacacctttctgcaggagagctgcttcgtgatgaaaggaagaacccagattcacaktatggtgaacttattgaaaagtacattaaagaaggaaagattgtaccagttgagataaccatcagtttattaaagagggaaatggatcagacaatggctgccaatgctcagaagaataaattcttgattgatgggtttccaagaaatcaagacaaccttcaaggatggaacaagaccatggatgggaaggcagatgtatctttcgttctcttttttgactgtaataatgagatttgtattgarcgatgtcttgagaggggaaagagtagtggtaggagtgatgacaacagagagagcttggaaaagagaattcagacctaccttcagtcaacaaagccaattattgacttatatgaagaaatggggaaagtcaagaaaatagatgcttctaaatctgttgatgaagtttttgatgaagttgtgcagatttttgacaaggaaggctaattctaaacctgaaagcatccttgaaatcatgcttgaatattgctttgatagctgctatcatgacccctttttaaggcaattctaatctttcataactacatctcaattagtggctggaaagtacatggtaaaacaaagtaaatttttttatgttcttttttttggtcacaggagtagacagtgaattcaggtttaacttcaccttagttatggtgctcaccaaacgaagggtatcagctattttttttwaaattcaaaaagaatatcccttttatagtttgtgccttctgtgagcaaaactttttagtacgcgtatatatccctctagtaatcacaacattttaggatttagggataccygcttcctctttttcttgcaagttttaaatttccaaccttaagtgaatttgtggaccaaatttcaaaggaactttttgtgtagtcagttcttgcacaatgtgtttggtaaacaaactcaaaatggattcttaggagcattttagtgtttattaaataactgaccatttgctgtagaaagatgagaaaacttaagctttgttttactacaacttgtacaaagttgtatgacagggcatattctttgcttccaagatttgggttgggggcactaggggttcagagcctggcagaattgtcagctttagtctgacataatctaagggtatggggcaaggatcacatctaatgcttgtgttccttatactctattatatagtgttattcatgattcagctgatcttaacaaaattcgtagcagtggaaccttgaaatgcatgtggctagatttatgctaaaatgattctcagttagcattttagtaacacttcaaaggtttttttttgtttgttttctagacttaataaaagcttaggattaattagaagaagcaatctagttaaatttcccatttgtatwttattttcttgaatacttttttcatagttatttgtttaaaaagatttaaaaatcattgcactttggtcagaaaaataataaatatatcttataaatgtttgattcccttccttgctatttttattcagtagatttttgtttggcatcatgttgaagcaccgaaagataaatgatttttaaaaggctatagagtccaaaggaatattcttttacaccaattcttcctttaaaaatctctgaggaatttgttttcgccttacttttttttcttctgtcacaatgctaagtggtatccgaggttcttaatatgagatttaaaatcttaaaatgtttcttattttcagcacttacatcatttggtacacagggtcaaatagggcaaataattttgtctttgtataatagatttgatatttaaagtcactggaaataggacaagttaatggatgtttttatattttaatagaatcatttatttctatgtgttatgaaattcacttaatgataaatttttcaacatacttgccattagaaaacaaagtattgctaagtactataacatattggccactaaaattcatattgcagaggtggtttratcaaacagctctagtatgaagcaagagtaaagactaaggtttcgagagcattcctactcacataagtgaagaaatctgtcagatagga

SEQ ID NO: 1402 - DNA, 947 bp, Homo sapiens
tcaagtctgttttcctcgcagcggtgcccacacacctagcatactgcctggcacacagtaaatgctcattaaatatttgtgaggtacatggacaggggaatgtggtagacagctgatgaagcttttctcccactgttgccctaggtggatcatccatagtcaattgattctgaactctgaggtccaagttctgccctcctccttcactctccccacaagtgggcgggacaatcctccctggatttgagcacagggggacgggggtggtcagagagaggtaggggcactcagagatccagcaggtgctgcaccatgagtgtctctgtgctgagccccagcagactcctgggtgatgtctctggaatcctccaagcggcctccctgctcattctgcttctgctgctgatcaaggcagttcagctctacctgcacaggcagtggctgctcaaagccctccagcagttcccgtgccctccctcccactggctcttcgggcacatccaggagctccaacaggaccaggagctacaacggattcagaaatgggtggagacattcccaagtgcctgtcctyattggctatggggaggcaaagttcgtgtccagctctatgaccctgactatatgaaggtgattctggggagatcagacccgaaatcccatggwtcctacarattcctggctccayggattgggtacggcttgctcctgttgaatgggcagacatggttccagcatcgacggatgctgaccccagccttccacwatgacatcctgaagccctatgtggggctcatggcagactctgtacgagtgatgctggacaaatgggaagagctccttggccaggattcccctctggagktctttcagcacgtctccttgatgaccctggacaccatcatgaagagtgccttcagccatcagggcagcatccaggtggacag

SEQ ID NO: 1403 - DNA, 3067 bp, Homo sapiens
  misc_feature (1)...(3067): n = A,T,C or G
tcaagtctgttttcctcgcagcggtgcccacacacctagcatactgcctggcacacagtaaatgctcattaaatatttgtgaggtacatggacaggggaatgtggtagacagctgatgaagcttttctcccactgttgccctaggtggatcatccatagtcaattgattctgaactctgaggtccaagttctgccctcctccttcactctccccacaagtgggcgggacaatcctccctggatttgagcacagggggacgggggtggtcagagagaggtaggggcactcagagatccagcaggtgctgcaccatgagtgtctctgtgctgagccccagcagactcctgggtgatgtctctggaatcctccaagcggcctccctgctcattctgcttctgctgctgatcaaggcagttcagctctacctgcacaggcagtggctgctcaaagccctccagcagttcccgtgccctccctcccactggctcttcgggcacatccaggagagatgttacacaacatgaagacaatggctgacttaaatttctgctggcagcattgagcgagggctcatagcgcttggcctaaggtcaagtcctggggagagagcaagaatctggatcacagctcaggtcatcagaaacagatctaaatccctaacctgcgctacatggctcctgtagttgtcctgcccttcactcctgctgcaaagactagaagtaaatgaaagtgttcatctgtctacccttgttgacagctccaacaggaccaggagctacaacggattcagaaatgggtggagacattcccaagtgcctgtcctyattggctatggggaggcaaagttcgtgtccagctctatgaccctgactatatgaaggtgattctggggagatcagacccgaaatcccatggwtcctacarattcctggctccayggattgggtacggcttgctcctgttgaatgggcagacatggttccagcatcgacggatgctgaccccagccttccacwatgacatcctgaagccctatgtggggctcatggcagactctgtacgagtgatgctggacaaatgggaagagctccttggccaggattcccctctggagktctttcagcacgtctccttgatgaccctggacaccatcatgaagagtgccttcagccatcagggcagcatccaggtggacaggaattctcagtcctacatccaggccattagtgacctgaacagcctggttttttgcygtatgaggaatgcctttcatgagaatgacaccatctacagcctgacctctgctggccgctggacacaccgcgcctgccagctggcccatcagcacacagaccaagtgatccaactgaggaaggctcaactacagaaggagggggagctggagaagatcaagaggaagaggcacttggattttctggacatcctcctcttggccaaaatggagaatgggagcatcttgtcagacaaggacctccgtgctgaggtggacacgttcatgtttgagggccangacaccacagccagtgggatctcctggatcctctatgctctggccacacaccccaagcatcaggagaggtgccgggaggagatccayngcctcctgggtgatggagcctccatcacctggaaccacctggaccagatgccctacaccaccatgtgcattaaggaggcactgaggctctacccacyggtgccaggcattggmagagagctcagcactcccgtcaccttccctgatgggcgctccttgcccaaaggtatcatggtcctcctctccatttatggccttcaccacaacccaaaagtgtggcccaaccyagaggtgtttgacccttcccgttttgcaccgggttctgctcaacacagccacgctttcctgcccttctcaggaggatcaaggaactgcatygggaaacaatttgccatgaaccagctgaaggtggccagggccctgaccctgctccgctttgagctgctgcctgatcccaccaggatccccatccccatkgcacgacttgtgttgaaatccaaaaatggaatccacctgcgtytcaggaggytccctaacccttgtgaagacaaggaccagctttgagggcctccacctgccrtcctgtcttcctgacccccactcctatctcctgcctgtctgcctctgtcctgctttctgtctgcccaccttcccttcttcccacctgcctgctgtcccccagtctgcctgcccttctctctctcacctttctccargctccctacctgcttgtmtacctgtctcctacccacctgtatmtcttgttgggagaaaagctgagtgttgggagaagctgaggccragcttgcatgtctgacataatgtaaaagagtcttgratcatgtccaggatccagggtctaaaaccccttgtggcctttggaacaccaagctctgtgctgaagggtggaaggctaccctgacgcaccataatctaagcccggggcataaaacccctcgtggcttggatagaatccagggctcgtggctctggaatgtgtctggacttgctgsctcctygctccttgctctcccaggatcaattgtatcttgagttaaaagaacctgctctccattatctcaagtaacagagcagatgctaaaccgtcacagctgtaaatyrtgtgcttaatgcaacatgccctttcgacccaccccccattctcaccacctgtttctttgtttgatcaccaataaataatctgcacttccagagctcggggccttcacagcctccatccttagctttggcgccctggacccactttctctctcaaactgtcttttctcactgctttgactctgccggactttgtcacccccacgacctggtgttgggtctgaacaccccaacatccctgaatctccacccacctcccaaactcctgcctgccctccagactgtctgcccatacacctgtctccttcttcctgcctgcttgtctgttcctatattagtttcctrttactgctgtaataaactatcacaatctcagtgattttaaataa

SEQ ID NO: 1404 - DNA, 2816 bp, Homo sapiens
  misc_feature (1)...(2816): n = A,T,C or G
tcaagtctgttttcctcgcagcggtgcccacacacctagcatactgcctggcacacagtaaatgctcattaaatatttgtgaggtacatggacaggggaatgtggtagacagctgatgaagcttttctcccactgttgccctaggtggatcatccatagtcaattgattctgaactctgaggtccaagttctgccctcctccttcactctccccacaagtgggcgggacaatcctccctggatttgagcacagggggacgggggtggtcagagagaggtaggggcactcagagatccagcaggtgctgcaccatgagtgtctctgtgctgagccccagcagactcctgggtgatgtctctggaatcctccaagcggcctccctgctcattctgcttctgctgctgatcaaggcagttcagctctacctgcacaggcagtggctgctcaaagccctccagcagttcccgtgccctccctcccactggctcttcgggcacatccaggagctccaacaggaccaggagctacaacggattcagaaatgggtggagacattcccaagtgcctgtcctyattggctatggggaggcaaagttcgtgtccagctctatgaccctgactatatgaaggtgattctggggagatcagacccgaaatcccatggwtcctacarattcctggctccayggattgggtacggcttgctcctgttgaatgggcagacatggttccagcatcgacggatgctgaccccagccttccacwatgacatcctgaagccctatgtggggctcatggcagactctgtacgagtgatgctggacaaatgggaagagctccttggccaggattcccctctggagktctttcagcacgtctccttgatgaccctggacaccatcatgaagagtgccttcagccatcagggcagcatccaggtggacaggaattctcagtcctacatccaggccattagtgacctgaacagcctggttttttgcygtatgaggaatgcctttcatgagaatgacaccatctacagcctgacctctgctggccgctggacacaccgcgcctgccagctggcccatcagcacacagaccaagtgatccaactgaggaaggctcaactacagaaggagggggagctggagaagatcaagaggaagaggcacttggattttctggacatcctcctcttggccaaaatggagaatgggagcatcttgtcagacaaggacctccgtgctgaggtggacacgttcatgtttgagggccangacaccacagccagtgggatctcctggatcctctatgctctggccacacaccccaagcatcaggagaggtgccgggaggagatccayngcctcctgggtgatggagcctccatcacctggaaccacctggaccagatgccctacaccaccatgtgcattaaggaggcactgaggctctacccacyggtgccaggcattggmagagagctcagcactcccgtcaccttccctgatgggcgctccttgcccaaaggtatcatggtcctcctctccatttatggccttcaccacaacccaaaagtgtggcccaaccyagaggtgtttgacccttcccgttttgcaccgggttctgctcaacacagccacgctttcctgcccttctcaggaggatcaaggaactgcatygggaaacaatttgccatgaaccagctgaaggtggccagggccctgaccctgctccgctttgagctgctgcctgatcccaccaggatccccatccccatkgcacgacttgtgttgaaatccaaaaatggaatccacctgcgtytcaggaggytccctaacccttgtgaagacaaggaccagctttgagggcctccacctgccrtcctgtcttcctgacccccactcctatctcctgcctgtctgcctctgtcctgctttctgtctgcccaccttcccttcttcccacctgcctgctgtcccccagtctgcctgcccttctctctctcacctttctccargctccctacctgcttgtmtacctgtctcctacccacctgtatmtcttgttgggagaaaagctgagtgttgggagaagctgaggccragcttgcatgtctgacataatgtaaaagagtcttgratcatgtccaggatccagggtctaaaaccccttgtggcctttggaacaccaagctctgtgctgaagggtggaaggctaccctgacgcaccataatctaagcccggggcataaaacccctcgtggcttggatagaatccagggctcgtggctctggaatgtgtctggacttgctgsctcctygctccttgctctcccaggatcaattgtatcttgagttaaaagaacctgctctccattatctcaagtaacagagcagatgctaaaccgtcacagctgtaaatyrtgtgcttaatgcaacatgccctttcgacccaccccccattctcaccacctgtttctttgtttgatcaccaataaataatctgcacttccagagctcggggccttcacagcctccatccttagctttggcgccctggacccactttctctctcaaactgtcttttctcactgctttgactctgccggactttgtcacccccacgacctggtgttgggtctgaacaccccaacatccctgaatctccacccacctcccaaactcctgcctgccctccagactgtctgcccatacacctgtctccttcttcctgcctgcttgtctgttcctatattagtttcctrttactgctgtaataaactatcacaatctcagtgattttaaataa

SEQ ID NO: 1405 - DNA, 555 bp, Homo sapiens
ataattttwaaaaaaaagtaaaagagaaaaaaaaaaagacagaatcttcgctcatgcacttacctgctttttcttctgtttactcaggaataactgtgtttatcaatatttgggctcttcaccacaacccctatttctgggaagaccctcaggtctttaaccccttgagattctccagggaaaattctgaaaaaatacatccctatgccttcataccattctcagctggattaaggaactgcattgggcagcattttgccataattgagtgtaaagtggcagtggcattaactctgctccgcttcaagctggctccagaccactcaaggcctccccagcctgttcgtcaagttgtcctcaagtccaagaatggaatccatgtgtttgcaaaaaaagtttgctaattttaagtcctttcgtrtaagaattaatgagacaattttcctaccaaaacttaggatacttctgactggttttgacatccattaacagtaattttaatttctttgctgtatctggtgaaacccacaaaaacacctgaaaaaactcaagctg

SEQ ID NO: 1406 - DNA, 1655 bp, Homo sapiens
gtttatttatgctctctacagatgtttttgaattcttatttattttttattccatgttttgtcagcttagtttttccatgataaaagtcatataaattgtactaatgaaacttgaaaaagagggaaaaatagctatttccccacccttacaaagtcacaaatagcatctaaggcacagtatcattttcagtactgacaaggtgtttyattttatatggttgtcataataaggcaaattcattttgtacrctttatattttcaaaccccagcaarctctaaaagggacataaaataacttagaaattgggaaaagatgggcatgtgtatgatcatgatattcatcccctgccccagaacaaatgggaggaacacattgcccaaaactcacgtctggagctctttcaacatgtctccctgatgaccctggacagcatcatgaagtgtgccttcagccaccagggcagcatccagttggacagtaccctggactcatacctgaaagcagtgttcaaccttagcaaaatctccaaccagcgcatgaacaattttctacatcacaacgacctggttttcaaattcagctctcaaggccaaatcttttctaaatttaaccaagaacttcatcagttcacagagaaagtaatccaggaccggaaggagtctcttaaggataagctaaaacaagatactactcagaaaaggcgctaggattttctggacatacttttgagtgccaaaagcgaaaacaccaaagatttctctgaagcagatctccaggctgaagtgaaaacgttcatgtttgcaggacatgacaccacatccagtgctatctcctggatcctttactgcttggcaaagtaccctgagcatcagcagagatgccgagatgaaatcagggaactcctaggggatgggtcttctattacctgggaacacctgagccagatgccttacaccacgatgtgcatcaaggaatgcctccgcctctacgcaccggtagtaaacatatcccgttatttatccttagactctgtggaacctagggycattcttatttcccagagagggagaaagaggakagagctctcaggactatccaaacaggcacaggattatcaaggtgcaaagctgctgcgggtaactttctgggcttcagacaatkctgttgagatcygcatggatgttggaataactgtgtttatcaatatttgggctcttcaccacaacccctatttctgggaagaccctcaggtctttaaccccttgagattctccagggaaaattctgaaaaaatacatccctatgccttcataccattctcagctggattaaggaactgcattgggcagcattttgccataattgagtgtaaagtggcagtggcattaactctgctccgcttcaagctggctccagaccactcaaggcctccccagcctgttcgtcaagttgtcctcaagtccaagaatggaatccatgtgtttgcaaaaaaagtttgctaattttaagtcctttcgtrtaagaattaatgagacaattttcctaccaaaacttaggatacttctgactggttttgacatccattaacagtaattttaatttctttgctgtatctggtgaaacccacaaaaacacctgaaaaaactcaagctg

SEQ ID NO: 1407 - DNA, 2281 bp, Homo sapiens
ccctgggtcttcctagccccgagactttcaagtccatatgcctggagtcccccctcctgagamccttaaccctgcatcctccrcaacagaagaccyccagatgcacagccacacttccatctcaccctaataaaacccagacctttggattcctctcccttggaatgcccaaatccacaactttggggtgcattctcactctcagaccccaaatccaaagcccaagtgctcccctatgcaaatattccaaactcttcagttctacagyttatckgttgccccctcctaaatccacagccctgcggcacccctcctgaagtaccacagatttagtctggaggccccctctctgttcagctgccctggggtccccttatcctcccttgctggctgtgtcccaagctaggtggcattcatggtggggcgtgtagttgggaggtgaaataaggtgattatgtaattagccaaagtccatccctctttttcaggcagtataaaggcaaaccaccccacccatcaccatctgtcatctcactaccaccatgctggcctcagggctgcttctggtggccttgctggcctgcctgactgtgatggtcttgatgtctgtctggcagcagaggaagagcagggggaagctgcctccgggacccaccccactgcccttcattggaaactacctccagctgaacacagagcacatatgtgactccatcatgaagatcagtgagcgctatggccccgtgttcaccattcacctggggccccggcgggtcgtggtgctgtgtggacatgatgccgtcagggaggctctggtggaccaggctgaggagttcagcgggcgaggcgagcaagccaccttcgactgggtcttcaaaggctatggcgtggygttcagcaacggggagcgcgccaagcagctcckgcgcttygccatcgccaccctgagggacttcggggtgggcaagcgaggcatcgaggagcgcatccaggaggagbcgggcttcctcatcgaggccatccggagcacgcacggcgccaatatcgakcccaccttcttcctgagccgcacagtctccaatgtcatcagctccattgtctttggggaccgctttgactatgaggacaaagagttcctgtcactgctgagcatgatgctaggaatcttccagttcacgtcaacctccacggggcagctctatgagatgttctcttcggtgatgaaacacctgccaggaccacagcaacaggcctttaagttgctgcaagggctggaggacttcatagccaagaaggtggagcacaaccagcgcacgctggatcccaattccccacaggacttcatcgactcctttctcatccrcatgcaggaggaggagaagaaccccaacacggagttctacttgaagaacctgatgatgagcacgttgaacctcttcattgsrggcaccgagacggtcagcrccaccctgygctatggcttcttgctgctcatgaagcacccagaggtggaggccaaggtccatgaggagattgacagagtgatcggcaagaaccggcagcccaagtttgaggaccggaccaagatgccctacatggaggcagtgatccacgagatccaaagatttggagacgtgatccccaygagtttggcccgcagggttaaaaaggacaccaagtttcgggattttttcctccctaagggcaccgaagtgttccctatgctgggctccgtgctgagagaccccagcttcttctccaaccctcaggacttcaatccccagcatttcctggatgacaaggggcagtttaagaagagtgatgcttttgtgcccttttccatcggaaagcggwactgtttcggagaaggcctggccagaatggagctctttctcttcttcaccaccgtcatgcagaacttccgcctcaagtcctcccagtmacctaaggacattgacgtgtcccccaaacacgtggkctttgccacgatcccacgaaactacaccatgagcttcctgccccgctgakcgagggctgtgccggtgmaggtctggtgggcggggccagggaaaggcrgggycargrcsgggttcgcggaagaggcgggyataagamtgggggsargatgcgggaaaggaaggggcgtggtggctagagggaagagaagaaacagaagsggctcagttcaccttgataaggtgcttccgagctgggatgagaggaagggaaaccttacattatgctatgaagagtagtaataatagcagctcttatttcctga

SEQ ID NO: 1408 - DNA, 2128 bp, Homo sapiens
ccctgggtcttcctagccccgagactttcaagtccatatgcctggagtcccccctcctgagamccttaaccctgcatcctccrcaacagaagaccyccagatgcacagccacacttccatctcaccctaataaaacccagacctttggattcctctcccttggaatgcccaaatccacaactttggggtgcattctcactctcagaccccaaatccaaagcccaagtgctcccctatgcaaatattccaaactcttcagttctacagyttatckgttgccccctcctaaatccacagccctgcggcacccctcctgaagtaccacagatttagtctggaggccccctctctgttcagctgccctggggtccccttatcctcccttgctggctgtgtcccaagctaggtggcattcatggtggggcgtgtagttgggaggtgaaataaggtgattatgtaattagccaaagtccatccctctttttcaggcagtataaaggcaaaccaccccacccatcaccatctgtcatctcactaccaccatgctggcctcagggctgcttctggtggccttgctggcctgcctgactgtgatggtcttgatgtctgtctggcagcagaggaagagcagggggaagctgcctccgggacccaccccactgcccttcattggaaactacctccagctgaacacagagcacatatgtgactccatcatgaaggtgtcccaaggcgtggygttcagcaacggggagcgcgccaagcagctcckgcgcttygccatcgccaccctgagggacttcggggtgggcaagcgaggcatcgaggagcgcatccaggaggagbcgggcttcctcatcgaggccatccggagcacgcacggcgccaatatcgakcccaccttcttcctgagccgcacagtctccaatgtcatcagctccattgtctttggggaccgctttgactatgaggacaaagagttcctgtcactgctgagcatgatgctaggaatcttccagttcacgtcaacctccacggggcagctctatgagatgttctcttcggtgatgaaacacctgccaggaccacagcaacaggcctttaagttgctgcaagggctggaggacttcatagccaagaaggtggagcacaaccagcgcacgctggatcccaattccccacaggacttcatcgactcctttctcatccrcatgcaggaggaggagaagaaccccaacacggagttctacttgaagaacctgatgatgagcacgttgaacctcttcattgsrggcaccgagacggtcagcrccaccctgygctatggcttcttgctgctcatgaagcacccagaggtggaggccaaggtccatgaggagattgacagagtgatcggcaagaaccggcagcccaagtttgaggaccggaccaagatgccctacatggaggcagtgatccacgagatccaaagatttggagacgtgatccccaygagtttggcccgcagggttaaaaaggacaccaagtttcgggattttttcctccctaagggcaccgaagtgttccctatgctgggctccgtgctgagagaccccagcttcttctccaaccctcaggacttcaatccccagcatttcctggatgacaaggggcagtttaagaagagtgatgcttttgtgcccttttccatcggaaagcggwactgtttcggagaaggcctggccagaatggagctctttctcttcttcaccaccgtcatgcagaacttccgcctcaagtcctcccagtmacctaaggacattgacgtgtcccccaaacacgtggkctttgccacgatcccacgaaactacaccatgagcttcctgccccgctgakcgagggctgtgccggtgmaggtctggtgggcggggccagggaaaggcrgggycargrcsgggttcgcggaagaggcgggyataagamtgggggsargatgcgggaaaggaaggggcgtggtggctagagggaagagaagaaacagaagsggctcagttcaccttgataaggtgcttccgagctgggatgagaggaagggaaaccttacattatgctatgaagagtagtaataatagcagctcttatttcctga

SEQ ID NO: 1409 - DNA, 1754 bp, Homo sapiens
cccactaccaccatgctggcctcagggatgcttctggtggccttgctggtctgcctgactgtratggtcttgatgtctgtttggcagcagaggaagagcaaggggaagctgcctccgggacccaccccattgcccttcattggaaactacctgcagctgaacacagagcagatgtacaactccctcatgaagatcagtgagcgctatggccccgtgttcaccattcacttggggccccggcgggtcgtggtgctgtgtggacatgatgccgtcagggaggctctggtggaccaggctgaggagttcagcgggcgaggcgagcaagccaccttcgactgggtcttcaaaggctatggcgtggtattcagcaacggggagcgcgccaagcagctccggcgcttctccatcgccaccctgcgggacttcggggtgggcaagcgaggcatcgaggagcgcatccaggaggaggcgggcttcctcatcgacgcccwccggggcactggcggcgccaatatcgatcccaccttcttcctgagccgcacagtctccaatgtcatcagctccattgtctttggggaccgctttgactataaggacaaagagttcctgtcactgttgcgcatgatgctaggaatcttccagttcacgtcaacctccacggggcagctctatgagatgttctcttcggtgatgaaacacctgccaggaccrcagcaacaggcctttcagttgctgcaagggctggaggacttcatagccaagaaggtggagcacaaccagcgyacgctggatcccaattccccacgggacttcattgactcctttctcatccgcatgcaggaggaggagaagaaccccaacacggagttctacttgaaraacctgrtgatgaccacgttgaacctcttcattgggggcaccgagacsgtcagcaccaccctgcgctatggcttcttgctgctcatgaagcacccagaggtggaggccaaggtccatgaggagattgacagagtgatcggcaagaaccggcagcccaagtttgaggaccgggccaagatgccctacatggaggcagtgatccacgagatccaaagatttggagacgtgatccccatgagtttggcccgcagagtcaaaaaggacaccaagtttcgggatttcttcctccctaagggcaccgaagtgtwccctatgctgggctctgtgctgagagaccccagtttcttctccaacccccaggacttcaatccccagcayttcctgaatgagaaggggcagtttaagaagagtgatgcttttgtgcccttttccatcggaaagcggaactgtttcggagaaggcctggccagaatggagctctttctcttcttcaccaccgtcatgcagaacttccgcctcaagtcctcccagtcacctaaggacattgacgtgtcccccaaacacgtgggctttgccacgatcccacgaaactacaccatgagcttcctgccccgctgagcgagggctgtgccggtgcaggtctggtgggcggggccagggaaagggcagggccaagacggggcttgggagaggggcgcagctaagactgggggcaggatggcggaaaggaaggggcgtggtggctagagggaagagaagaaacagaagcggctcagttcaccttgataaggtgcttccgwgstgggatgagaggaaggaaacccttacattatgctatgaagagtagtaataatagcagctcttatttcctgagc

SEQ ID NO: 1410 - DNA, 910 bp, Homo sapiens
ccaacgctgcggagatccagaggccggcggcgcccggaaacacccgcgccctgggcgctgcctatggcacagccaagagcggtaccggcattgcggccatgtctgtcatgcggccggagcagatcatgaagtccatcatcccagtggtcatggctggcatcatcgccatctacggcctggtggtggcagtcctcatcgccaactccctgaatgacgacatcagcctctacaagagcttcctccagctgggcgccggcctgagcgtgggcctgagcggcctggcagccggctttgccatcggcatcgtgggggacgctggcgtgcggggcaccgcccagcagccccgactattcgtgggcatgatcctgattctcatcttcgccgaggtgctcggcctctacggtctcatcgtcgccctcatcctctccacaaagtagaccctctccgagcccaccagccacagaatattatgtaaagaccacccctmctcattccagaacgaacagcctgacacatacgcacggggccgccgcccccagtagttggtcttgtacatgcgcagtgtcctagtgcccatcgtctgtttccccggccttgcccccgcccgccccgtgccgtggacatctgggcccactcatcgcccctccaggcccccggcgccccaccccctagagtgctctgtgtatgcggatgatttagaattgtcatttctctttactggatgtttatttataaagatctggcctgttcctgcgtctgcggagcggcccttgtctcccagctatctataaccttagctagagtgtcgccttgtgggttcctgttgctgagacttcctggatggagccgccctcaccgccgggcccgtggccctgcgcggagctgtgtccaataaagttcttggatgtga

SEQ ID NO: 1411 - DNA, 1268 bp, Homo sapiens
tcacacacgggacgaaacgggccacccctaccagctctgagagcatgcacctccaactccatccctccccacatgcccgaccccccaacccgtaactcaggcagacacctgggcgtcccccttcagcgaatgcccacaccgcgggcaggcctgcccctcaccccgcagtcagggcgccctgcatccttctttgtaaaacccatagctgtagagggagcggaatggtggggcagggctgggagcccagcgggagtgagtggtggggaatgatggtggccaaggtcacacaaagcagtgaattcacttcatgtcacagaactgctcaggttacgatagttacttttgttatgtattttaccacaatttttaaaaagcaaaccaaaaccaaccaagagtgcttcccccacacctcaaaatcatcctgcagcagctccctggcccagctctctctcaccctgaccctgggcccctctcccaccacscagggctagccctgtggaccaaccatctctgccagcccctccccgaccctccagccagggaggtggggcgctggccggtgaatggggcaggccaggcccaaaggctggcccagggctcaccagctctggactgggcgtcccgtctgaggtggggatgaccaacatgccagctctgggttttasctgaggatgggcacatcaagcactgacagccagcaagctgggcacaggcgatgctcaacctctaacacatcggctgagaacctcacctgcctctccctgcctgggagccctggcaagacagctcctctcccaggcccagcacaggcaggcgctggacagccacttcctaaggggtgcgcggccgtcaaggcagaggtgggtatccctgcacctcacacctctcaggaggtcaggatccacatccgtcgcctgctttcctgggctgcccctggggcttgtgggctgagatcaaccccttgtgccctgccccaggccctccctcaggcgaggccctgcccaggcaggtggttcttccctggctgttcccttccaacaggtggggcccagaccatcctatctctttggacctggagacatttccttaactgggctttgcagcagagggaagagaacagtggcagagccaggcgcgtacctcctgtgcccaggacagcacctgtaagcaagggggaagggagccacccaccccagaactcaaatggagagaaagtcaagacaatcacccctgacgtggggctgcaccaatccctgacgtctgacccc

SEQ ID NO: 1412 - DNA, 2652 bp, Homo sapiens
ctgcagacgaggcaggcggaagaggcgggacttcgcgggygacgtcatcggggcgccggaggcccggggcgcctgggartttgaagcaaacaggcagcgcgcgacaatggcggtcgctcgtgcagctttggggccattggtgacgggtctgtacgacgtgcaggctttcaagtttggggacttcgtgctgaagagcgggctttcctcccccatctacatcgatctgcggggcatcgtgtctcgaccgcgtcttctgagtcaggttgcagatattttattccaaactgcccaaaatgcaggcatcagttttgacaccgtgtgtggagtgccttatacagctttgccattggctacagttatctgttcaaccaatcaaattccaatgcttattagaaggaaagaaacaaaggattatggaactaagcgtcttgkagaaggaactattaatccaggagaaacctgtttaatcattgaagatgttgtcaccagtggatctagtgttttggaaactgttgaggttcttcagaaggagggcttgaaggtcactgatgccatagtgctgttggacagagagcagggaggcaaggacaagttgcaggcgcacgggatccgcctccactcagtgtgtacattgtccaaaatgctggagattctcgagcagcagaaaaaagttgatgctgagacagttgggagagtgaagaggtttattcaggagaatgtctttgtggcagcgaatcataatgsttctcccctttctataaaggaagcacccaaagaactcagcttcggtgcacgtgcagagctgcccaggatccacccagttgcatcgaagcttctcaggcttatgcaaaagaaggagaccaatctgtgtctatctgctgatgtttcactggccagagagctgttgcagctagcagatgctttaggacctagtatctgcatgctgaagactcatgtagatattttgaatgattttactctggatgtgatgaaggagttgataactctggcaaaatgccatgagttcttgatatttgaagaccggaagtttgcagatataggaaacacagtgaaaaagcagtatgaaggaggtatctttaaaatagcttcctgggcagatctagtaaatgctcacgtggtgccaggctcaggagtwgtgaaaggcctgcaagaagtgggcctgcctttgcatcgggggtgcctccttattgcggaaatgagctccaccggctccctggccactggggactacactagagcagcggttagaatggctgaggagcactctgaatttgttgttggttttatttctggctcccgagtaagcatgaaaccagaatttcttcacttgactccaggagttcagttggaagcaggaggagataatcttsgccaacagtacaatagcccacaagaagttattggyaaacgaggttccgatrtcatcattgtaggtcgtggcataatctcagcagctgatcgtctggaagcagcagagatgtacagaaaagctgcttgggaagcgtatttgagtagacttggtgtttgagtgcttcagatacatttttcagatacartgtgaagacattgaagatatgtggtcctcctgaaagtcactggctggaaataatccaattattcctgcttggattcttccacagggcctgtgtaagaatgggttctggagttctcatggtctttaggaaatattgagtaatttgtaatcaccgcattgatactataataagttcattcttaagcttgctttttttgagactggtgtttgttagacagccacagtcctgtctgggttagggtcttccacatttgaggatccttcctatctctccatgggactagactgctttgttattctatttattttttaatttttttcgagacaggatctcactctgttgcccaggatggagtgcagtggtgagatcacggctcattgcagcctcgacctcccaggtgatcctcccacctcagcttccagattagctggtgctataggcatgcaccaccacgtccatctaaatttctttattatttgtagagatgaggtcttgccrtgttacccaggctggtctcaactcctgggctcaagcgatcctcctgcctcagtctctcaaagtgctgggattacaggtgtgagccactgtgcccagcctaattgcagtaaracaaaaattctagggcaccaagaggctaaagtcagcacagcttttcttgtgtcctgtattctctgtctaatgtgttgcccaaataatwyctaattgttagccattcccctccatctctggcctaaaagtgatagtccaggtatccacatgggctggttcccagaactgccattgctcactctccaaagaggggaaggtggggaaggggaaggtgactatagctcagctcctgagctagtatctggctgttatttcaacaaccggagttggggtttgggctcattttttcccctagccagcaattatggaccagtagtaacacaagtgacagcttcctgtgactgayttcacaattaggaggtctaagattccatttgggtatttgcttaaggatcccacataattgtcccaackgtcattagtagaggggaggtaagccttcattaataataaagagaaagcccac

SEQ ID NO: 1413 - DNA, 1708 bp, Homo sapiens
tgggcaaggtccctgccagctctgtctctgggaccagtgggcaggggcctctgcctcacccccacgctgcctcagctggggcagcaggcccaggcctcttgcataagcgccctgtgggggacgaggctgcagctgtgcctggccaccccatcccccagcatcacgagtgttcagtgggctgtccccgggccctgggtggaggccaagcctggcccataaataggggtctcctcagtgccctccgctcctcctgcacacctccctcgctctcccacaccactggcaccaggccccggacacccgctctgctgcaggagaatggctactcatcacacrctgtggatgggactggccctgctgggggtgctgggcgacctgcaggcagcaccggaggcccaggtctccgtgcagcccaacttccagcaggacaagttcctggggcgctggttcagcgcgggcctcgcctccaactcgagctggctccgggagaagaaggcggcgttgtccatgtgcaagtctgtggtggcccctgccacggatggtggcctcaacctgacctccaccttcctcaggaaaaaccagtgtgagacccgaaccatgctgctgcagcccgcggggtccctcggctcctacagctaccggagtccccgtgagtggggcctccaccggccccctgggcccagcctgggggcgacacttgccgggacgactctgggccagccccctgccgcggagatccatggggtgggaggtgatggctgccccaccagcgtcagaggcaaaggccaggcctgggcgtgactacccatgcacaagtgttagggacagagagacccttcctccagggggttggatcctctctggagcccaccattgtcttgtcaggccccttccctgccctctggagttttccccacataagcagccccccaaggcccctccatatgcctcctcccaattctcctccccaggacccaggggtttcctcactcccacctggggaatggctcccacggggaaacctcttcacttccggttctggcagcgacttctgcggctgcaccaggaatcctggttttctgagcctggctcccccagattctggtttggggacagggttcacaggctgtgcaggcgagagcagggcactggctggagagcagccgggtgggggagcatcccgggccagccgaggggctgagtgcccccaaagcccacaggtgcaccccttccctgaagcagaggtgaggtttggggggctgagtccccgacasggttgtctcttgggttcccagactggggcagcacctactccgtgtcagtggtggagaccgactacgaccagtacgcgctgctgtacagccagggcagcaagggccctggcgaggacttccgcatggccaccctctacagccgaacccagacccccagggctgagttaaaggagaaattcaccgccttctgcaaggcccagggcttcacagaggataccattgtcttcctgccccaaaccgataagtgcatgacggaacaataggactccccagggctgaagctgggatcccggccagccaggtgacccccacgctctggatgtctctgctctgttccttccccgagcccctgccccggctccccgccaaagcamccctgcccactcrggcttcatcctgcacaataaactccggaagcaagtcagtagagctgg

SEQ ID NO: 1414 - DNA, 1207 bp, Homo sapiens
tgggcaaggtccctgccagctctgtctctgggaccagtgggcaggggcctctgcctcacccccacgctgcctcagctggggcagcaggcccaggcctcttgcataagcgccctgtgggggacgaggctgcagctgtgcctggccaccccatcccccagcatcacgagtgttcagtgggctgtccccgggccctgggtggaggccaagcctggcccataaataggggtctcctcagtgccctccgctcctcctgcacacctccctcgctctcccacaccactggcaccaggccccggacacccgctctgctgcaggagaatggctactcatcacacrctgtggatgggactggccctgctgggggtgctgggcgacctgcaggcagcaccggaggcccaggtctccgtgcagcccaacttccagcaggacaagttcctggggcgctggttcagcgcgggcctcgcctccaactcgagctggctccgggagaagaaggcggcgttgtccatgtgcaagtctgtggtggcccctgccacggatggtggcctcaacctgacctccaccttcctcaggaaaaaccagtgtgagacccgaaccatgctgctgcagcccgcggggtccctcggctcctacagctaccggagtccccactggggcagcacctactccgtgtcagtggtggagaccgactacgaccagtacgcgctgctgtacagccagggcagcaagggccctggcgaggacttccgcatggccaccctctacagccgaacccagacccccagggctgagttaaaggagaaattcaccgccttctgcaaggcccagggcttcacagaggataccattgtcttcctgccccaaaccgataagtgcatgacggaacaatagttccagggcacctggtacatggtcggggtggtgtcagatgaccaggacttcctggactccaaggacaccatgaagatggctgtggtcttagtgacccccttggggaatggtgacctggccctcaagtttggataccccacgccccatggcgggtgccagaaaatggacacgaccttcaccgagggtgctgtaccggggcagttcagcaacccagctcgagcgcccgagctgtttcccgaaggcgcccagaagatgcagctactggcgccccaagtgggcctgagccccagccagggcgtcctgctgccgaagtcgg

SEQ ID NO: 1415 - DNA, 1062 bp, Homo sapiens
tgggcaaggtccctgccagctctgtctctgggaccagtgggcaggggcctctgcctcacccccacgctgcctcagctggggcagcaggcccaggcctcttgcataagcgccctgtgggggacgaggctgcagctgtgcctggccaccccatcccccagcatcacgagtgttcagtgggctgtccccgggccctgggtggaggccaagcctggcccataaataggggtctcctcagtgccctccgctcctcctgcacacctccctcgctctcccacaccactggcaccaggccccggacacccgctctgctgcaggagaatggctactcatcacacrctgtggatgggactggccctgctgggggtgctgggcgacctgcaggcagcaccggaggcccaggtctccgtgcagcccaacttccagcaggacaagttcctggggcgctggttcagcgcgggcctcgcctccaactcgagctggctccgggagaagaaggcggcgttgtccatgtgcaagtctgtggtggcccctgccacggatggtggcctcaacctgacctccaccttcctcaggaaaaaccagtgtgagacccgaaccatgctgctgcagcccgcggggtccctcggctcctacagctaccggagtccccactggggcagcacctactccgtgtcagtggtggagaccgactacgaccagtacgcgctgctgtacagccagggcagcaagggccctggcgaggacttccgcatggccaccctctacagccgaacccagacccccagggctgagttaaaggagaaattcaccgccttctgcaaggcccagggcttcacagaggataccattgtcttcctgccccaaaccgataagtgcatgacggaacaataggactccccagggctgaagctgggatcccggccagccaggtgacccccacgctctggatgtctctgctctgttccttccccgagcccctgccccggctccccgccaaagcamccctgcccactcrggcttcatcctgcacaataaactccggaagcaagtcagtagagctgg

SEQ ID NO: 1416 - DNA, 4209 bp, Homo sapiens
agagaagggtcagccgcggcggcagggcggcggcggcagcggcgcagctccgctccccgcgcgtctcccttccccgcgcccaggtagggcgctcagcctccgccgccaggatgcggccgcccgcctgctggtggctgctcgcgccgccggcgctgctcgcgctcctcacctgctccctggcttttggtttggcttctgaagatacaaagaaagaggtcaagcagtctcaggatttggagaaaagtggtatatcaaggaaaaatgacatagacttaaaaggaattgtattcgtcatccagagtcaaagtaattcttttcatgcaaagagagcagagcagttaaaaaaaagcatcttaaagcaggctgcagatcttacacaggagctccccagtgtcctcctccttcatcagctggctaaacaagaaggtgcatggaccatacttccgttgttaccgcayttttctgtaacatatagcagaaattcatcttggattttcttctgtgaagaagagacaagaatacagattccaaaactcttggaaaccctcagaagatatgacccctctaaggaatggtttttgggaaaagcattacatgatgaagaagctacaataattcaccattatgccttttccgagaatcctacagtttttaagtatccagactttgctgcaggctgggccttaagtattccacttgtaaacaagcttaccaagagactaaagagtgaatccttgaaatccgactttacaatagatttaaaacatgagattgccctctayatctgggacaaaggcggaggacctcccctgaccccagtgcctgagttttgtaccaatgacrtggacttctactgtgctaccacattccattcttttctaccgctttgtagaaagccagtgaagaagaaggatatttttgttgcagtaaaaacatgcaagaaatttcatggtgacagaatacctattgttaagcagacttgggagagccaggcaagtctcattgaatactatagtgactatactgaaaattccattcctactgtggatttgggaattcctaatacagatagaggtcattgtggaaagacatttgccattttggaaagatttctgaatcgtagccaggacaaaacagcatggttagtcattgtggatgatgatacattaataagtatctccaggctccagcacttgcttagctgttatgactccrgcragcctgtgtttctgggagagcgctayggctacggcctgggcactggtggctacagctacatcacgggaggaggaggaatggtcttcagcagagaagccgtcaggagacttctcgccagtaaatgtcgatgctacagcaatgatgctcccgatgatatggtcctgggaatgtgctttagtggcttgggaatccctgtgacacacagccctctcttccatcaggctcggccggtggattaccctaaggactacctttctcatcaagttcccatatcgttccacaaacactggaacatcgatccagtgaaggtgtatttcacatggttggcacccagtgacgaagacaaagccaggcaggagacacagaaaggttttcgagaggagttataaatcagggtgacctgtgcgcctagcctgckcagggartgaactggagactgtggcctcatcccactgtgctgtgctcacaacacttgtgtctgccacatggcattgggtgcttcctgactttagggggagattttatgtatggtattttttgacagaggaagaaaaggggtcacaggagaaacatttttttttctgggaaaaatcacttgcttttgacttatgcagttgttttaacacttagtgatgactgtgtattctccaagctgtgatacagcagtttttttttattgtcacagggaaataaatggtaccagaagtccctttcctgttctgtctcttcattgtaatggaagtttcagttgggcatgagcctggagagatgtgactgtctacagttctatttgtatatataaaaagaagactgaaagtcttttgacatggatattgtgaatggtatgaacttttaaaccatattattgatgatgaaaattatttcctgggaactcagtaggaataataccgtattaaggaataatactgtacataaaacatcatgaaaccctagatatgaaatcccctgaagtctgtaatcatggtggttatgttttgtctattcttttgctgtttgtgcctcataaaaagagaatgaggtcttctgctagagcttcgtattgctttggaagttcatctgtgttttatttctccctgaagccctatctttatggcttacttgtaacatgaaagtagtagatgctgccagaaaatagtgtcctcaatattttaaaacaatgttgacatgttttgttcaagtcagcaagctctatgtgagtctcaggaagtgaattaaatttggaccttatgttttactcttgtttttttttttttttttraatgttacttaatgactctctcctgactcaggagagaaaccccttgtggaaggacagcatggtgatcaggcaatttctctgggttcccaaagaatgacatttgaacacagtattttgaaacagctctagttttcaaattatatctttaatatatagtaatgtaacatattcagtattaatgtataaaaagcactctaattatataattcagtttttgtaaaggtatttgcataaaatttaatatgtcttaaactaattttggtaaattacttcttttttttctttttaataaaaactgttactcattaactttgcttataatgctttttatagcccagcacagaatttaaagccataccaccaaaagtacctgtgtgtgttaatatgtttttcttgtagcatagattgactatttgcaatagtattagtatttaccatttttccaaattagcaactaccagacctcacgtgttgcagtgataacacaatgcattggattcagttttgtgaaaatggattctgtggccatccaagggatgtatcagggatgatcagctgatgagaggctccagaaggatttctagatcgcttcaagcctatactgatggccttagctttgttcagtcrttgtaactgggattgttgtcattgctaccgtggtagtcaccttcatgtcatctataatagtacycctggagagccctggctgcctacaccagtggaaaagagtctccagttctgctctggcctactawctgttaccactgagagaacaacatgttcatttgacatgattgaagctggcatccgtatatgaagatccttgtcaagctttcttctgtggtctgattagtgttgataccggggcacctcctctggtacttttaagtgttttgttaattatrtttactttttggaatggtgtaagcctaaccacaartaaaagatctttgcctaagtttttgatttctcaaatattgtgttcattagtctagactgggaatggggaggggaaatggggaaaatgaatgaatgaaatcagaaaaaagtcagcggctcagtaaatacagtttaaagagagaataattacttcagagctacccttttaagagaaaaccatcagaaattgataatgtttatataaagtttataaagccattgtgttttgttrtataacaaatcagakatgttattttagaatcgattcccatctaaagaactcaattttgagtctgacattyccaggaccagatattgtcttactcacatttcctttgctttgaaatagggctttccttccaaatggctatttttaggctagggatgttaacatcagggatttgtgtgtggaataactggaatgtcatttttgcttttaagccatttctgatgatatagccaaagcaggttgtctgactatgtaggatttttacatcttgmaactaaatcagaaatccagacatgaaaataacctttctagaatgcctaggagcagaaaacaataatagcatgctaaatcacaaatgatgctatgtatgggtatgtaaatatcagtgctgtctgcatttctgggtttattgaagacctctygttgtatatatcctcaaaaattaatgtaattgacatcttcaagaatgtttctattgtcttccattcataatcagagatgtaatttgtatggactaaataaaaactttattatgtaatgaaaa

SEQ ID NO: 1417 - DNA, 2130 bp, Homo sapiens
gcactaacataaatagtgactctccagttggaaaaaagctgaccattcattctgagaaaagcgatgctgcttgtcagacattgctgtctcttcctgtggattttaatttagaaaatatattaggtgactattttagagctgatgaatttgcagatcaatctcctggaaacctcagytcttcatccctcagaagaaagctgtttttagatgggaacggaagcatctccgactccttaccttyggcttctcccggaagtcctcacagtggtgttcaaacatcactagagatgttttattcaatagatttgtctcctgtaaagtgtaggagccccttgcagacaccaagttcggggcagttttcttctagccctattcaggctagtgcaaaaaaatacagcttgggaagcataactagtccttcgcctatttcttcacccactttctcaccaattgaatttcagataggagagactccactctcagaacaaaggaagtttactgttcattctcctgatgcttcatctggaacaaattytaatgggataactaatccgtgtatcagaagtccttatatagatggctgctcgccaattaaaaattggtctcctatgagacttcagatgtatagtggtggtactcagtatcggacctcagtgattcagataccttttactcttgagactcaaggtgaagatgaggaagataaagagaatattccttccacagatgtctcatcacccgccatggatgctgctggaatacacctacggcagtttagtaatgaggcttctacccatggtacacatttggttgtgactgccatgtctgttacacaaaatcagtccagtgcttctgagaaagaattagcactgttgcaggatgttgaaagggagaaagacaataacactgtggatatggttgatcctatagagatagcagatgagaccacttggattaaggagccggttgataatggcagtttacccatgactgattttgtaagtggcattgccttcagtattgaaaactctcatatgtgcatgtcacctcttgctgaaagcagtgtcattccttgtgaaagcagtaacattcagatggatagtggctataatacgcagaattgtggaagcaatattatggatacagttggggcagaaagttactgcaaagaaagtgatgcacaaacatgtgaagttgagagtaaatctcaagcatttaatatgaagcaagaccacacaacacagaggtgttggatgaaaacagcaagcccttttcaatgcagcagtccatagaatrcctctgtcagaatcaaagactaagcttaagagttcctcgcatatatcgttgtgcacaggatcaacatgatggtgactgggaaaaaattacttcaagtaacatgcttagctttccctccttaatgtgaaaaatcaagggcttactgacataggaacaacagaaatgctcctggaacttcaagttgctgaattataagtttattttttatcaataaatatttttatacttacattgagtgatgtgtttaacaacaaattgtgacagagctgagtgctcctatcttacagggtcaatgaactacttattaagccttactggtagcactgaatttagcagttctgagaacatgtgaaactatgttaaaactgaaggcactatatatttttacataaaagcttgaacatacagatgaattataacctatgtgaagaaatcttagatataaaactaacttttcaaagatacaaaagaaattaaacaggtttcctgaaattttagttcttggtctgttcacctctgtggggaaaattcttagttccagtgataactgttctagttactacttttaagtatgtaaatactagaaaggtagtactagtgacatcatcacgtgtattgttatctatggggcaaatgtgtggtgcccagaataaaatatacctcatgcctagggtagggacatcctttccagctcaaacgtgggtagggatgtgggagaataagaatgtgggagaaccaagagaaaaagtggggctgggagagtggagttcccgtagggcataggcctgtgaagtaacactggggcagatatgtatgttatatacaactattttt

SEQ ID NO: 1418 - DNA, 2809 bp, Homo sapiens
wgaggctgcgttgatttgaatttggagccacgttcctctgcgcggaacgtggagcgaggagttgccatwcgaatttcctacgcggcctccgtgcgattggctggttcgcggatggcgggacgacacgattggctagtcgctcacaagccccgtgccctggttggcccaagacagcgyggaagcggggagttaaagagtctatgcctgtcgtggaagctggcctggcccccggagctccctggagtcggtactgggggcttcgttttgtacgcaccgttttctctctgtgctatgggagatgtcaaggaatcaaagatgcaaataacaccagaaactccaggaaggatccctgttttaaatccttttgaaagtcctagtgattattctaatctccatgaacaaactctcgccagtccttctgtttttaaatcaacaaaattaccaactccagggaaatttagatggtctattgatcaactagctgtaataaatcctgtagaaatagacccagaagatattcatcgtcaagctttatacttaagtcattctcgaatagataaagatgtggaagacaaaagacaaaaagccattgaagagtttttcactaaagatgtcatcgtaccctctccttggactgatcatgaagggaaacagctttcacaatgtcattccagtaaatgcactaacataaatagtgactctccagttggaaaaaagctgaccattcattctgagaaaagcgatgctgcttgtcagacattgctgtctcttcctgtggattttaatttagaaaatatattaggtgactattttagagctgatgaatttgcagatcaatctcctggaaacctcagytcttcatccctcagaagaaagctgtttttagatgggaacggaagcatctccgactccttaccttyggcttctcccggaagtcctcacagtggtgttcaaacatcactagagatgttttattcaatagatttgtctcctgtaaagtgtaggagccccttgcagacaccaagttcggggcagttttcttctagccctattcaggctagtgcaaaaaaatacagcttgggaagcataactagtccttcgcctatttcttcacccactttctcaccaattgaatttcagataggagagactccactctcagaacaaaggaagtttactgttcattctcctgatgcttcatctggaacaaattytaatgggataactaatccgtgtatcagaagtccttatatagatggctgctcgccaattaaaaattggtctcctatgagacttcagatgtatagtggtggtactcagtatcggacctcagtgattcagataccttttactcttgagactcaaggtgaagatgaggaagataaagagaatattccttccacagatgtctcatcacccgccatggatgctgctggaatacacctacggcagtttagtaatgaggcttctacccatggtacacatttggttgtgactgccatgtctgttacacaaaatcagtccagtgcttctgagaaagaattagcactgttgcaggatgttgaaagggagaaagacaataacactgtggatatggttgatcctatagagatagcagatgagaccacttggattaaggagccggttgataatggcagtttacccatgactgattttgtaagtggcattgccttcagtattgaaaactctcatatgtgcatgtcacctcttgctgaaagcagtgtcattccttgtgaaagcagtaacattcagatggatagtggctataatacgcagaattgtggaagcaatattatggatacagttggggcagaaagttactgcaaagaaagtgatgcacaaacatgtgaagttgagagtaaatctcaagcatttaatatgaagcaagaccacacaacacagaggtgttggatgaaaacagcaagcccttttcaatgcagcagtccatagaatrcctctgtcagaatcaaagactaagcttaagagttcctcgcatatatcgttgtgcacaggatcaacatgatggtgactgggaaaaaattacttcaagtaacatgcttagctttccctccttaatgtgaaaaatcaagggcttactgacataggaacaacagaaatgctcctggaacttcaagttgctgaattataagtttattttttatcaataaatatttttatacttacattgagtgatgtgtttaacaacaaattgtgacagagctgagtgctcctatcttacagggtcaatgaactacttattaagccttactggtagcactgaatttagcagttctgagaacatgtgaaactatgttaaaactgaaggcactatatatttttacataaaagcttgaacatacagatgaattataacctatgtgaagaaatcttagatataaaactaacttttcaaagatacaaaagaaattaaacaggtttcctgaaattttagttcttggtctgttcacctctgtggggaaaattcttagttccagtgataactgttctagttactacttttaagtatgtaaatactagaaaggtagtactagtgacatcatcacgtgtattgttatctatggggcaaatgtgtggtgcccagaataaaatatacctcatgcctagggtagggacatcctttccagctcaaacgtgggtagggatgtgggagaataagaatgtgggagaaccaagagaaaaagtggggctgggagagtggagttcccgtagggcataggcctgtgaagtaacactggggcagatatgtatgttatatacaactattttt

SEQ ID NO: 1419 - DNA, 2702 bp, Homo sapiens
wgaggctgcgttgatttgaatttggagccacgttcctctgcgcggaacgtggagcgaggagttgccatwcgaatttcctacgcggcctccgtgcgattggctggttcgcggatggcgggacgacacgattggctagtcgctcacaagccccgtgccctggttggcccaagacagcgyggaagcggggagttaaagagtctatgcctgtcgtggaagctggcctggcccccggagctccctggagtcggtactgggggcttcgttttgtacgcaccgttttctctctgtgctatgggagatgtcaaggaatcaaagatgcaaataacaccagaaactccaggaaggatccctgttttaaatccttttgaaagtcctagtgattattctaatctccatgaacaaactctcgccagtccttctgtttttaaatcaacaaaattaccaaatagataaagatgtggaagacaaaagacaaaaagccattgaagagtttttcactaaagatgtcatcgtaccctctccttggactgatcatgaagggaaacagctttcacaatgtcattccagtaaatgcactaacataaatagtgactctccagttggaaaaaagctgaccattcattctgagaaaagcgatgctgcttgtcagacattgctgtctcttcctgtggattttaatttagaaaatatattaggtgactattttagagctgatgaatttgcagatcaatctcctggaaacctcagytcttcatccctcagaagaaagctgtttttagatgggaacggaagcatctccgactccttaccttyggcttctcccggaagtcctcacagtggtgttcaaacatcactagagatgttttattcaatagatttgtctcctgtaaagtgtaggagccccttgcagacaccaagttcggggcagttttcttctagccctattcaggctagtgcaaaaaaatacagcttgggaagcataactagtccttcgcctatttcttcacccactttctcaccaattgaatttcagataggagagactccactctcagaacaaaggaagtttactgttcattctcctgatgcttcatctggaacaaattytaatgggataactaatccgtgtatcagaagtccttatatagatggctgctcgccaattaaaaattggtctcctatgagacttcagatgtatagtggtggtactcagtatcggacctcagtgattcagataccttttactcttgagactcaaggtgaagatgaggaagataaagagaatattccttccacagatgtctcatcacccgccatggatgctgctggaatacacctacggcagtttagtaatgaggcttctacccatggtacacatttggttgtgactgccatgtctgttacacaaaatcagtccagtgcttctgagaaagaattagcactgttgcaggatgttgaaagggagaaagacaataacactgtggatatggttgatcctatagagatagcagatgagaccacttggattaaggagccggttgataatggcagtttacccatgactgattttgtaagtggcattgccttcagtattgaaaactctcatatgtgcatgtcacctcttgctgaaagcagtgtcattccttgtgaaagcagtaacattcagatggatagtggctataatacgcagaattgtggaagcaatattatggatacagttggggcagaaagttactgcaaagaaagtgatgcacaaacatgtgaagttgagagtaaatctcaagcatttaatatgaagcaagaccacacaacacagaggtgttggatgaaaacagcaagcccttttcaatgcagcagtccatagaatrcctctgtcagaatcaaagactaagcttaagagttcctcgcatatatcgttgtgcacaggatcaacatgatggtgactgggaaaaaattacttcaagtaacatgcttagctttccctccttaatgtgaaaaatcaagggcttactgacataggaacaacagaaatgctcctggaacttcaagttgctgaattataagtttattttttatcaataaatatttttatacttacattgagtgatgtgtttaacaacaaattgtgacagagctgagtgctcctatcttacagggtcaatgaactacttattaagccttactggtagcactgaatttagcagttctgagaacatgtgaaactatgttaaaactgaaggcactatatatttttacataaaagcttgaacatacagatgaattataacctatgtgaagaaatcttagatataaaactaacttttcaaagatacaaaagaaattaaacaggtttcctgaaattttagttcttggtctgttcacctctgtggggaaaattcttagttccagtgataactgttctagttactacttttaagtatgtaaatactagaaaggtagtactagtgacatcatcacgtgtattgttatctatggggcaaatgtgtggtgcccagaataaaatatacctcatgcctagggtagggacatcctttccagctcaaacgtgggtagggatgtgggagaataagaatgtgggagaaccaagagaaaaagtggggctgggagagtggagttcccgtagggcataggcctgtgaagtaacactggggcagatatgtatgttatatacaactattttt

SEQ ID NO: 1420 - DNA, 2083 bp, Homo sapiens
ctgtccaagttggtcacttccctgcgccaaagtgaacagtagccaacatgtcagggtgggagttgtattacaaaatcgagggcgatgaagaagcagaagaagaagaagaagagaaccttgaagcaagtggagactataaatattcaggargacatagtttgatttttttggttgatgcctccagggctatgtttgaatctcagagtgaagttttgattccttttgacatgagcatccagtgtatccaaagtgtgtacatcagtaagatcataagcagtgattgagatctcttggcagtggtgttcyatggtaccgagaaagacaaaaattcagtgaattttaaaaatatttacgtcttacaggagttggataatccaagtgcaaaacaaattctagagcttgaccagtttaaggggcagcagggacaaaaacrtttccaagacctgatgggccacggatctgactactcgctcagtgaagtgctgtgggtctgtgccagcctctttagtgatgtcyggttgaagatgagtcatacgaggatcatgctgttgaccagtgaagaaaacccccatggcaatgacagtgccaaagccagccaggccaggactgaagccggtgatctccaagatacaggcatcttccttgacttgatgcacmtgaagaaacctgggggctttgacctatccttgttctatagagataccatcaacatagccgaggatgaggacctcagggttcactttgaggaatccagcaagctagaagacctgttgccgaaggttcacgccaaggacrccaggaagcaagcactcagcaggttaaagctgaagctcaacaaagatatagtgatctctgtgggcatttgtaatctggtccaaaaggctcttaagcctcctccagtaaagctctatcaggaaacaaatgaaccagtgaaaaccaagaccccggacatttaacacaaatacatgcagtktgcttctgcctagtgataccaagaggtctcagatctttggaagtcatcagattatactggaaaaagaggaaacagaagagctaaaatggtttaatgatccaggtttgatgctcctgggtttcaagcccttggtaatgctgaagaagcaccattacctgaggccctccctgttggtgtaccctgaggagtcgctggtgattgggagctcaatcctgttcagtgctctgctcatcaagtgtctggagaaggaggtcatagcattgtgcagatacacgccccacaggaacattcccccttattttgtggctttggtgccacaggaagaggagttggatgactagaaaattcaggtgactcctccaggtttccagctggtctttttaccctttgctgatgataaaatgaaggtgtccctttactgaaaaggtcatggcaactccagagtagatggacaagatgaaggckatcattcagaagctccgcttcacatacagaagtgacagctttgagaatcccgtgctgcagcagtaagtacttcaggaacctggaggccttggccttggatttgatggagcctgaacaagcagtagatctgacattgcccaaggttgaagcaatgaataaaagactgggatccctggtggatgagtttaaggagcttgtctacccgccagattacaatcctgaagggaaagttaccaagagaaagcacaataacgaaggttctgggagcaaaaggcccaaggtggagtattgagaagagaagctgaagacccacatcagcaasgkcatgctgggcaagttcactgtgcccatgctgaaagaggcctgccgggtggatgggctgaagagtgtgctaaagaagcaggacctgctgaaagccctcaccacgcacttccaggactgaccagaggccgcgcgtgcagccgcccttccacaccattcccaggctgcctggccttgttctcagccagttaaaatgtgtttcttctgagctaggaaggactttaagtttttgaggctttctgttgccatggtgatggtgtagccctcccactttgctgttccttactttactgcctgaataaagagccttaagtttgtactatt

SEQ ID NO: 1421 - DNA, 4871 bp, Homo sapiens
agagaagcctggcaaccaagaactgtttttttggtggtttacgagaacttaactgaattggaaaatatttgctttaatgaaacaatttactcttgtgcaacactaaattgtgtcaatcaagcaaataaggaagaaagtcttatttataaaattgcctgctcctgattttacttcatttcttctcaggctccaagaaggggaaaaaaatgaagattttgatacttggtatttttctgtttttatgtagtaccccagcctgggcgaaagaaaagcattattacattggawttattgaaacgacttgggattatgcctctgaccatggggaaaagaaacttatttctgttgacacggaacattccaatatctatcttcaaaatggcccagatagaattgggagactatataagaaggccctttatcttcagtacacagatgaaacctttaggacaactatagaaaaaccggtctggcttgggtttttaggccctattatcaaagctgaaactggagataaagtttatgtacacttaaaaaaccttgcctctaggccctacacctttcattcacatggaataacttactataaggaacatgagggggccatctaccctgataacaccacagattttcaaagagcagatgacaaagtatatccaggagagcagtatacatacatgttgcttgccactgaagaacaaagtcctggggaaggagatggcaattgtgtgactaggatttaccattcccacattgatgctccaaaagatattgcctcaggactcatcggacctttaataatctgtaaaaaagattctctagataaagaaaaagaaaaacatattgaccgagaatttgtggtgatgttttctgtggtggatgaaaatttcagctggtacctagaagacaacattaaaacctactgctcagaaccagagaaagttgacaaagacaacgaagacttccaggagagtaacagaatgtattctgtgaatggatacacttttggaagtctcccaggactctccatgtgtgctgaagacagagtaaaatggtacctttttggtatgggtaatgaagttgatgtgcacgcagctttctttcacgggcaagcactgactaacaagaactaccgtattgacacaatcaacctctttcctgctaccctgtttgatgcttatatggtggcccagaaccctggagaatggatgctcagctgtcagaatctaaaccatctgaaagccggtttgcaagcctttttccaggtccaggagtgtaacaagtcttcatcaaaggataatatcygtgggaagcatgttagacactactacattgccgctgaggaaatcatctggaactatgctccctctggtatagacatcttcactaaagaaaacttaacagcacctggaagtgactcagcggtgttttttgaacaaggtaccacaagaattggaggctcttataaaaagctggtttaycgtgagtacacagatgcctccttcacaaatcgaaaggagagaggccctgaagaagagcatcttggcatcctgggtcctgtcatttgggcagaggtgggagacaccatcagagtaaccttccataacaaaggagcatatcccctcagtattgagcygattggggtgagattcaataagaacaacgagggcacatactattccccaaattacaacccccagagcagaagtgtgcctccttcagcctcccatgtggcacccacagaaacattcacctatgaatggactgtccccaaagaagtaggacccactaatgcagatcctgtgtgtctagctaagatgtattattctgctgtggawcccactaaagatatattcaytgggcttattgggccaatgaaaatatgcaagaaaggaagtttacatgcaaatgggagacagaaagatgtagacaaggaattctatttgtttcctacagtatttgatgagaatgagagtttactcctggaagataatattaraatgtttacaactgcacctgatcaggkggataaggaagatgaagactttcaggaatctaataaaatgcactccatgaatggattcatgtatgggaatcagccgggtctcactatgtgcaaaggagattcggtcgtgtggtacttattcagcgccggmaatgaggccgatgtacatggaatatacttttcaggaaacacatatctgtggagaggagaacggagagacacagcaaacctcttccctcaaacaagtcttacgctccacatgtggcctgacacagaggggacttttaatgttgaatgccttacaactgatcattacacaggcggcatgaagcaaaaatawacygtgaaccaatgcaggcggcagtctgaggattccaccttctacctgggagagaggacatactatatcgcagcagtggaggtggaatgggattattccccacaaagggagtgggaaaaggagctgcatcatttacaagagcagaatgtttcaaatgcatttttagataagggagagttttacataggctcaaagtacaagaaagttgtgtatcggcagtatactgatagcacattccgtgttccagtggagagaaaagctgaagaagaacatctgggaattctaggtccacaacttcatgcagatgttggagacaaagtcaaaattatctttaaaaacatggccacaaggccctactcaatacatgcccatggggtacaaacagagagttctacagttactccaacattaccaggtgaaactctcacttacgtatggaaaatcccagaaagatctggagctggaacagaggattctgcttgtattccatgggcttattattcaactgtggatcaagttaaggacctctacagtggattaattggccccctgattgtttgtcgaagaccttacttgaaagtattcaatcccagaaggaarctggaatttgcccttctgtttctagtttttgatgagaatgaatcttggtacttagatgacaacatcaaaacatactctgatcaccccgagaaagtaaacaaagatgatgaggaattcatagaaagcaataaaatgcatgctattaatggaagaatgtttggaaacctacaaggcctcacaatgcacgtgggagatgaagtcaactggtatctgatgggaatgggcaatgaaatagacttacacactgtacaytttcacggccatagcttccaatacaagcacaggggagtttatagttctgatgtctttgacattttccctggaacataccaaaccctagaaatgtttccaagaacacctggaatttggttactccactgccatgtgaccgaccacattcatgctggaatggaaaccacttacaccgttctacaaaatgaagacaccaaatctggctgaatgaaataaattggtgataagtggaaaaaagagaaaaaccaatgattcataacaatgtatgtgaaagtgtaaaatagaatgttactttggaatgactataaacattaaaagaagactggaagcatacaactttgtayatttgtgggggaaaactattaattttttgcaaatggaaagatcaacagactatataatgatacatgactgacacttgtacactaggtaataaaactgattcatacagtctaatgatatcaccgctgttagggttttataaaactgcatttaaaaaaagatctatgaccagatattctcctgggtgctcctcaaaggaacactattaaggttcattgaaatgttttcaatcattgccttcccattgatccttctaacatgctgttgacatcacacctaatattcagagggaatgggcaaggtatgagggaaggaaataaaaaataaaataaataaaatagaatgacacaaatttgagttttgtgaacccctgcacagatggtcttaaggacgttatctggaactggagaaaagcagagttgagagacaattctatagattaaatcctggtaaggacaaacattgccattagaagaaaagcttcaaaatagacctgtggcagatgtcacatgagtagaatttctgcccagccttaactgcattcagaggataatatcaatgaactaaacttgaactaaaaattttttaaacaaaaagttataaatgaagacacatggttgtgaatacaatgatgtatttctttattttcacatacactctagctaaaagagcaagagtacacatcaacaaaaatggaaacaaggctttggctgaaaaaaacatgcatttgacaaatcatgttaatagctagacaagaagaaagttagctttgtaaacttctacttcatttgattcagagaaacagagcatgagttttcttaaaagtamcaagaaaaggaacaaaaaaaatgaggtttgaaatcttttaccatggcaaaacattaacatctttctcaaaaacatagagaaatctggaaaaatcaagaagataaaattctggaccagttagtgacattctttcaagcatacttgtaaaatgtttccttaaagtgttcttgggatgaaaatgattgtcatgtctccaacaacagtgaactgatgttgttccttggaataaaagtcaatccccaccttaaaaaatgtatggcttctttgaggaattcttatgtcttaaagactttttacattctagacaattaaattgattgaggtcataaattaagaagtgaatagttaccactacacggtaaggtaagcagcctgaaagcatttgtatcatatatgtgtgtgtgtgtgtgtgtgtgtgtgtgtgtgtgtgwatatataaaataaaaaactcctctacttgtactttggcattcaatttttagaaattcagtctcaaatgccatt

SEQ ID NO: 1422 - DNA, 3651 bp, Homo sapiens
agagaagcctggcaaccaagaactgtttttttggtggtttacgagaacttaactgaattggaaaatatttgctttaatgaaacaatttactcttgtgcaacactaaattgtgtcaatcaagcaaataaggaagaaagtcttatttataaaattgcctgctcctgattttacttcatttcttctcaggctccaagaaggggaaaaaaatgaagattttgatacttggtatttttctgtttttatgtagtaccccagcctgggcgaaagaaaagcattattacattggawttattgaaacgacttgggattatgcctctgaccatggggaaaagaaacttatttctgttgacacggaacattccaatatctatcttcaaaatggcccagatagaattgggagactatataagaaggccctttatcttcagtacacagatgaaacctttaggacaactatagaaaaaccggtctggcttgggtttttaggccctattatcaaagctgaaactggagataaagtttatgtacacttaaaaaaccttgcctctaggccctacacctttcattcacatggaataacttactataaggaacatgagggggccatctaccctgataacaccacagattttcaaagagcagatgacaaagtatatccaggagagcagtatacatacatgttgcttgccactgaagaacaaagtcctggggaaggagatggcaattgtgtgactaggatttaccattcccacattgatgctccaaaagatattgcctcaggactcatcggacctttaataatctgtaaaaaagattctctagataaagaaaaagaaaaacatattgaccgagaatttgtggtgatgttttctgtggtggatgaaaatttcagctggtacctagaagacaacattaaaacctactgctcagaaccagagaaagttgacaaagacaacgaagacttccaggagagtaacagaatgtattctgtgaatggatacacttttggaagtctcccaggactctccatgtgtgctgaagacagagtaaaatggtacctttttggtatgggtaatgaagttgatgtgcacgcagctttctttcacgggcaagcactgactaacaagaactaccgtattgacacaatcaacctctttcctgctaccctgtttgatgcttatatggtggcccagaaccctggagaatggatgctcagctgtcagaatctaaaccatctgaaagccggtttgcaagcctttttccaggtccaggagtgtaacaagtcttcatcaaaggataatatcygtgggaagcatgttagacactactacattgccgctgaggaaatcatctggaactatgctccctctggtatagacatcttcactaaagaaaacttaacagcacctggaagtgactcagcggtgttttttgaacaaggtaccacaagaattggaggctcttataaaaagctggtttaycgtgagtacacagatgcctccttcacaaatcgaaaggagagaggccctgaagaagagcatcttggcatcctgggtcctgtcatttgggcagaggtgggagacaccatcagagtaaccttccataacaaaggagcatatcccctcagtattgagcygattggggtgagattcaataagaacaacgagggcacatactattccccaaattacaacccccagagcagaagtgtgcctccttcagcctcccatgtggcacccacagaaacattcacctatgaatggactgtccccaaagaagtaggacccactaatgcagatcctgtgtgtctagctaagatgtattattctgctgtggawcccactaaagatatattcaytgggcttattgggccaatgaaaatatgcaagaaaggaagtttacatgcaaatgggagacagaaagatgtagacaaggaattctatttgtttcctacagtatttgatgagaatgagagtttactcctggaagataatattaraatgtttacaactgcacctgatcaggkggataaggaagatgaagactttcaggaatctaataaaatgcactccatgaatggattcatgtatgggaatcagccgggtctcactatgtgcaaaggagattcggtcgtgtggtacttattcagcgccggmaatgaggccgatgtacatggaatatacttttcaggaaacacatatctgtggagaggagaacggagagacacagcaaacctcttccctcaaacaagtcttacgctccacatgtggcctgacacagaggggacttttaatgttgaatgccttacaactgatcattacacaggcggcatgaagcaaaaatawacygtgaaccaatgcaggcggcagtctgaggattccaccttctacctgggagagaggacatactatatcgcagcagtggaggtggaatgggattattccccacaaagggagtgggaaaaggagctgcatcatttacaagagcagaatgtttcaaatgcatttttagataagggagagttttacataggctcaaagtacaagaaagttgtgtatcggcagtatactgatagcacattccgtgttccagtggagagaaaagctgaagaagaacatctgggaattctaggtccacaacttcatgcagatgttggagacaaagtcaaaattatctttaaaaacatggccacaaggccctactcaatacatgcccatggggtacaaacagagagttctacagttactccaacattaccaggtgaaactctcacttacgtatggaaaatcccagaaagatctggagctggaacagaggattctgcttgtattccatgggcttattattcaactgtggatcaagttaaggacctctacagtggattaattggccccctgattgtttgtcgaagaccttacttgaaagtattcaatcccagaaggaarctggaatttgcccttctgtttctagtttttgatgagaatgaatcttggtacttagatgacaacatcaaaacatactctgatcaccccgagaaagtaaacaaagatgatgaggaattcatagaaagcaataaaatgcatgctattaatggaagaatgtttggaaacctacaaggcctcacaatgcacgtgggagatgaagtcaactggtatctgatgggaatgggcaatgaaatagacttacacactgtacaytttcacggccatagcttccaatacaagcacaggggagtttatagttctgatgtctttgacattttccctggaacataccaaaccctagaaatgtttccaagaacacctggaatttggttactccactgccatgtgaccgaccacattcatgctggaatggaaaccacttacaccgttctacaaaatgaaggtgaatatccaggtagtaattctagaagccatatataaaagatataactaaaggaactactttgcctaaatacttcccccaatatgatgcatcaatatgaagcatttgtgaatctgctgccctgatttcttccttctctacctccaaacaggatttttttcctgctaaatggtgagggatactgctcatttcctgacagccagtacttgtaacagcaccagtcatttctaagttaatacaaatgtgtaattatacttaaagctg

SEQ ID NO: 1423 - DNA, 1416 bp, Homo sapiens
aattctcagagactatgagggttcactatctgtttgctggaagatatacaagacttttgaggataatacttaaatgaagatagaccggatgtataatatgctttttcttagctttcctatgactctacttagcaacttttgctaaaagaaacacaatatatgactgactactttgaagacacatatattggacacttaaaatcaacaaaagcagagaggtcccaaacgtggtatcttttcacaatgatgtattttatccgaattcttggaattactcatggtgtctttcaaaattaaagatctgtgaaacctgaagcagatatgaatattagccagattatttcctactggggctaccctgatgaagaatatgatattgtaaccgaagatggttatatccttggcctttatagaattccttattggaggacagacaataataaaaatctagctcagagggttgttgtatacttgcaacatggtttgcttacatctgccagcagctggatttccaatcttcccaacaatagtctgggcttcattctggcagatgctggttatgatgtgtggatgggaaatagyagaggaaatacctggtccaggaaacacttgtacctagaaacgagttccaaagaattctgggctttcagstttgaygagatggcaaaatatgaccttccagcctctattgatttcactgtgaagcaaaccagacaagaggaaatattttatgtaggccattcacagggtactactattggtttcataacattttctactatatcaaagatagctgaaagaatcaaaatattttttgctttagcaccagttttttccacaaagtacttaaaaagtcctttaattaaaaaattcrttggttcaaagctgtgtccactacagatttttgataagatttgcctcaatatcttgtttatgatgtttggatatgacccaaaaaacttaaatatgagtcgtttggatgtgtatttttcacacaasccagcaggaacatctgttcaaaatatgcttcattggagtcagcttttaaattctactcatttgaaagcttatgactggggcagtcctgatctgaacttggttcattataatcagacaacgtctccattatacaacatgacaaacatgaatgtggcaactgcaatttggaatggtaaaagtgacttgttggctgaccctgaagacgttaacattttacattctgaaatcacaaaccacatttattataaaactatttcttactacaatcatatagactctttgtttggattagatgtctatgatcaagtttaccatgaaatcattgatattatccaagacaatctataaagaaccatggcgctgtgtgtttaaagwtctacatcattcctaatgaaatccaattcttattttttttta

SEQ ID NO: 1424 - DNA, 1249 bp, Homo sapiens
ccccatgggtggagtctcgctttttctttccagtgttggctgacttacagctcttataaactagtggcaatttctgaacccagccggctccatctcagcttctggtttctaagtccatgtgccaaaggctgccaggaaggagacgccttcctgagtcctggatctttcttccttctggaaatctttgactgtgggtagttatttatttctgaataagagcgtccacgcatcatggacctcgcgggactgctgaartctcagttcctgtgccacctggtcttctgctacgtctttattgcctcagggctaatcatcaacaccattcagctcttcactctcctcctctggcccattaacaagcagctcttccggaagatcaactgcagactgtcctattgcatctcaagccgaggatcccactggaagacatccctgaagaygatgacgagtgctcggcctggctgcacaagctctaccaggagaakgatgcctttcaggaggagtactacaggacgggcaccttcccagagacgcccatggtgcccccccggcggccctggaccctcgtgaactggctgttttgggcctcgctggtgctctaccctttcttccagttcctggtcagcatgatcaggagcgggtcttccctgacgctggccagcttcatcctcgtcttytttgtggcctcygtgggagttcgatggatgattggtgtgacggaaattgacaagggctctgcctacggcaactctgacagcaagcagaaactgaatgactgactcagggaggtgtcaccatccgaagggaaccttggggaactggtggcctctgcatatcctccttagtgggacacggtgacaaaggctgggtgagcccctgctgggcacggcggaagtcacgacctctccagccagggagtctggtctcaaggccggatggggaggaagatgttttgtaatctttttttccccatgtgctttagtgggctttggttttctttttgtgcgagtgtgtgtgagaatggctgtgtggtgagtgtgaactttgttctgtgatcatagaaagggtattttaggctgcaggggagggcagggctggggaccgaaggggacaagttcccctttcatcctttggtgctgagttttctgtaacccttggttgccagagataaagtgaaaagtgctttaggtgagatgactaaattatgcctccaagaaaaaaaaattaaagtgcttttctgggtcatctg

SEQ ID NO: 1425 - DNA, 2453 bp, Homo sapiens
ccccatgggtggagtctcgctttttctttccagtgttggctgacttacagctcttataaactagtggcaatttctgaacccagccggctccatctcagcttctggtttctaagtccatgtgccaaaggctgccaggaaggagacgccttcctgagtcctggatctttcttccttctggaaatctttgactgtgggtagttatttatttctgaataagagcgtccacgcatcatggacctcgcgggactgctgaartctcagttcctgtgccacctggtcttctgctacgtctttattgcctcagggctaatcatcaacaccattcagctcttcactctcctcctctggcccattaacaagcagctcttccggaagatcaactgcagactgtcctattgcatctcaagccagctggtgatgctgctggagtggtggtcgggcacggaatgcaccatcttcacggacccgcgcgcctacctcaagtatgggaaggaaaatgccatcgtggttctcaaccacaagtttgaaattgactttctgtgtggctggagcctgtccgaacgctttgggctgttagggggctccaaggtcctggccaagaaagagctggcctatgtcccaattatcggctggatgtggtacttcaccgagatggtcttctgttcgcgcaagtgggagcaggatcgcaagacggttgccaccagtttgcagcacctccgggactaccccgagaagtattttgtatgtaggcaccagmgcagctgtgtcccaagggctcctgcaggactktgaccgtgggacccccatgtgacttccacaggacacgtgactgtgtggtcctgtgcgactccagggctgtgtgtgaccatagggctgtgtataacctcagggatgtatgtgaccatggggccgtgtgtgaccgtggggccacgtatgactgtggggccgtgtatgaccrtggggccgtgtgtgaccccagggctgtgtgtgaccccagggctgtgtgtgaccatggggccgtgtgtgatcatgtggccatatgtgaccctggggctatgtgtgaccccagggctgtgtgtgaccccagggctatgtgtgacctcagggctgtatrtaaccatggggccctgtgtgatcgtgtggccatatgtgmccctggggctgtgtgtgaccccagggccaggcatgacaccagggctgtgtgtgaccccagggctgtatgtgaccccagggctgtgtgtgacctcagggctgtatgtaaccatggggccctgtgtgatcgtgtggccatatgtgaccctggggctgtgtgtgaccccagggccatgcatgaccccagggctgtgtgtgaccccgaggctgcgtgcgactcctgcctccttccttccagttcctgattcactgtgagggcacacggttcacggagaagaagcatgagatcagcatgcaggtggcccgggccaaggggctgcctcgcctcaagcatcacctgttgccacgaaccaagggcttcgccatcaccgtgaggagcttgagaaatgtagaaataatgaaaatccaacactgctgggagtcctaaacggaaagaaataccatgcagatttgtatgttaggaggatcccactggaagacatccctgaagaygatgacgagtgctcggcctggctgcacaagctctaccaggagaaggatgcctttcaggaggagtactacaggacgggcaccttcccagagacgcccatggtgcccccccggcggccctggaccctcgtgaactggctgttttgggcctcgctggtgctctaccctttcttccagttcctggtcagcatgatcaggagcgggtcttccctgacgctggccagcttcatcctcgtcttytttgtggcctcygtgggagttcgatggatgattggtgtgacggaaattgacaagggctctgcctacggcaactctgacagcaagcagaaactgaatgactgactcagggaggtgtcaccatccgaagggaaccttggggaactggtggcctctgcatatcctccttagtgggacacggtgacaaaggctgggtgagcccctgctgggcacggcggaagtcacgacctctccagccagggagtctggtctcaaggccggatggggaggaagatgttttgtaatctttttttccccatgtgctttagtgggctttggttttctttttgtgcgagtgtgtgtgagaatggctgtgtggtgagtgtgaactttgttctgtgatcatagaaagggtattttaggctgcaggggagggcagggctggggaccgaaggggacaagttcccctttcatcctttggtgctgagttttctgtaacccttggttgccagagataaagtgaaaagtgctttaggtgagatgactaaattatgcctccaagaaaaaaaaattaaagtgcttttctgggtcatctg

SEQ ID NO: 1426 - DNA, 1777 bp, Homo sapiens
tagtggcaatttctgaacccagccggctccatctcagcttctggtttctaagtccatgtgccaaaggctgccatgttttagacgccttcctgagtcctggatctttcttccttctggaaatctttgactgtgggtagttatttatttctgaataagagcgtccacgcatcatggacctcgcgggactgctgaartctcagttcctgtgccacctggtcttctgctacgtctttattgcctcagggctaatcatcaacaccattcagctcttcactctcctcctctggcccattaacaagcagctcttccggaagatcaactgcagactgtcctattgcatctcaagccagctggtgatgctgctggagtggtggtcgggcacggaatgcaccatcttcacggacccgcgcgcctacctcaagtatgggaaggaaaatgccatcgtggttctcaaccacaagtttgaaattgactttctgtgtggctggagcctgtccgaacgctttgggctgttagggggctccaaggtcctggccaagaaagagctggcctatgtcccaattatcggctggatgtggtacttcaccgagatggtcttctgttcgcgcaagtgggagcaggatcgcaagacggttgccaccagtttgcagcacctccgggactaccccgagaagtattttttcctgattcactgtgagggcacacggttcacggagaagaagcatgagatcagcatgcaggtggcccgggccaaggggctgcctcgcctcaagcatcacctgttgccacgaaccaagggcttcgccatcaccgtgaggagcttgagaaatgtagtttcagctgtatatgactgtacactcaatttcagaaataatgaaaatccaacactgctgggagtcctaaacggaaagaaataccatgcagatttgtatgttaggaggatcccactggaagacatccctgaagaygatgacgagtgctcggcctggctgcacaagctctaccaggagaakgatgcctttcaggaggagtactacaggacgggcaccttcccagagacgcccatggtgcccccccggcggccctggaccctcgtgaactggctgttttgggcctcgctggtgctctaccctttcttccagttcctggtcagcatgatcaggagcgggtcttccctgacgctggccagcttcatcctcgtcttytttgtggcctcygtgggagttcgatggatgattggtgtgacggaaattgacaagggctctgcctacggcaactctgacagcaagcagaaactgaatgactgactcagggaggtgtcaccatccgaagggaaccttggggaactggtggcctctgcatatcctccttagtgggacacggtgacaaaggctgggtgagcccctgctgggcacggcggaagtcacgacctctccagccagggagtctggtctcaaggccggatggggaggaagatgttttgtaatctttttttccccatgtgctttagtgggctttggttttctttttgtgcgagtgtgtgtgagaatggctgtgtggtgagtgtgaactttgttctgtgatcatagaaagggtattttaggctgcaggggagggcagggctggggaccgaaggggacaagttcccctttcatcctttggtgctgagttttctgtaacccttggttgccagagataaagtgaaaagtgctttaggtgagatgactaaattatgcctccaagaaaaaaaaattaaagtgcttttctgggtcatctg

SEQ ID NO: 1427 - DNA, 1838 bp, Homo sapiens
ccccatgggtggagtctcgctttttctttccagtgttggctgacttacagctcttataaactagtggcaatttctgaacccagccggctccatctcagcttctggtttctaagtccatgtgccaaaggctgccaggaaggagacgccttcctgagtcctggatctttcttccttctggaaatctttgactgtgggtagttatttatttctgaataagagcgtccacgcatcatggacctcgcgggactgctgaartctcagttcctgtgccacctggtcttctgctacgtctttattgcctcagggctaatcatcaacaccattcagctcttcactctcctcctctggcccattaacaagcagctcttccggaagatcaactgcagactgtcctattgcatctcaagccagctggtgatgctgctggagtggtggtcgggcacggaatgcaccatcttcacggacccgcgcgcctacctcaagtatgggaaggaaaatgccatcgtggttctcaaccacaagtttgaaattgactttctgtgtggctggagcctgtccgaacgctttgggctgttagggggctccaaggtcctggccaagaaagagctggcctatgtcccaattatcggctggatgtggtacttcaccgagatggtcttctgttcgcgcaagtgggagcaggatcgcaagacggttgccaccagtttgcagcacctccgggactaccccgagaagtattttttcctgattcactgtgagggcacacggttcacggagaagaagcatgagatcagcatgcaggtggcccgggccaaggggctgcctcgcctcaagcatcacctgttgccacgaaccaagggcttcgccatcaccgtgaggagcttgagaaatgtagtttcagctgtatatgactgtacactcaatttcagaaataatgaaaatccaacactgctgggagtcctaaacggaaagaaataccatgcagatttgtatgttaggaggatcccactggaagacatccctgaagaygatgacgagtgctcggcctggctgcacaagctctaccaggagaakgatgcctttcaggaggagtactacaggacgggcaccttcccagagacgcccatggtgcccccccggcggccctggaccctcgtgaactggctgttttgggcctcgctggtgctctaccctttcttccagttcctggtcagcatgatcaggagcgggtcttccctgacgctggccagcttcatcctcgtcttytttgtggcctcygtgggagttcgatggatgattggtgtgacggaaattgacaagggctctgcctacggcaactctgacagcaagcagaaactgaatgactgactcagggaggtgtcaccatccgaagggaaccttggggaactggtggcctctgcatatcctccttagtgggacacggtgacaaaggctgggtgagcccctgctgggcacggcggaagtcacgacctctccagccagggagtctggtctcaaggccggatggggaggaagatgttttgtaatctttttttccccatgtgctttagtgggctttggttttctttttgtgcgagtgtgtgtgagaatggctgtgtggtgagtgtgaactttgttctgtgatcatagaaagggtattttaggctgcaggggagggcagggctggggaccgaaggggacaagttcccctttcatcctttggtgctgagttttctgtaacccttggttgccagagataaagtgaaaagtgctttaggtgagatgactaaattatgcctccaagaaaaaaaaattaaagtgcttttctgggtcatctg

SEQ ID NO: 1428 - DNA, 1676 bp, Homo sapiens
ccccatgggtggagtctcgctttttctttccagtgttggctgacttacagctcttataaactagtggcaatttctgaacccagccggctccatctcagcttctggtttctaagtccatgtgccaaaggctgccaggaaggagacgccttcctgagtcctggatctttcttccttctggaaatctttgactgtgggtagttatttatttctgaataagagcgtccacgcatcatggacctcgcgggactgctgaartctcagttcctgtgccacctggtcttctgctacgtctttattgcctcagggctaatcatcaacaccattcagctcttcactctcctcctctggcccattaacaagcagctcttccggaagatcaactgcagactgtcctattgcatctcaagccagctggtgatgctgctggagtggtggtcgggcacggaatgcaccatcttcacggacccgcgcgcctacctcaagtatgggaaggaaaatgccatcgtggttctcaaccacaagtttgaaattgactttctgtgtggctggagcctgtccgaacgctttgggctgttagggttcctgattcactgtgagggcacacggttcacggagaagaagcatgagatcagcatgcaggtggcccgggccaaggggctgcctcgcctcaagcatcacctgttgccacgaaccaagggcttcgccatcaccgtgaggagcttgagaaatgtagtttcagctgtatatgactgtacactcaatttcagaaataatgaaaatccaacactgctgggagtcctaaacggaaagaaataccatgcagatttgtatgttaggaggatcccactggaagacatccctgaagaygatgacgagtgctcggcctggctgcacaagctctaccaggagaakgatgcctttcaggaggagtactacaggacgggcaccttcccagagacgcccatggtgcccccccggcggccctggaccctcgtgaactggctgttttgggcctcgctggtgctctaccctttcttccagttcctggtcagcatgatcaggagcgggtcttccctgacgctggccagcttcatcctcgtcttytttgtggcctcygtgggagttcgatggatgattggtgtgacggaaattgacaagggctctgcctacggcaactctgacagcaagcagaaactgaatgactgactcagggaggtgtcaccatccgaagggaaccttggggaactggtggcctctgcatatcctccttagtgggacacggtgacaaaggctgggtgagcccctgctgggcacggcggaagtcacgacctctccagccagggagtctggtctcaaggccggatggggaggaagatgttttgtaatctttttttccccatgtgctttagtgggctttggttttctttttgtgcgagtgtgtgtgagaatggctgtgtggtgagtgtgaactttgttctgtgatcatagaaagggtattttaggctgcaggggagggcagggctggggaccgaaggggacaagttcccctttcatcctttggtgctgagttttctgtaacccttggttgccagagataaagtgaaaagtgctttaggtgagatgactaaattatgcctccaagaaaaaaaaattaaagtgcttttctgggtcatctg

SEQ ID NO: 1429 - DNA, 2106 bp, Homo sapiens
cagaaaggagcagcaactggaaaacaagcattgcattgcatcaggatgtctatgaaatggacttcagctcttctgctgatacagctgagctgttactttagctctgggagttgtggaaaggtgctggtgtggcccacagaattcagccactggatgaatataaagacaatcctggatgaacttgtccagagaggtcatgaggtgactgtattggcatcttcagcttccatttctttcgatcccaacagcccatctactcttaaatttgaagtttatcctgtatctttaactaaaactgagtttgaggatattatcaagcagctggttaagagatgggcagaacttccaaaagacacattttggtcatatttttcacaagtacaagaaatcatgtggacatttaatgacatacttagaaagttctgtaaggatatagtttcaaataagaaacttatgaagaaactacaggagtcaagatttgatgttgttcttgcagatgctgttttcccctttggtgagctgctggccgagttacttaaaataccctttgtctacagcctccgcttctctcctggctacgcaattgaaaagcatagtggaggacttctgttccctccttcctatgtgcctgttgttatgtcagaactaagtgaccaaatgactttcatagagagggtaaaaaatatgatctatgtgctttattttgaattttggttccaaatatttgacatgaagaagtgggatcagttctacagtgaagttctaggaagacccactacgttatctgagacaatggcaaaagctgacatatggcttattcgaaactactgggattttcaatttcctcacccactcttaccaaatgttgagttcgttggaggactccactgcaaacctgccaaacccctaccgaaggaaatggaagagtttgtccagagctctggagaaaatggtgttgtggtgttttctctggggtcgatggtcagtaacacrtcagaagaaagggccaatgtaattgcatcagcccttgccaagatcccacaaaaggttctgtggagatttgatgggaataaaccagatactttaggactcaatactcggctgtacaagtggataccccagaatgatcttcttggtcacccaaaaaccagagcttttataactcatggtggagccaatggcatctatgaggcaatctaccatggaatccctatggtgggcgttccattgtttgcagatcaacctgataacattgcacacatgaaggccaagggagcagctgttagtttggacttccacacaatgtcgagtacagacttactcaatgcactgaagacagtaattaatgatcctttatataaagagaatgctatgaaattatcaagaattcatcatgatcaaccagtgaagccccttgaaagagcagtcttctggattgaatttgtcatgcgccataaaggagccaagcaccttcgggttgcagcccacgacctcacctggttccagtaccactctttggatgtgactgggttcctgctggcctgtgtggcaactgtgatattcatcatcacaaaatgtctgttttgtgtctggaagtttgttagaacaggaaagaaggggaaaagagattaattacgtctgaggctggaagctgggaaacccaataaatgaactcctttagtttattacaacaagaagacgttgtgatacaagagattcctttcttcttgtgacaaaacatctttcaaaacttaccttgtcaagtcaaaatttgttttagtacctgtttaaccattagaaatatttcatgtcaaggaggaaaacattagggaaaacaaaaatgatataaagccataygaggttatattgaaatgtattgagcttatattgaaatttattgttccaattcacaggttacatgaaaaamaatttactaagcttaactacatgtcacacattgtacatggaaacaagaacattaagaagtccactgacagtatcagtactgttttgcaaatactcagcatactttggatccatttcatgcaggattgtgttgttttaactgttgttgaggaarctaataaataattaaattgtatagaa

SEQ ID NO: 1430 - DNA, 1859 bp, Homo sapiens
gcaactggaaaacaagcattgcattgcatcaggatgtctatgaaatggacttcagctcttctgctgatacagctgagctgttactttagctctgggagttgtggaaaggtgctggtgtggcccacagaattcagccactggatgaatataaagacaatcctggatgaacttgtccagagaggtcatgaggtgactgtattggcatcttcagcttccatttctttcgatcccaacagcccatctactcttaaatttgaagtttatcctgtatctttaactaaaactgagtttgaggatattatcaagcagctggttaagagatgggcagaacttccaaaagacacattttggtcatatttttcacaagtacaagaaatcatgtggacatttaatgacatacttagaaagttctgtaaggatatagtttcaaataagaaacttatgaagaaactacaggagtcaagatttgatgttgttcttgcagatgctgttttcccctttggtgagctgctggccgagttacttaaaataccctttgtctacagcctccgcttctctcctggctacgcaattgaaaagcatagtggaggacttctgttccctccttcctatgtgcctgttgttatgtcagaactaagtgaccaaatgactttcatagagagggtaaaaaatatgatctatgtgctttattttgaattttggttccaaatatttgacatgaagaagtgggatcagttctacagtgaagttctaggaagacccactacgttatctgagacaatggcaaaagctgacatatggcttattcgaaactactgggattttcaatttcctcacccactcttaccaaatgttgagttcgttggaggactccactgcaaacctgccaaacccctaccgaaggaaatggaagagtttgtccagagctctggagaaaatggtgttgtggtgttttctctggggtcgatggtcagtaacacrtcagaagaaagggccaatgtaattgcatcagcccttgccaagatcccacaaaaggttctgtggagatttgatgggaataaaccagatactttaggactcaatactcggctgtacaagtggataccccagaatgatcttcttgatataaagagaatgctatgaaattatcaagaattcatcatgatcaaccagtgaagccccttgaaagagcagtcttctggattgaatttgtcatgcgccataaaggagccaagcaccttcgggttgcagcccacgacctcacctggttccagtaccactctttggatgtgactgggttcctgctggcctgtgtggcaactgtgatattcatcatcacaaaatgtctgttttgtgtctggaagtttgttagaacaggaaagaaggggaaaagagattaattacgtctgaggctggaagctgggaaacccaataaatgaactcctttagtttattacaacaagaagacgttgtgatacaagagattcctttcttcttgtgacaaaacatctttcaaaacttaccttgtcaagtcaaaatttgttttagtacctgtttaaccattagaaatatttcatgtcaaggaggaaaacattagggaaaacaaaaatgatataaagccataygaggttatattgaaatgtattgagcttatattgaaatttattgttccaattcacaggttacatgaaaaamaatttactaagcttaactacatgtcacacattgtacatggaaacaagaacattaagaagtccactgacagtatcagtactgttttgcaaatactcagcatactttggatccatttcatgcaggattgtgttgttttaactgttgttgaggaarctaataaataa

SEQ ID NO: 1431 - DNA, 1760 bp, Homo sapiens
  misc_feature (1)...(1760): n = A,T,C or G
aaaagcagagaaaaacatttgcttcacatctcatcaaatcttctgcatcaagccacatcatgttaaacaaccttctgctgttctcccttcagataagtctcataggaaccactcttggtgggaatgttttgatttggccaatggaaggtagtcattggctaaatgttaagataattatagatgagctcattaaaaaggagcataatgtgactgtcctagttgcctctggtgcacttttcatcacaccaacctctaacccatctctgacatttgaaatatatarggtgccctttggcaaagaaagaatagaaggagtaattaaggacttcgttttgacatggctggaaaatagaccatctccttcaaccatttggagattctatcaggagatggccaaagtaatcaaggacttccacatggtgtctcaggagatctgtgatggcgttcttaaaaaccaacagctgatggcaaagctaaagaaaagcaagtttgaagtcctggtgtctgatccagtatttccttgtggcgatatagtagctttaaaacttggaattccatttatgtactccttgaggttttctccagcctcaacagtggaaaagcactgtgggaaggtaccataccctccttcctatgttcctgctgttttatcagaactcaccgaccaaatgtctttcactgacagaataagaaatttcatctcctaccacctacaggactacatgtttgaaactctttggaaatcatgggattcatactatagtaaagctttaggaagacccactacgttatgtgagactatggggaaagctgaaatttggttaatccgaacatattgggattttgaatttcctcgtccatacttacctaattttgagtttgttggaggattgcactgcaaacctgccaaacctttacctaaggaaatggaagaatttatccagagctcaggtaaaaatggtgttgtggtgttttctctgngatcaatggtcaaaaaccttacagaagaaaaggccaatcttattgcctcagcccttgcccagattccacagaaggttttatggagatacaaaggaaagaaaccagccacattaggaaacaatactcagctctttgattggataccccagaatgatcttcttggacatcccaaaaccaaagcttttatcactcatggtggaactaatgggatctacgaagctatttaccacggagtccctatggtgggarttcccatgtttgctgatcagcctgataacattgctcacatgaaggccaaaggagcagctgtggaagtgaacctaaacacaatgacaagtgtggatttgcttagcgctttgagaacagtcattaatgaaccttcttataaagagaatgctatgaggttatcaagaattcaccatgatcaacctgtaaagcccctggatcgagcagtcttctggatcgagtttgtcatgcgccacaaaggagccaagcaccttcgggttgcagcccatgacctcacctggttccagtaccactctttggatgtaattgggttcttgctggtctgtgtgacaacggctatatttttggtcatacaatgttgtttgttttcctgtcaaaaatttggtaagataggaaagaagaaaaaaagagaataggtcaagaaaaagaggaaatatatatatttttaagtttggcaaaatcctgagtagtgtagtcctattaattccagacaaaaggagtttaacaaaaacacgtctcccatcctgtttcca

SEQ ID NO: 1432 - DNA, 1082 bp, Homo sapiens
cccgacactgcgggttgtcacaacggcaccctcccgctttctctctgcctcggatttagtcgtgactgtgtgtctccgccgtggtgcagcttcaggcctctcccgcatctactctctcacgcttccgctgcggcctgagggagggcggcgggcggaccacggaccggggttrgcatacgtatcaaggacagtaactaccatggctcccgaagttttgccaaaacctcggatgcgtggccttctggccaggcgtctgcgaaatcatatggctgtagcattcgtgctatccctgggggttgcagctttgtataagtttcgtgtggctgatcaaagaaagaaggcatacgcagatttctacagaaactaygatgtcatgaaagattttgaggagatgaggaaggctggtatctttcagagtgtaaagtaatcttggaatataaagggtctccctctgtcacccaggccgtagtgctgtagtgcgatcatggctcactgcagcctcaacctcccaggctcaagggatcttcctgcctcagcctcccaagaagctggcactataggcatgtgccaccacacctggctaacttctttatttttagtagagacagggtttcaccatattacctgggctgtgcttgaattcctgggctcaggcgatccgtccaccttggcctcccaaagtgttgggattacaggcgtgagccactgtgcctggcataattttggtattttttgatagtagccatcctaataggtatgaggtggtatcattgtggttttgatttgcatttccctgattatttgtgttcttgagcatcttttcatgtacttattggccatttgtatgttatctttggagaaatgtttattcagttctgctcattttcaaatttggttttttgtttattggttgagttgttctgtatatattctggatattaaccccttatcagatatgatttgtaaatattttctcccatttcataggttgccttttcactctgttgtgtcccttgatgcacagaaattttgatgtcgaatttatttttatttttgttctgtgtgcttttagtgtcatattc

SEQ ID NO: 1433 - DNA, 952 bp, Homo sapiens
cccgacactgcgggttgtcacaacggcaccctcccgctttctctctgcctcggatttagtcgtgactgtgtgtctccgccgtggtgcagcttcaggcctctcccgcatctactctctcacgcttccgctgcggcctgagggagggcggcgggcggaccacggaccggggttrgcatacgtatcaaggacagtaactaccatggctcccgaagttttgccaaaacctcggatgcgtggccttctggccaggcgtctgcgaaatcatatggctgtagcattcgtgctatccctgggggttgcagctttgtataagtttcgtgtggctgatcaaagaaagaaggcatacgcagatttctacagaaactaygatgtcatgaaagattttgaggagatgaggaaggctggtatctttcagagtgtaaagtaatcttggaatataaagaatttcttcaggttgaattacctagaagtttgtcactgacttgtgttcctgaactatgacacatgaatatgtgggctaagaaatagttcctcttgataaataaacaattaacaaatactttggacagtaagtctttctcagttcttaatgataatgcagggcacttactagcataagaattggtttgggatttaactgtttatgaagctaacttgatttccgtgttttgttaaaatttcattgttctagcacatctttaactgtgatagtttgtccgtttcattgcagttacttggtcttgggctatggattaaaaagtgttcttcatgagcctgtaagactactgtactgtgggctctaagaagagatagaatcctaataaaatctatccttggccttcattgccactatttggtagctgtgccaccaccacatagttgaaataggtaattcaaatgtagggtttcttactcagtattgctttattaataacaagctaacagtatktaa

SEQ ID NO: 1434 - DNA, 1160 bp, Homo sapiens
tgtgagctcctagaagtcagctttttcacttttacccaagccaaacggttattcgcgtaaggttggttataattaaaatgtcggtttgtgcacatggtttgggactctgtgtatgagtacgactaatatcttcaatttactaagaagataaagaggtcgataaataaggaggtcaagcccgttttgcaaggtcacacaggaaagaagcagaccacgaaatgaacttcggctgtcacctgcggtgggcgcactagaggtcttttgaactccttcggctaccgtcgccgcgttytcgctgtgcactcttattctgcgcctgcgcgcggctacagcacggttcgtttttcctttagtcaggaaggacgttggtgttgaggttrgcatacgtatcaaggacagtaactaccatggctcccgaagttttgccaaaacctcggatgcgtggccttctggccaggcgtctgcgaaatcatatggctgtagcattcgtgctatccctgggggttgcagctttgtataagtttcgtgtggctgatcaaagaaagaaggcatacgcagatttctacagaaactaygatgtcatgaaagattttgaggagatgaggaaggctggtatctttcagagtgtaaagtaatcttggaatataaagaatttcttcaggttgaattacctagaagtttgtcactgacttgtgttcctgaactatgacacatgaatatgtgggctaagaaatagttcctcttgataaataaacaattaacaaatactttggacagtaagtctttctcagttcttaatgataatgcagggcacttactagcataagaattggtttgggatttaactgtttatgaagctaacttgatttccgtgttttgttaaaatttcattgttctagcacatctttaactgtgatagtttgtccgtttcattgcagttacttggtcttgggctatggattaaaaagtgttcttcatgagcctgtaagactactgtactgtgggctctaagaagagatagaatcctaataaaatctatccttggccttcattgccactatttggtagctgtgccaccaccacatagttgaaataggtaattcaaatgtagggtttcttactcagtattgctttattaataacaagctaacagtatktaa

SEQ ID NO: 1435 - DNA, 2793 bp, Homo sapiens
aggcctgcggcgaggatggagggcctggcagtgcggttgctgcgcggcagcaggctgctaagaagaaatttcctgacttgtttgtcttcttggaagattcctcctcatgtctcaaaatcttcccagtcagaagctctactcaatataacaaataatggaatacactttgctcccctgcaaacrtttacagatgaggaaatgatgataaagagttcagttaaaaaatttgctcaggaacaaattgcacctttggtttcaaccatggatgaaaattcgaaaatggagaaatcagtaatacaaggattatttcaacaagggttgatgggtattgaagttgacccagaatatggaggcacaggagcttcatttttatccactgtgctcgtgatagaggaattagccaaagttgatgcatctgtggctgtcttttgtgagatccagaacacattaattaacacactgattagaaaacatggaacagaagaacaaaaggccacctatttgcctcagctcactacagaaaaagtaggaagtttctgcctttcagaggctggagcaggtagtgactcatttgctttgaagaccagagctgataaagagggagattattatgtcctcaatggatcaaagatgtggatcrgcagtgctgagcaygcagggctctttctggtgatggcaaatgtagaccctaccattggatataagggaattacctccttcttagtagatcgtgatactccgggccttcatatagggaaacctgaaaacaaattggggytcagagcttcttccacctgcccgttaacattcgaaaatgtcaaggttccagaagccaatatcttgggacaaattggacatggctataagtatgccatagggagtctcaatgaaggtagaataggaattgctgcacagatgctgggactggcgcaaggatgttttgactacactattccatatrttaaagaaaggatacaatttggcaaaagactatttgattttcagggcctccaacaccaagtggctcaygtggccacccagctggaagctgcaagattactaacatacaatgctgctaggcttttagaagctggaaagccattcataaaagaagcgtcaatggccaaatactatgcatcagagattgcaggacaaacaacgagtaaatgtatcgagtggatggggggagtaggctacaccaaagattaccctgtggagaaatacttccgagatgcaaagattggtacgatatatgaaggagcttccaacatccagttgaacaccattgcaaagcatatcgatgcagaatactgacgtctataggagtgggacccctycctggtgtcactgctgtaaaattttaaacggttgtgtcttgttgggagtaagtgccttgcgtgggaataaacttccacagcattcraatattttaatgaagcccttagtcagggtcctggtgttggcctttttggttttctcttttcaggctgtttaacttaggcacaggagatccacttttaaacttgggaaataagcacctgtatttttttccaaaactgtttttaaagctgtatacgcatacatatatatatttttactctgtcttactctgtcacccaggctagagtgcagtggcgcgatctcagctcactgcagccttgacctcctgggttccagtgattctcatgcctcatcctcccaagtagctggaactacaggtgtgcaccaccatgcctggttcatttttgtgtttttagtagagatggggttttaccatattgcccaggctggtcttctggcttctggatatcgcccaccttggcctcccaaagtgctgggattacagggatgagccaccrtgcctggctgggtatttatattatcattctagtttcagagtatacagaagtttcatcccatcatttggaaaaataaaggcatctgaagtacaatattacttatagaaatagtttatattcctattaaatcttaatcttgtggcatcagggaaatatttgttacatagtaggcaatttttatccagtactttatagattcaactctaagttgcaagcgaagtcaaaactgatgaaaatttatttagaaaaatctaaaaattctggttttaaatatgagaatcagtggaaaataagggtataattttgtaggtcatatgattgaagaaaatattattttaacaatgtaaagcaatatgatttgttactataattaacctgtataaaagatacattttatggtggtttcagtaggtcattttaaaaaccaatgtgcattagttttcaagtataaggtttaagtaatttggtttaataatcagaaaatattcaatacagtgttggatattctgtcatgcactatttttcagttgacaatttctgtattttaattgaatactgtttcttcagtcatggttattgcactttatcctgaataatarttcagaaattgggttttggttcagtgattctcaagaaaaagatctcttgcccattaagaagtgtatcaaaatctcataaggaatgagggagagaagggggctgtasagtttgaaaaagcatattcaatattaaaatagttttatatttgggaaggcaaaaatgaatctattgttttgcaatataggttataaacaggcaaaatgcaataaaatatatatctggttgtattagtctgttttcacgctgctgataaagacatacctgagaccaggaagaaaaagaggtttaattggacttacagttccacatgactggggaggcctcagaatcatgg

SEQ ID NO: 1436 - DNA, 957 bp, Homo sapiens
ggccccgttccatttycacagctcctcctccccggccgcgcgcccctcccgccccgcgcgcgcctcctctttctcgcggccgagttcagcccgggcagccatatgggggatacgccagcaacagacgccggccgccaagatctgcatccctaggccacgctaagaccctggggaagagcgcaggagcccgggagaagggctggaaggagggractggacgtgcggagaattcccccctaaaaggcagaagcccccgcccccaccctcgagctccgctcgggcagagcgcctgcctgcctgccgctgctgcgggcgcccacctcgcccagccatgccaggcccggccaccgacgcggggaagatccctttctgcgacgccaaggaagaaatccgtgccgggctcgaaagctctgagggcggcggcggccyggagaggccaggcgcgcgcgggcagcggcagaacatcgtytggaggaatgtcgtcctgatgagcttgctccacttgggggccgtgtactccctggtgctcatccccaaagccaagccactcactctgctctgggcctacttctgcttcctcctggccgctctgggtgtgacagctggtgcccatcgcttgtggagccacaggtcctaccgggccaagctgcctctgaggatatttctggctgtcgccaactccatggctttccaggcagcagcagaagtggtcctgacccagatgccctgacagcttttcctggtgtgattttggaagttaacccttgaacagaatgggtttgaactgcgcagcttcacttaaatgcatggattttcttctgcctccaccacctctgagacagcaagatcagcccctcctcctctcagcctactcaatgcaaagaagacaaggatgaagacctttatgatgatccacttccacttaatgaatagtaaatatattttctcttcttatga

SEQ ID NO: 1437 - DNA, 3111 bp, Homo sapiens
ggccccgttccatttycacagctcctcctccccggccgcgcgcccctcccgccccgcgcgcgcctcctctttctcgcggccgagttcagcccgggcagccatatgggggatacgccagcaacagacgccggccgccaagatctgcatccctaggccacgctaagaccctggggaagagcgcaggagcccgggagaagggctggaaggagggractggacgtgcggagaattcccccctaaaaggcagaagcccccgcccccaccctcgagctccgctcgggcagagcgcctgcctgcctgccgctgctgcgggcgcccacctcgcccagccatgccaggcccggccaccgacgcggggaagatccctttctgcgacgccaaggaagaaatccgtgccgggctcgaaagctctgagggcggcggcggccyggagaggccaggcgcgcgcgggcagcggcagaacatcgtytggaggaatgtcgtcctgatgagcttgctccacttgggggccgtgtactccctggtgctcatccccaaagccaagccactcactctgctctgggcctacttctgcttcctcctggccgctctgggtgtgacagctggtgcccatcgcttgtggagccacaggtcctaccgggccaagctgcctctgaggatatttctggctgtcgccaactccatggctttccagaatgacatcttcgagtggtccagggaccaccgagcccaccacaagtactcagagacggatgctgacccccacaatgcccgccggggcttcttcttctcccatattgggtggctgtttgttcgcaagcatcgagatgttattgagaaggggagaaagcttgacgtcactgacctgcttgctgatcctgtggtccggatccagagaaagtactataagatctccgtggtgctcatgtgctttgtggtccccacgctggtgccctggtacatctggggagagagtctgtggaattcctacttcttggcctctattctccgctataccatctcactcaacatcagctggctggtcaacagcgccgcccacatgtatggaaaccggccctatgacaagcacatcagccctcggcagaacccactcgtcgctctgggtgccattggtgaaggcttccataattaccatcacacctttccctttgactactctgcgagtgaatttggcttaaattttaacccaaccacctggttcattgatttcatgtgctggctggggctggccactgaccgcaaacgggcaaccaagccgatgatcgaggcccggaaggccaggactggagacagcagtgcttgaacttggaacagccatcccacatgtctgccgttgcaacctcggttcatggctttggttacaatagctckcttgtacattggatcgtgggagggggcagagggtggggaaggaacgagtcaatgtggtttgggaatgtttttgtttatctcaaaataatgttgaaatacaattatcaatgaaaaaactttcgtttttttttttgtttgttttgtttttgagacagagtctcactctgtcacccaggctggagtgcagtggcgcagtctcggctcactgcagcctccacctacctggttcaagcaattctcctgcctcagcctcctgagtagctgagattacaggagcctgccaccacacccagctaatttttttgtatttttagtagagacagggtttcatcatgttggccagactggcctcgaattcctgacctcaggcaatccacccgcctcggcctcccaaagagctgggattacaggcgtgagccaccgcaccctgccgaaaaaaacttttttttttttgagacggaggctcgctctgtcccccaggctggagtgcagtggcgagatytcagctcactgyaagctccgcctcccgggttcacgccattctcctgcctcagcctcccgagtagctgggagccagcgcgcccagcctaaaaaacttttcaagtcaatattactacgatttaacattagagtgtggacatgtgatttaatcgctatagctaaaatacgtcaaatatacgttgtcatgtgcttgaacatgatgctaaccctgacaggatgaaggaaagtaatattctttcagtgtagttcaggagagcatttgttttcttttctaccaattaacccatcattgcttttaaacaaccatctgaaggagcagagaggcagggtagaagacagaagggggatctatgtggtaactaaagaatgtttctgttttgttaattattgtgtgtgtgtggttttattgtttgcttaagagaatcaaaaactgaaaaaaatgagaatacaggaaatggctcttgtttatttttttgctgtgtttacagcttgttaatgctctactgtctttgtttcaagagagatttgttcactgcccagctcgttttgtgtcctgagccctatgsccagcccaccttataaatcatgcctgtttagatgtttgattttgttctgtttgctattgttatcttaaaggtgtataactctgacatgccagacatcaaattaagctcaaattaagctctcgtttaaatgtttaarcacctaatttatattctaattgatcccagccactgatgcatgtactttagctacttctgctaaataagcatattaattttccacatcagrccatcagatcttgagaaccaacagttatctagaattccgtgtctactaatgtttcacctgcatgcagccttcattaattttgtagcaaaatataaagtgatcattatgtagyttctggattaaaaaaatttgtgtgtgaagttgctttgtaaagtgcatgtggaattaatgggacagtgtgccctttgtgttagatgttagagcaaaagaaagggcttatagtgttagtattggagcactttgaagatagatattttcagaaaagatgtaggatttaaaagttaaattttaaattttagaaaaagatatgatggcaattggaaatagtcacaatgaagttcttcatccagtaggtgtttaacagtgttattttgccactggtaatgtgtaaactgtgagtgatttacaataaatgattatgaattc

SEQ ID NO: 1438 - DNA, 915 bp, Homo sapiens
tcccgccccgcgcgcgcctcctctttctcgcggccgagttcagcccgggcagccatatgggggatacgccagcaacagacgccggccgccaagatctgcatccctaggccacgctaagaccctggggaagagcgcaggagcccgggagaagggctggaaggagggractggacgtgcggagaattcccccctaaaaggcagaagcccccgcccccaccctcgagctccgctcgggcagagcgcctgcctgcctgccgctgctgcgggcgcccacctcgcccagccatgccaggcccggccaccgacgcggggaagatccctttctgcgacgccaaggaagaaatccgtgccgggctcgaaagctctgagggcggcggcggccyggagaggccaggcgcgcgcgggcagcggcagaacatcgtytggaggaatgtcgtcctgatgagcttgctccacttgggggccgtgtactccctggtgctcatccccaaagccaagccactcactctgctctggggtaacctacttctgcttcctcctggccgctctgggtgtgacagctggtgcccatcgcttgtggagccacaggtcctaccgggccaagctgcctctgaggatatttctggctgtcgccaactccatggctttccaggcagcagcagaagtggtcctgacccagatgccctgacagcttttcctggtgtgattttggaagttaacccttgaacagaatgggtttgaactgcgcagcttcacttaaatgcatggattttcttctgcctccaccacctctgagacagcaagatcagcccctcctcctctcagcctactcaatgcaaagaagacaaggatgaagacctttatgatgatccacttccacttaatgaatagtaaatatattttctcttcttatga

SEQ ID NO: 1439 - DNA, 2089 bp, Homo sapiens
ggccccgttccatttycacagctcctcctccccggccgcgcgcccctcccgccccgcgcgcgcctcctctttctcgcggccgagttcagcccgggcagccatatgggggatacgccagcaacagacgccggccgccaagatctgcatccctaggccacgctaagaccctggggaagagcgcaggagcccgggagaagggctggaaggagggractggacgtgcggagaattcccccctaaaaggcagaagcccccgcccccaccctcgagctccgctcgggcagagcgcctgcctgcctgccgctgctgcgggcgcccacctcgcccagccatgccaggcccggccaccgacgcggggaagatccctttctgcgacgccaaggaagaaatccgtgccgggctcgaaagctctgagggcggcggcggccyggagaggccaggcgcgcgcgggcagcggcagaacatcgtytggaggaatgtcgtcctgatgagcttgctccacttgggggccgtgtactccctggtgctcatccccaaagccaagccactcactctgctctgggcctacttctgcttcctcctggccgctctgggtgtgacagctggtgcccatcgcttgtggagccacaggtcctaccgggccaagctgcctctgaggatatttctggctgtcgccaactccatggctttccagaatgacatcttcgagtggtccagggaccaccgagcccaccacaagtactcagagacggatgctgacccccacaatgcccgccggggcttcttcttctcccatattgggtggctgtttgttcgcaagcatcgagatgttattgagaaggggagaaagcttgacgtcactgacctgcttgctgatcctgtggtccggatccagagaaatacacagcacatccagaaasaaggaagagctctcaatcaagaggcagcgtgtgagatgcttcgtgaatggcatcaagggcatatattgaaagtcacccttcccggattacacattttagctttgttacatactcattgtaaccactcygaaaagtgctgcttgatgmtgcgtgctctttctgtgtccctggaggtattctgaaggtcagaagagagatatacaacagcgaggcttggtgataacgtatagaataacagacggggactccacacccaggccttttttaacggtgtgaagcatagacagagctgcagtctgtgctaacattaggttatttattgattcaatcagttgacacaaggaggcagctacggggaggtaaaatatggtcctaaaatcaaaaagatttcagttttgtcattctgtctctgagattctatttccacatctagagcagggtaataatgatacctaccttayaaaattattgggagaatacattagttaatatatgtgaaagtatggaggagatgtgcaataaatatttgtgttattaactacacatacagcactctataggagatattccatttataaaaactttaggttctaaaaasctgtacacgttgattatttttgtaagtcaaaagtgattaagaggagtttaagctatcatttccagatgtatttctataaataaaaacataagtatattcagttgatttggggtggagagttccatagatgtctgttaggtccgcttggtccagagctgagttcaagtcctgaatatccttgttaattttctgtcttgttgatctgtctaatattgacagtggggtattaaagtctcccactattattatatgggagtctaagtctccttgtaggtctctaagaacttgctttatgaatctgggtgctcctgtattaggtgcatacatatttaggatagttagctcttcttgctgcattgatcccattaccattatataakgcccttctttgtcttttttgatctttgttggtttaaagtctgttttattagagactaggattgcaacccctgctattttttttttttttttgcttgataaatattcctgtatccctttattttgagcctatatgtgtctttgcacgtgaggtgggtctcctgaatacagcacaccgatgggttttgactct

SEQ ID NO: 1440 - DNA, 2796 bp, Homo sapiens
cgggatccccaggcctggaggggggtctgtgcgcggccggctggctctgccccgcgtccggtcccgagcgggcctccctcgggccagcccgatgtgaccgagcccagcggagcctgagcaaggagcgggtccgtcgcggagccggagggcgggaggaacatgacatcgcggagatggtttcacccaaatatcactggtgtggaggcagaaaacctactgttgacaagaggagttgatggcagttttttggcaaggcctagtaaaagtaaccctggagacttcacactttccgttagaagaaatggagctgtcacccacatcaagattcagaacactggtgattactrtgacctgtatggaggggagaaatttkscactttggctgagttggtccagtattacatggaacatcaygggcaattaaaagagaagaatggagatgtcattgagcttaaatatcctctgaactgtgcagatcctacctctgaaaggtggtttcatggacatctctctgggaaagaagcagagaaattattaactgaaaaaggaaaacatggtagttttcttgtacgagabagccagagccaccctggagattttgttctttctgtgcgcactggtgatgacaaaggggagagcaatgacggcaagtctaaagtgacccatgttatgattcgctgtcaggaactgaaatacgacgttggtggaggagaacggtttgattctttgacagatcttgtggaacattataagaagaatcctatggtggaaacattgggtacagtactacaactcaagcagccccttaacacgactcgtataaatgctgctgaaatagaaagcagagttcgagaactaagcaaattagctgagaccacagataaagtcaaacaaggcttttgggaagaatttgagacactacaacaacaggagtgcaaacttctctacagccgaaaagagggtcaaaggcaagaaaacaaaaacaaaaatagatataaaaacatcctgccctttgatcataccagggttgtcctacacgatggtgatcccaatgagcctgtttcagattacatcaatgcaaatatcatcatgcctgaatttgaaaccaagtgcaacaattcaaagcccaaaaagagttacattgccacacaaggctgcctgcaaaacacggtgaatgacttttggcggatggtgttccaagaaaactcccgagtgattgtcatgacaacgaaagaagtggagagaggaaagagtaaatgtgtcaaatactggcctgatgagtatgctctaaaagaatatggcgtcatgcgtgttaggaacgtcaaagaaagcgccgctcatgactatacgctaagagaacttaaactttcaaaggttggacaagggaatacggagagaacggtctggcaataccactttcggacctggccggaccacggcgtgcccagcgaccctgggggcgtgctggacttcctggaggaggtgcaccataagcaggagagcatcatggatgcagggccggtcgtggtgcactgcagtgctggaattggccggacagggacgttcattgtgattgatattcttattgacatcatcagagagaaaggtgttgactgcgatattgacgttcccaaaaccatccagatggtgcggtctcagargwcagggrtggtccagacagaagcacagtaccgatttatctatatggcggtccagcattatattgaaacactacagcgcaggattgaagaagagcagaaaagcaagaggaaagggcacgaatatacaaatattaagtattctctagcggaccagacgagtggagatcagagccctctcccgccttgtactccaacgccaccctgtgcagaaatgagagaagacagtgctagagtctatgaaaacgtgggcctgatgcaacagcagaaaagtttcagatgagaaaacctgccaaaacttcagcacagaaatagatgtggactttcaccctctccctaaaaagatcaagaacagacgcaagaaagtttatgtgaagacagaatttggatttggaaggcttgcaatgtggttgactaccttttgataagcaaaatttgaaaccatttaaagaccactktattttaactcaacaatacctgcttcccaattactcatttcctcagataagaagaaatcatctctacaatgtagacaacattatattttatagaatttgtttgaaattgaggaagcagttaaattgtgcgctgtattttgcagattatggggattcaaattctagtaataggcttttttatttttatttttatacccttaaccagtttaattttttttttcctcattgttggggatgatgagaagaaatgatttgggaaaattaagtaacaacgacctagaaaagtgagaacaatctcatttaccatcatgtatcsagtagtgkataattcattttgatggcttctatttttggccaaatgagaattaagccagtgcctgagactgtcagaagttgacctttgcactggcattaaagagtcatagaaaaagaatcatggatatttatgaattaaggtaagaggtgtggcttttttttttttcttttttccagccgttgaccaattatagttcggctgttgactgagaagtttgtggtgggaaaacgtttgccatattttctttgcatttgaataattgtcttgtacttagaaaaaaggcgtctatgaatgaccagtgtttttggtcgccaaatgttgctgacaaacttatcccaaaactttagtggcttaaaaaaacctg

SEQ ID NO: 1441 - DNA, 5441 bp, Homo sapiens
agtaaggagccggatgattgcctcagcaggtgtgaagcgtgtgctttagtttcgtgggaggcctggcatccccgagagggaggggaaaggtaaccactcctttgtggaggtcgccagggtcattgtcgtggatttgcacagtcggctgggcggtgcaatggcggaaagaaaaggaacagccaaagtggactttttgaagaagattgagaaagaaatccaacagaaatgggatactgagagagtgtttgaggtcaatgcatctaatttagagaaacagaccagcaagggcaagtattttgtaaccttcccatatccatatatgaatggacgccttcatttgggacacacgttttctttatccaaatgtgagtttgctgtagggtaccagcgattgaaaggaaaatgttgtctgtttccctttggcctgcactgtactggaatgcctattaaggcatgtgctgataagttgaaaagagaaatagagctgtatggttgcccccctgattttccagatgaagaagaggaagaggaagaaaccagtgttaaaacagaagatataataattaaggataaagctaaaggaaaaaagagtaaagctgctgctaaagctggatcttctaaataccagtggggcattatgaaatcccttggyctgtctgatgaagagatagtaaaattttctgaagcagaacattggcttgattatttcccgccactggctattcaggatttaaaaagaatgggtttgaaggtagactggcgtcgttccttcatcaccactgatgttaatccttactatgattcmtttgtcagatggcaatttttaacattaagagaaagaaacaaaattaaatttgggaagcggtatacaatttactctccgaaagatggacagccttgcatggatcatgatagacaaactggagagggtgttggacctcaggaatatactttactcaaattgaaggtgcttgagccatacccatctaaattaagtggcctgaaaggtaaaaatattttcttggtggctgctactctcagacctgagaccatgtttgggcagacaaattgttgggttcgtcctgatatgaagtacattggatttgagacggtgaatggtgatatattcatctgtacccaaaaagcagccaggaatatgtcataccagggctttaccaaagacaatggcgtggtgcctgttgttaaggaattaatgggggaggaaattcttggtgcatcactttctgcacctttaacatcatacaaggtgatctatgttctcccaatgctaactattaaggaggataaaggcactggtgtggttacaagtgttccttccgactcccctgatgatattgctgccctcagagacttgaagaaaaagcaagccttacgagcaaaatatggaattagagatgacatggtcttgccatttgagccggtgccagtcattgaaatcccaggttttggaaatctttctgctgtaaccatttgtgatgagttgaaaattcagagccagaatgaccgggaaaaacttgcagaagcaaaggagaagatatatctaaaaggattttatgagggtatcatgttggtggatggatttaaaggacagaaggttcaagatgtaaagaagactattcagaaaaagatgattgacgctggagatgcacttatttacatggaaccagagaaacaagtgatgtccaggtcgtcagatgaatgtgttgtggctctgtgtgaccagtggtacttggattatggagaagagaattggaagaaacagacatctcagtgcttgaagaacctggaaacattctgtgaggagaccaggaggaattttgaagccaccttaggttggctacaagaacatgcttgctcaagaacttatggtctaggcactcacytgccttgggatgagcagtggctgattgaatcactttctgactccactatttacatggcattttacacagttgcacacctattgcaggggggtaacttgcatggacaggcagagtctccgctgggcattagaccgcaacagatgaccaaggaagtttgggattatgttttcttcaaggaggctccatttcctaagactcagattgcaaaggaaaaattagatcagttaaagcaggagtttgaattctggtatcctgttgatcttcgcgtctctggcaaggatcttgttccaaatcatctttcatattacctttataatcatgtggctatgtggccggaacaaagtgacaaatggcctacagctgtgagagcaaatggacatctcctcctgaactctgagaagatgtcaaaatccacaggcaacttcctcactttgacccaagctattgacaaattttcagcagatggaatgcgtttggctctggctgatgctggtgacactgtagaagatgccaactttgtggaagccatggcagatgcaggtattctccgtctgtacacctgggtagagtgggtgaaagaaatggttgccaactgggacagcctaagaagtggtcctgccagcactttcaatgatagagtttttgccagtgaattgaatgcaggaattataaaaacagatcaaaactatgaaaagatgatgtttaaagaagctttgaaaacagggttttttgagtttcaggccgcaaaagataagtaccgtgaattggctgtggaagggatgcacagagaacttgtgttccggtttattgaagttcagacacttctcctcgctccattctgtccacatttgtgtgagcacatctggacactcctgggaaagcctgactcaattatgaatgcttcatggcctgtggcaggtcctgtkratgaagttttaatacactcctcacagtatcttatggaagtaacacatgaccttagactacgactcaagaactatatgatgccagctaaagggaagaagacygacaaacaacccctgcagaagccctcacattgcaccatctatgtggcaaagaactatccaccttggcaacataccaccctgtctgttctacgtaaacactttgaggccaataayggaaaactgcctgacaacaaagtcattgctagtgaactaggcagtatgccagaactgaagaaatacatgaagaaagtyatgccatttgttgccatgattaaggaaaatctggagaagatggggcctcgtattctggatttgcaattagaatttgatgaaaaggctgtgcttatggagaatatagtctrtctgactaattcgcttgagctagaacacatagaagtcaagtttgcctccgaagcagaagataaaatcagggaagactgctgtcctgggaaaccacttaatgtttttagaatagaacctggtgtgtccgtttctctggtgaatccccagccatccaatggccacttctcaaccaaaattgaaatcargcaaggagataactgtgattccataatcaggcgtttaatgaaaatgaatcgaggaattaaagacctttccaaagtgaaactgatgagatttgatgatccactgttggggcctcgacgagttcctgtcctgggaaaggagtacaccgagaagacccccatttctgagcatgctgttttcaatgtggacctcatgagcaagaaaattcatctgactgagaatgggataagggtggatattggcgatacaataatctatctggttcattaaactcatgcacattggagatttatcctggtttcttaggaatactactactctgattgtgtctactgattggctatcagaaccttaggctggacctaaatagattgatttcatttctaaccatccaattctgcatgtattcataattckatcaagtcatctttgattcctggacctaataaattttttttccctttctttgggtgtccaagagaaatggtttttgccaaactctttttaaaaaacaaattgttgctatttcctagaagtttctggtttttaagatgaacataaaagtgtcagtatgcttcttttatgaggtgtactttatactttgatgaaggctaaggtgtacctaacagctttttatagtatattcatttatggagttagctgtattttttttwaaaaaagaaaagtagtaaattagcagcttttttttttaaatgaagagaacttcatgatgatttaaaagaactaatgagaatattttgacttgacttcaattactaagtattttgtataaagaacaaataggtcctgcattttataagactttttaaagctttaattattcaactaagaaccaataatggcttcttcaaggctaatatcaatagtttataagcagtatatttcacctacactaaatatgggcattttaaaagaagattccccccttcccccccagaaatctgcatttactaaatttgtcttaagtccaattgtgtttaaaggtcatgctggtcgggtgtggtggctcacacctataatcccagcactttgggaggccaaggtgggcagtcacctgaggtcaggagtttgagaccagcctgaccaacatggtgaaaccccgtctctactaaaaatacaaaaattagcttggcatggtggcgggtacctgtaatcccagctgcttgggagtgtgaggcaggagaatcgcttgaacctgggagaccgaggttgcagtgagctgaaaccgtgccattgcactccagcttaggcaacaagagtgaaactctgtctcaatcaatccatcaatcaatcaataaaatagaggtcatgctgactattacagatttattcttttattcttgttggagtgtcttttaatatctgcgccatctgtcttcatatgaggaaaaaatgtaaggcattgactaacaggagaaacatttctaattttgatgggtttaatatggagaaagaacaattttgataacccagaggaacctgaattctaactgcggttatgtaaatagagtttattgagcttccttattttgctctccgcagttagggaccactaggcctagtcatatggtttatcacagatttattgaagccaatcataggatgttagaattagaaatcatcaagtgcaaataatcacttatctactagggacaggcactatagcatagtggggtaagagcgcatgytctgaaatcagactagctaggttagatttccagttcttctttttgctactaggatgctcttggccaattactcggagctgcagttcttcatctataaaatggaactaatactggtaccttgtaggcttattgtgagaygtttagrtgaactgatctaggaaaatcataacacagtgcctggcaagtagtaagtctttagtgaatgttaccattgaagaagaagaagatgatggataccaaggtatattggcttcagattactgtagtctgtaatcatgtcctttgtgttggttcctttggggcaactgattctt

SEQ ID NO: 1442 - DNA, 730 bp, Homo sapiens
gcaggtgtgaagcgtgtgctttagtttcgtgggaggcctggcatccccgagagggaggggaaaggtaaccactcctttgtggaggtcgccagggtcattgtcgtggatttgcacagtcggctgggcggtgcaatggcggtgagaaagaaaaggaacagccaaagtggactttttgaagaagattgagaaagaaatccaacagaaatgggatactgagagagtgtttgaggtcaatgcatctaatttagagaaacagaccagcaagggcaagtattttgtaaccttcccatatccatatatgaatggacgccttcatttgggacacacgttttctttatccaaatgtgagtttgctgtagggtaccagcgattgaaaggaaaatgttgtctgtttccctttggcctgcactgtactggaatgcctattaaggcatgtgctgataagttgaaaagagaaatagagctgtatggttgcccccctgattttccagatgaagaagaggaagaggaagaaaccagtgttaaaacagaagatataataattaaggataaagctaaaggaaaaaagagtaaagctgctgctaaagctggatcttctaaataccagtggggcattatgaaatcccttggyctgtctgatgaagagatagtaaaattttctgaagcagaacattggcttgattatttcccgccactggctattcaggatttaaaaagaatgggtttgaag

SEQ ID NO: 1443 - DNA, 588 bp, Homo sapiens
gaaagaaaaggaacagccaaagtggactttttgaagaagattgagaaagaaatccaacagaaatgggatactgagagagtgtttgaggtcaatgcatctaatttagagaaacagaccagcaagggcaagtattttgtaaccttcccatatccatatatgaatggacgccttcatttgggacacacgttttctttatccaaatgtgagtttgctgtagggtaccagcgattgaaaggaaaatgttgtctgtttccctttggcctgcactgtactggaatgcctattaaggcatgtgctgataagttgaaaagagaaatagagctgtatggttgcccccctgattttccagatgaagaagaggaagaggaagaaaccagtgttaaaacagaagatataataattaaggataaagctaaaggaaaaaagagtaaagctgctgctaaagctggatcttctaaataccagtggggcattatgaaatcccttggyctgtctgatgaagagatagtaaaattttctgaagcagaacattggcttgattatttcccgccactggctattcaggatttaaaaagaatgggtttgaag

SEQ ID NO: 1444 - DNA, 5333 bp, Homo sapiens
gcaggtgtgaagcgtgtgctttagtttcgtgggaggcctggcatccccgagagggaggggaaaggtaaccactcctttgtggaggtcgccagggtcattgtcgtggatttgcacagtcggctgggcggtgcaatggcggtgagaaagaaaaggaacagccaaagtggactttttgaagaagattgagaaagaaatccaacagaaatgggatactgagagagtgtttgaggtcaatgcatctaatttagagaaacagaccagcaagggcaagtattttgtaaccttcccatatccatatatgaatggacgccttcatttgggacacacgttttctttatccaaatgtgagtttgctgtagggtaccagcgattgaaaggaaaatgttgtctgtttccctttggcctgcactgtactggaatgcctattaaggcatgtgctgataagttgaaaagagaaatagagctgtatggttgcccccctgattttccagatgaagaagaggaagaggaagaaaccagtgttaaaacagaagatataataattaaggataaagctaaaggaaaaaagagtaaagctgctgctaaagctggatcttctaaataccagtggggcattatgaaatcccttggyctgtctgatgaagagatagtaaaattttctgaagcagaacattggcttgattatttcccgccactggctattcaggatttaaaaagaatgggtttgaaggtagactggcgtcgttccttcatcaccactgatgttaatccttactatgattcmtttgtcagatggcaatttttaacattaagagaaagaaacaaaattaaatttgggaagcggtatacaatttactctccgaaagatggacagccttgcatggatcatgatagacaaactggagaggtgattatttgtgagacagatggcctgaaaggtaaaaatattttcttggtggctgctactctcagacctgagaccatgtttgggcagacaaattgttgggttcgtcctgatatgaagtacattggatttgagacggtgaatggtgatatattcatctgtacccaaaaagcagccaggaatatgtcataccagggctttaccaaagacaatggcgtggtgcctgttgttaaggaattaatgggggaggaaattcttggtgcatcactttctgcacctttaacatcatacaaggtgatctatgttctcccaatgctaactattaaggaggataaaggcactggtgtggttacaagtgttccttccgactcccctgatgatattgctgccctcagagacttgaagaaaaagcaagccttacgagcaaaatatggaattagagatgacatggtcttgccatttgagccggtgccagtcattgaaatcccaggttttggaaatctttctgctgtaaccatttgtgatgagttgaaaattcagagccagaatgaccgggaaaaacttgcagaagcaaaggagaagatatatctaaaaggattttatgagggtatcatgttggtggatggatttaaaggacagaaggttcaagatgtaaagaagactattcagaaaaagatgattgacgctggagatgcacttatttacatggaaccagagaaacaagtgatgtccaggtacttggattatggagaagagaattggaagaaacagacatctcagtgcttgaagaacctggaaacattctgtgaggagaccaggaggaattttgaagccaccttaggttggctacaagaacatgcttgctcaagaacttatggtctaggcactcacytgccttgggatgagcagtggctgattgaatcactttctgactccactatttacatggcattttacacagttgcacacctattgcaggggggtaacttgcatggacaggcagagtctccgctgggcattagaccgcaacagatgaccaaggaagtttgggattatgttttcttcaaggaggctccatttcctaagactcagattgcaaaggaaaaattagatcagttaaagcaggagtttgaattctggtatcctgttgatcttcgcgtctctggcaaggatcttgttccaaatcatctttcatattacctttataatcatgtggctatgtggccggaacaaagtgacaaatggcctacagctgtgagagcaaatggacatctcctcctgaactctgagaagatgtcaaaatccacaggcaacttcctcactttgacccaagctattgacaaattttcagcagatggaatgcgtttggctctggctgatgctggtgacactgtagaagatgccaactttgtggaagccatggcagatgcaggtattctccgtctgtacacctgggtagagtgggtgaaagaaatggttgccaactgggacagcctaagaagtggtcctgccagcactttcaatgatagagtttttgccagtgaattgaatgcaggaattataaaaacagatcaaaactatgaaaagatgatgtttaaagaagctttgaaaacagggttttttgagtttcaggccgcaaaagataagtaccgtgaattggctgtggaagggatgcacagagaacttgtgttccggtttattgaagttcagacacttctcctcgctccattctgtccacatttgtgtgagcacatctggacactcctgggaaagcctgactcaattatgaatgcttcatggcctgtggcaggtcctgtkratgaagttttaatacactcctcacagtatcttatggaagtaacacatgaccttagactacgactcaagaactatatgatgccagctaaagggaagaagacygacaaacaacccctgcagaagccctcacattgcaccatctatgtggcaaagaactatccaccttggcaacataccaccctgtctgttctacgtaaacactttgaggccaataayggaaaactgcctgacaacaaagtcattgctagtgaactaggcagtatgccagaactgaagaaatacatgaagaaagtyatgccatttgttgccatgattaaggaaaatctggagaagatggggcctcgtattctggatttgcaattagaatttgatgaaaaggctgtgcttatggagaatatagtctrtctgactaattcgcttgagctagaacacatagaagtcaagtttgcctccgaagcagaagataaaatcagggaagactgctgtcctgggaaaccacttaatgtttttagaatagaacctggtgtgtccgtttctctggtgaatccccagccatccaatggccacttctcaaccaaaattgaaatcargcaaggagataactgtgattccataatcaggcgtttaatgaaaatgaatcgaggaattaaagacctttccaaagtgaaactgatgagatttgatgatccactgttggggcctcgacgagttcctgtcctgggaaaggagtacaccgagaagacccccatttctgagcatgctgttttcaatgtggacctcatgagcaagaaaattcatctgactgagaatgggataagggtggatattggcgatacaataatctatctggttcattaaactcatgcacattggagatttatcctggtttcttaggaatactactactctgattgtgtctactgattggctatcagaaccttaggctggacctaaatagattgatttcatttctaaccatccaattctgcatgtattcataattckatcaagtcatctttgattcctggacctaataaattttttttccctttctttgggtgtccaagagaaatggtttttgccaaactctttttaaaaaacaaattgttgctatttcctagaagtttctggtttttaagatgaacataaaagtgtcagtatgcttcttttatgaggtgtactttatactttgatgaaggctaaggtgtacctaacagctttttatagtatattcatttatggagttagctgtattttttttwaaaaaagaaaagtagtaaattagcagcttttttttttaaatgaagagaacttcatgatgatttaaaagaactaatgagaatattttgacttgacttcaattactaagtattttgtataaagaacaaataggtcctgcattttataagactttttaaagctttaattattcaactaagaaccaataatggcttcttcaaggctaatatcaatagtttataagcagtatatttcacctacactaaatatgggcattttaaaagaagattccccccttcccccccagaaatctgcatttactaaatttgtcttaagtccaattgtgtttaaaggtcatgctggtcgggtgtggtggctcacacctataatcccagcactttgggaggccaaggtgggcagtcacctgaggtcaggagtttgagaccagcctgaccaacatggtgaaaccccgtctctactaaaaatacaaaaattagcttggcatggtggcgggtacctgtaatcccagctgcttgggagtgtgaggcaggagaatcgcttgaacctgggagaccgaggttgcagtgagctgaaaccgtgccattgcactccagcttaggcaacaagagtgaaactctgtctcaatcaatccatcaatcaatcaataaaatagaggtcatgctgactattacagatttattcttttattcttgttggagtgtcttttaatatctgcgccatctgtcttcatatgaggaaaaaatgtaaggcattgactaacaggagaaacatttctaattttgatgggtttaatatggagaaagaacaattttgataacccagaggaacctgaattctaactgcggttatgtaaatagagtttattgagcttccttattttgctctccgcagttagggaccactaggcctagtcatatggtttatcacagatttattgaagccaatcataggatgttagaattagaaatcatcaagtgcaaataatcacttatctactagggacaggcactatagcatagtggggtaagagcgcatgytctgaaatcagactagctaggttagatttccagttcttctttttgctactaggatgctcttggccaattactcggagctgcagttcttcatctataaaatggaactaatactggtaccttgtaggcttattgtgagaygtttagrtgaactgatctaggaaaatcataacacagtgcctggcaagtagtaagtctttagtgaatgttaccattgaagaagaagaagatgatggataccaaggtatattggcttcagattactgtagtctgtaatcatgtcctttgtgttggttcctttggggcaactgattctt

SEQ ID NO: 1445 - DNA, 3407 bp, Homo sapiens
accgcaacagatgaccaaggaagtttgggattatgttttcttcaaggaggctccatttcctaagactcagattgcaaaggaaaaattagatcagttaaagcaggagtttgaattctggtatcctgttgatcttcgcgtctctggcaaggatcttgttccaaatcatctttcatattacctttataatcatgtggctatgtggccggaacaaagtgacaaatggcctacagctgtgagagcaaatggacatctcctcctgaactctgagaagatgtcaaaatccacaggcaacttcctcactttgacccaagctattgacaaattttcagcagatggaatgcgtttggctctggctgatgctggtgacactgtagaagatgccaactttgtggaagccatggcagatgcaggtattctccgtctgtacacctgggtagagtgggtgaaagaaatggttgccaactgggacagcctaagaagtggtcctgccagcactttcaatgatagagtttttgccagtgaattgaatgcaggaattataaaaacagatcaaaactatgaaaagatgatgtttaaagaagctttgaaaacagggttttttgagtttcaggccgcaaaagataagtaccgtgaattggctgtggaagggatgcacagagaacttgtgttccggtttattgaagttcagacacttctcctcgctccattctgtccacatttgtgtgagcacatctggacactcctgggaaagcctgactcaattatgaatgcttcatggcctgtggcaggtcctgtkratgaagttttaatacactcctcacagtatcttatggaagtaacacatgaccttagactacgactcaagaactatatgatgccagctaaagggaagaagacygacaaacaacccctgcagaagccctcacattgcaccatctatgtggcaaagaactatccaccttggcaacataccaccctgtctgttctacgtaaacactttgaggccaataayggaaaactgcctgacaacaaagtcattgctagtgaactaggcagtatgccagaactgaagaaatacatgaagaaagtyatgccatttgttgccatgattaaggaaaatctggagaagatggggcctcgtattctggatttgcaattagaatttgatgaaaaggctgtgcttatggagaatatagtctrtctgactaattcgcttgagctagaacacatagaagtcaagtttgcctccgaagcagaagataaaatcagggaagactgctgtcctgggaaaccacttaatgtttttagaatagaacctggtgtgtccgtttctctggtgaatccccagccatccaatggccacttctcaaccaaaattgaaatcargcaaggagataactgtgattccataatcaggcgtttaatgaaaatgaatcgaggaattaaagacctttccaaagtgaaactgatgagatttgatgatccactgttggggcctcgacgagttcctgtcctgggaaaggagtacaccgagaagacccccatttctgagcatgctgttttcaatgtggacctcatgagcaagaaaattcatctgactgagaatgggataagggtggatattggcgatacaataatctatctggttcattaaactcatgcacattggagatttatcctggtttcttaggaatactactactctgattgtgtctactgattggctatcagaaccttaggctggacctaaatagattgatttcatttctaaccatccaattctgcatgtattcataattckatcaagtcatctttgattcctggacctaataaattttttttccctttctttgggtgtccaagagaaatggtttttgccaaactctttttaaaaaacaaattgttgctatttcctagaagtttctggtttttaagatgaacataaaagtgtcagtatgcttcttttatgaggtgtactttatactttgatgaaggctaaggtgtacctaacagctttttatagtatattcatttatggagttagctgtattttttttwaaaaaagaaaagtagtaaattagcagcttttttttttaaatgaagagaacttcatgatgatttaaaagaactaatgagaatattttgacttgacttcaattactaagtattttgtataaagaacaaataggtcctgcattttataagactttttaaagctttaattattcaactaagaaccaataatggcttcttcaaggctaatatcaatagtttataagcagtatatttcacctacactaaatatgggcattttaaaagaagattccccccttcccccccagaaatctgcatttactaaatttgtcttaagtccaattgtgtttaaaggtcatgctggtcgggtgtggtggctcacacctataatcccagcactttgggaggccaaggtgggcagtcacctgaggtcaggagtttgagaccagcctgaccaacatggtgaaaccccgtctctactaaaaatacaaaaattagcttggcatggtggcgggtacctgtaatcccagctgcttgggagtgtgaggcaggagaatcgcttgaacctgggagaccgaggttgcagtgagctgaaaccgtgccattgcactccagcttaggcaacaagagtgaaactctgtctcaatcaatccatcaatcaatcaataaaatagaggtcatgctgactattacagatttattcttttattcttgttggagtgtcttttaatatctgcgccatctgtcttcatatgaggaaaaaatgtaaggcattgactaacaggagaaacatttctaattttgatgggtttaatatggagaaagaacaattttgataacccagaggaacctgaattctaactgcggttatgtaaatagagtttattgagcttccttattttgctctccgcagttagggaccactaggcctagtcatatggtttatcacagatttattgaagccaatcataggatgttagaattagaaatcatcaagtgcaaataatcacttatctactagggacaggcactatagcatagtggggtaagagcgcatgytctgaaatcagactagctaggttagatttccagttcttctttttgctactaggatgctcttggccaattactcggagctgcagttcttcatctataaaatggaactaatactggtaccttgtaggcttattgtgagaygtttagrtgaactgatctaggaaaatcataacacagtgcctggcaagtagtaagtctttagtgaatgttaccattgaagaagaagaagatgatggataccaaggtatattggcttcagattactgtagtctgtaatcatgtcctttgtgttggttcctttggggcaactgattctt

SEQ ID NO: 1446 - DNA, 4678 bp, Homo sapiens
gcaggtgtgaagcgtgtgctttagtttcgtgggaggcctggcatccccgagagggaggggaaaggtaaccactcctttgtggaggtcgccagggtcattgtcgtggatttgcacagtcggctgggcggtgcaatggcggtgagaaagaaaaggaacagccaaagtggactttttgaagaagattgagaaagaaatccaacagaaatgggatactgagagagtgtttgaggtcaatgcatctaatttagagaaacagaccagcaagggcaagtattttgtaaccttcccatatccatatatgaatggacgccttcatttgggacacacgttttctttatccaaatgtgagtttgctgtagggtaccagcgattgaaaggaaaatgttgtctgtttccctttggcctgcactgtactggaatgcctattaaggcatgtgctgataagttgaaaagagaaatagagctgtatggttgcccccctgattttccagatgaagaagaggaagaggaagaaaccagtgttaaaacagaagatataataattaaggataaagctaaaggaaaaaagagtaaagctgctgctaaagctggatcttctaaataccagtggggcattatgaaatcccttggyctgtctgatgaagagatagtaaaattttctgaagcagaacattggcttgattatttcccgccactggctattcaggatttaaaaagaatgggtttgaaggtagactggcgtcgttccttcatcaccactgatgttaatccttactatgattcmtttgtcagatggcaatttttaacattaatggcctgaaaggtaaaaatattttcttggtggctgctactctcagacctgagaccatgtttgggcagacaaattgttgggttcgtcctgatatgaagtacattggatttgagacggtgaatggtgatatattcatctgtacccaaaaagcagccaggaatatgtcataccagggctttaccaaagacaatggcgtggtgcctgttgttaaggaattaatgggggaggaaattcttggtgcatcactttctgcacctttaacatcatacaaggtgatctatgttctcccaatgctaactattaaggaggataaaggcactggtgtggttacaagtgttccttccgactcccctgatgatattgctgccctcagagacttgaagaaaaagcaagccttacgagcaaaatatggaattagagatgacatggtcttgccatttgagccggtgccagtcattgaaatcccaggttttggaaatctttctgctgtaaccatttgtgatgagttgaaaattcagagccagaatgaccgggaaaaacttgcagaagcaaaggagaagatatatctaaaaggattttatgagggtatcatgttggtggatggatttaaaggacagaaggttcaagatgtaaagaagactattcagaaaaagatgattgacgctgtacttggattatggagaagagaattggaagaaacagacatctcagtgcttgaagaacctggaaacatgtcaaaatccacaggcaacttcctcactttgacccaagctattgacaaattttcagcagatggaatgcgtttggctctggctgatgctggtgacactgtagaagatgccaactttgtggaagccatggcagatgcaggtattctccgtctgtacacctgggtagagtgggtgaaagaaatggttgccaactgggacagcctaagaagtggtcctgccagcactttcaatgatagagtttttgccagtgaattgaatgcaggaattataaaaacagatcaaaactatgaaaagatgatgtttaaagaagctttgaaaacagggttttttgagtttcaggccgcaaaagataagtaccgtgaattggctgtggaagggatgcacagagaacttgtgttccggtttattgaagttcagacacttctcctcgctccattctgtccacatttgtgtgagcacatctggacactcctgggaaagcctgactcaattatgaatgcttcatggcctgtggcaggtcctgtkratgaagttttaatacactcctcacagtatcttatggaagtaacacatgaccttagactacgactcaagaactatatgatgccagctaaagggaagaagacygacaaacaacccctgcagaagccctcacattgcaccatctatgtggcaaagaactatccaccttggcaacataccaccctgtctgttctacgtaaacactttgaggccaataayggaaaactgcctgacaacaaagtcattgctagtgaactaggcagtatgccagaactgaagaaatacatgaagaaagtyatgccatttgttgccatgattaaggaaaatctggagaagatggggcctcgtattctggatttgcaattagaatttgatgaaaaggctgtgcttatggagaatatagtctrtctgactaattcgcttgagctagaacacatagaagtcaagtttgcctccgaagcagaagataaaatcagggaagactgctgtcctgggaaaccacttaatgtttttagaatagaacctggtgtgtccgtttctctggtgaatccccagccatccaatggccacttctcaaccaaaattgaaatcargcaaggagataactgtgattccataatcaggcgtttaatgaaaatgaatcgaggaattaaagacctttccaaagtgaaactgatgagatttgatgatccactgttggggcctcgacgagttcctgtcctgggaaaggagtacaccgagaagacccccatttctgagcatgctgttttcaatgtggacctcatgagcaagaaaattcatctgactgagaatgggataagggtggatattggcgatacaataatctatctggttcattaaactcatgcacattggagatttatcctggtttcttaggaatactactactctgattgtgtctactgattggctatcagaaccttaggctggacctaaatagattgatttcatttctaaccatccaattctgcatgtattcataattckatcaagtcatctttgattcctggacctaataaattttttttccctttctttgggtgtccaagagaaatggtttttgccaaactctttttaaaaaacaaattgttgctatttcctagaagtttctggtttttaagatgaacataaaagtgtcagtatgcttcttttatgaggtgtactttatactttgatgaaggctaaggtgtacctaacagctttttatagtatattcatttatggagttagctgtattttttttwaaaaaagaaaagtagtaaattagcagcttttttttttaaatgaagagaacttcatgatgatttaaaagaactaatgagaatattttgacttgacttcaattactaagtattttgtataaagaacaaataggtcctgcattttataagactttttaaagctttaattattcaactaagaaccaataatggcttcttcaaggctaatatcaatagtttataagcagtatatttcacctacactaaatatgggcattttaaaagaagattccccccttcccccccagaaatctgcatttactaaatttgtcttaagtccaattgtgtttaaaggtcatgctggtcgggtgtggtggctcacacctataatcccagcactttgggaggccaaggtgggcagtcacctgaggtcaggagtttgagaccagcctgaccaacatggtgaaaccccgtctctactaaaaatacaaaaattagcttggcatggtggcgggtacctgtaatcccagctgcttgggagtgtgaggcaggagaatcgcttgaacctgggagaccgaggttgcagtgagctgaaaccgtgccattgcactccagcttaggcaacaagagtgaaactctgtctcaatcaatccatcaatcaatcaataaaatagaggtcatgctgactattacagatttattcttttattcttgttggagtgtcttttaatatctgcgccatctgtcttcatatgaggaaaaaatgtaaggcattgactaacaggagaaacatttctaattttgatgggtttaatatggagaaagaacaattttgataacccagaggaacctgaattctaactgcggttatgtaaatagagtttattgagcttccttattttgctctccgcagttagggaccactaggcctagtcatatggtttatcacagatttattgaagccaatcataggatgttagaattagaaatcatcaagtgcaaataatcacttatctactagggacaggcactatagcatagtggggtaagagcgcatgytctgaaatcagactagctaggttagatttccagttcttctttttgctactaggatgctcttggccaattactcggagctgcagttcttcatctataaaatggaactaatactggtaccttgtaggcttattgtgagaygtttagrtgaactgatctaggaaaatcataacacagtgcctggcaagtagtaagtctttagtgaatgttaccattgaagaagaagaagatgatggataccaaggtatattggcttcagattactgtagtctgtaatcatgtcctttgtgttggttcctttggggcaactgattctt

SEQ ID NO: 1447 - DNA, 1558 bp, Homo sapiens
gctgggcggcgccaccctccggccggagccaggcactgcccaaccccctccgactttcaatgttccacactccccggccaggccagagcctcctcagcttctttttgtctctcccccctcccctcccccaacagctgcgtccatttccttaaggaagggtttttttttctctctccctccctcacaccgtagcggcgcgcgagcgggccgggckggtggccggccgagttttccaagagttagcttcaccaagatgtccagtgataggcaaaggtccgatgatgagagccccagcaccagcagtggcagttcagatgcggaccagcgagacccagccgctccagagcctgaagaacaagaggaaagaaaaccttctgccacccagcagaagaaaaacaccaaactctctagcaaaaccactgctaagttatccactagtgctaaaaaaattcagaaggagctagctgaaataacccttgatcctcctcctaattgcagtgctgggcctaaaggagataacatttgtgaatggagatcaactatacttggtccactgggttctgtatatgaaggtggtgtgttttttctggatatcacattttcatcagattatccatttaagccaccaaaggttactttccgcaccagaatcgatcactgcaacatcaacagtcagggagtcatctgtctggacatccttaaagacaactggagtcccgctttgactrtttcaaaggttttgctgtctatttgttcccttttaatggactgcaaccctgtggatcctctggttggaagcatagccactcagtatttgaccaacagagcagaacacgacaggatagccagacagaggaccaagagatacgcaacgtaattcacataatttgtatgcagtgtgaaggagcagaaggcatcttctcactgtgctgcaaatctttatagtctttacaatacggacttctgtgtatatgttatactgattctactctgcttttatcctttggagcctgggagactccccaaaaaggtaaatgctatcaagagtagaactttgtagctgtagattagttatgttgaaaacgcctacttgcaagtcttgcttctttgggatatcaaaatgtattttgtgatgtactaaggatactggtcctgaagtctaccaaatattatagtgcgttttagcctaatgcattatctgtatgaacttataaaagtagctgtagatgactaggaattatgtcatttgtattaaacccagatcaatttctgagtatgtggttcatgctgttgtgaaaaatgttttaccttttacctttgtcagtttgtaatgagaggatttccttttaccctttgtagctcagagagcaccggatgtatcatctcaaacacaataaacatgctcctgaaggcatagtttcctgtcgtaatattttaagtcggtcttgttagaaggtgtgtctgagatgactgttgatgaaataaaaatgtggctatgaagattactaaagactagcacaaataaaccaattcttgaattgaaaacatttttaaaaaa

SEQ ID NO: 1448 - DNA, 467 bp, Homo sapiens
ggcattcagggygacagactttccatcccagaaccattggcccaatttttccgtaaccttgtggaaaagaccctggtgctggtgaacrctgctgtgacttactcaaagccttgattggccacattttggtactacgccaagtttgagctggttcctcccacccctgctgwgatccctagagctattcagagtctgaaaaaaatagtcaatagtgctcagactggtagcttcaaacaactcacagttaaggaagctgtgctgaatggtttggtggccactgaggtgttatgtggttttatgtcggagagatcataggcaagcgtggcatcattggctatgatgtttgaagaccagtatttaacatctgattatatttgatttattatttgaatgttgttggaccatgtgtgatcagactgctatctgaattaaataagatttgtcaaaattaaaaaaaaaaatttcca

SEQ ID NO: 1449 - DNA, 2253 bp, Homo sapiens
ctgccctccaccacctaccgcggttcctccarctcccagggccgcggccggagcagctctsagcgctcggttcgccccacggtgcccttaaaaggcgctggcgcgaaccaacgagtccctgaggagagtagggggacagctccggctcgcagaatccccccaagccayccatggagggcgcagctccgtgtcgtgtctctctcaaagtgtctctcggacagcgctgttgggaacgagcctggcgctttgatttagggatgggggtggtttcctcactaacgagtcaccccctccaaaatatcgcagaaagtggacggccccagttggaggcacatcttgaaacccgcgggggaggccatgtcggaagaagctaggttttgtttttctcctggtgagaattcgaagaccatgtctacggaactcttctcatccacaagagaggaaggaagctctggctcaggacccagttttaggtctaatcaaaggaaaatgttaaacctgctcctggagagagacacttcctttaccgtctgtccagatgtccctagaactccagtgggcaaatttcttggtgattctgcaaacctaagcattttgtctggaggaaccccaaaaygttgcctcgatctttcgaatcttagcagtggggagataactgccactcagcttaccacttctgcagaccttgatgaaactggtcacctggattcttcaggacttcaggaagtgcatttagctgggatgaatcatgaccagcacctaatgaaatgtagcccagcacagcttctttgtagcactccgaatggtttggaccgtggccatagaaagagagatgcaatgtgtagttcatctgcaaataaagaaaatgacaatggaaacttggtggacagtgaaatgaaatatttgggcagtcccattactactgttccaaaattggataaaaatccaaacctaggagaagaccaggcagaagagatttcagatgaattaatggagttttccctgaaagatcaagaagcaaaggtgagcagaagtggcctatatcgctccccgtcgatgccagagaacttgaacaggccaagactgaagcaggtggaaaaattcaaggacaacacaataccagataaagttaaaaaaaagtatttttctggccaaggaaagctcaggaagggcttatgtttaaagaagacagtctctctgtgtgacattactatcactcagatgctggaggaagattctaaccaggggcacctgattggtgatttttccaaggtatgtgcgctgccaaccgtgtcagggaaacaccaagatctgaagtatgtcaacccagaaacagtggctgccttactgtcggggaagttccagggtctgattgagaagttttatgtcattgattgtcgctatccatatgagtatctgggaggacacatccagggagccttaaacttatatagtcaggaagaactgtttaacttctttctgaagaagcccatcgtccctttggacacccagaagagaataatcatcgtgttccactgtgaattctcctcagagaggggcccccgaatgtgccgctgtctgcgtgaagaggacaggtctctgaaccagtatcctgcattgtactacccagagctatatatccttaaaggcggctacagagacttctttccagaatatatggaactgtgtgaaccacagagctactgccctatgcatcatcaggaccacaagactgagttgctgaggtgtcgaagccagagcaaagtgcaggaaggggagcggcagctgcgggagcagattgcccttctggtgaaggacatgagcccatgataacattccagccactggctgctaacaagtcaccaaargacactgcagaaaccctgagcagaaagaggccttctggatggccaaacccaagattattaaaagatgtctctgcaaaccaacaggytaccaacttgtatccaggcctgggaatggattaggtttcagcagagctgaaagctggtggcagagtcctggagctggctctataaggcagccttgagttgcatagagatttgtattggttcagggaactctggcattccttttcccaactcctcatgtcttctcacaagccagccaactctttctctctgggcttcgggctatgcaagagcgttgtctaccttctttctttgtattttccttctttgtttccccctctttcttttttaaaaatggaaaaataaacactacagaatgaga

SEQ ID NO: 1450 - DNA, 2116 bp, Homo sapiens
ggtcracgcctgcggctgttgatattcttgctcagaggccgtaactttggccttctgctcagggaagactctgagtccgacgttggcctacccagtcggaaggcagagctgcaatctagttaactacctcctttcccctagatttcctttcattctgctcaagtcttcgcckgtgtccgatccctatctactttctctcctcttgtaggcaagcctcagactccaggcttgagctaggttttgtttttctcctggtgagaattcgaagaccatgtctacggaactcttctcatccacaagagaggaaggaagctctggctcaggacccagttttaggtctaatcaaaggaaaatgttaaacctgctcctggagagagacacttcctttaccgtctgtccagatgtccctagaactccagtgggcaaatttcttggtgattctgcaaacctaagcattttgtctggaggaaccccaaaaygttgcctcgatctttcgaatcttagcagtggggagataactgccactcagcttaccacttctgcagaccttgatgaaactggtcacctggattcttcaggacttcaggaagtgcatttagctgggatgaatcatgaccagcacctaatgaaatgtagcccagcacagcttctttgtagcactccgaatggtttggaccgtggccatagaaagagagatgcaatgtgtagttcatctgcaaataaagaaaatgacaatggaaacttggtggacagtgaaatgaaatatttgggcagtcccattactactgttccaaaattggataaaaatccaaacctaggagaagaccaggcagaagagatttcagatgaattaatggagttttccctgaaagatcaagaagcaaaggtgagcagaagtggcctatatcgctccccgtcgatgccagagaacttgaacaggccaagactgaagcaggtggaaaaattcaaggacaacacaataccagataaagttaaaaaaaagtatttttctggccaaggaaagctcaggaagggcttatgtttaaagaagacagtctctctgtgtgacattactatcactcagatgctggaggaagattctaaccaggggcacctgattggtgatttttccaaggtatgtgcgctgccaaccgtgtcagggaaacaccaagatctgaagtatgtcaacccagaaacagtggctgccttactgtcggggaagttccagggtctgattgagaagttttatgtcattgattgtcgctatccatatgagtatctgggaggacacatccagggagccttaaacttatatagtcaggaagaactgtttaacttctttctgaagaagcccatcgtccctttggacacccagaagagaataatcatcgtgttccactgtgaattctcctcagagaggggcccccgaatgtgccgctgtctgcgtgaagaggacaggtctctgaaccagtatcctgcattgtactacccagagctatatatccttaaaggcggctacagagacttctttccagaatatatggaactgtgtgaaccacagagctactgccctatgcatcatcaggaccacaagactgagttgctgaggtgtcgaagccagagcaaagtgcaggaaggggagcggcagctgcgggagcagattgcccttctggtgaaggacatgagcccatgataacattccagccactggctgctaacaagtcaccaaargacactgcagaaaccctgagcagaaagaggccttctggatggccaaacccaagattattaaaagatgtctctgcaaaccaacaggytaccaacttgtatccaggcctgggaatggattaggtttcagcagagctgaaagctggtggcagagtcctggagctggctctataaggcagccttgagttgcatagagatttgtattggttcagggaactctggcattccttttcccaactcctcatgtcttctcacaagccagccaactctttctctctgggcttcgggctatgcaagagcgttgtctaccttctttctttgtattttccttctttgtttccccctctttcttttttaaaaatggaaaaataaacactacagaatgaga

SEQ ID NO: 1451 - DNA, 1897 bp, Homo sapiens
ggtcracgcctgcggctgttgatattcttgctcagaggccgtaactttggccttctgctcagggaagactctgagtccgacgttggcctacccagtcggaaggcagagctgcaatctagttaactacctcctttcccctagatttcctttcattctgctcaagtcttcgcckgtgtccgatccctatctactttctctcctcttgtaggcaagcctcagactccaggcttgagctaggttttgtttttctcctggtgagaattcgaagaccatgtctacggaactcttctcatccacaagagaggaaggaagctctggctcaggacccagttttaggtctaatcaaaggaaaatgttaaacctgctcctggagagagacacttcctttaccgtctgtccagatgtccctagaactccagtgggcaaatttcttggtgattctgcaaacctaagcattttgtctgggtcacctggattcttcaggacttcaggaagtgcatttagctgggatgacaatggaaacttggtggacagtgaaatgaaatatttgggcagtcccattactactgttccaaaattggataaaaatccaaacctaggagaagaccaggcagaagagatttcagatgaattaatggagttttccctgaaagatcaagaagcaaaggtgagcagaagtggcctatatcgctccccgtcgatgccagagaacttgaacaggccaagactgaagcaggtggaaaaattcaaggacaacacaataccagataaagttaaaaaaaagtatttttctggccaaggaaagctcaggaagggcttatgtttaaagaagacagtctctctgtgtgacattactatcactcagatgctggaggaagattctaaccaggggcacctgattggtgatttttccaaggtatgtgcgctgccaaccgtgtcagggaaacaccaagatctgaagtatgtcaacccagaaacagtggctgccttactgtcggggaagttccagggtctgattgagaagttttatgtcattgattgtcgctatccatatgagtatctgggaggacacatccagggagccttaaacttatatagtcaggaagaactgtttaacttctttctgaagaagcccatcgtccctttggacacccagaagagaataatcatcgtgttccactgtgaattctcctcagagaggggcccccgaatgtgccgctgtctgcgtgaagaggacaggtctctgaaccagtatcctgcattgtactacccagagctatatatccttaaaggcggctacagagacttctttccagaatatatggaactgtgtgaaccacagagctactgccctatgcatcatcaggaccacaagactgagttgctgaggtgtcgaagccagagcaaagtgcaggaaggggagcggcagctgcgggagcagattgcccttctggtgaaggacatgagcccatgataacattccagccactggctgctaacaagtcaccaaargacactgcagaaaccctgagcagaaagaggccttctggatggccaaacccaagattattaaaagatgtctctgcaaaccaacaggytaccaacttgtatccaggcctgggaatggattaggtttcagcagagctgaaagctggtggcagagtcctggagctggctctataaggcagccttgagttgcatagagatttgtattggttcagggaactctggcattccttttcccaactcctcatgtcttctcacaagccagccaactctttctctctgggcttcgggctatgcaagagcgttgtctaccttctttctttgtattttccttctttgtttccccctctttcttttttaaaaatggaaaaataaacactacagaatgaga

SEQ ID NO: 1452 - DNA, 769 bp, Homo sapiens
ggtcracgcctgcggctgttgatattcttgctcagaggccgtaactttggccttctgctcagggaagactctgagtccgacgttggcctacccagtcggaaggcagagctgcaatctagttaactacctcctttcccctagatttcctttcattctgctcaagtcttcgcckgtgtccgatccctatctactttctctcctcttgtaggcaagcctcagactccaggcttgagctaggttttgtttttctcctggtgagaattcgaagaccatgtctacggaactcttctcatccacaagagaggaaggaagctctggctcaggacccagttttaggtctaatcaaaggaaaatgttaaacctgctcctggagagagacacttcctttaccgtctgtccagatgtccctagaactccagtgggcaaatttcttggtgattctgcaaacctaagcattttgtctgggtcacctggattcttcaggacttcaggaagtgcatttagctgggatgcacagcttctttgtagcactccgaatggtttggaccgtggccatagaaagagagatgcaatgtgtagttcatctgcaaataaagaaaatgacaatggaaacttggtggacagtgaaatgaaatatttgggcagtcccattactactgttccaaaattggataaaaatccaaacctaggagaagaccaggcagaagagatttcagatgaattaatggagttttccctgaaagatcaagaagcaaaggtaaagtgttct

SEQ ID NO: 1453 - DNA, 3773 bp, Homo sapiens
actcgcgggaaycgcaccaagcgggtggctgcaggagctcgcccatcgcccctgcgctgctcggaccgcggccacagccggactggcgggtacggcggcgacagacggattggccgagagtcccagtccgcagagtagccccggcctcgaggcggtggcgtccgcgtcctctcgtscaggagccaggacaggtgtcgcgcggcgggcgctccagggaccgcgctgaggccgcggtcgccgcccgtcccgccccgccccgccgcccgccgcccgccgagcccagcctccttgccgtcggggcgtccccaggccctgggtcggccgcggagccgatgcgcgcccgctgagcgccccagctgagcgcccccggcctgccatgaccgcgctccccggcccgctctggctcctgggcctggcgctatgcgcgctgggcgggggcggccccggcctgcgacccccgcccggctgtccccagcgacgtctgggcgcgcgcgagcgccgggacgtgcagcgcgagatcctggcggtgctcgggctgcctgggcggccccggccccgcgcgccacccgccgcctcccggctgcccgcgtccgcgccgctcttcatgctggacctgtaccacgccatggccggcgacgacgacgaggacggcgcgcccgcggagcggcgcctgggccgcgccgacctggtcatgagcttcgttaacatggtggagcgagaccgtgccctgggccaccaggagccccattggaaggagttccgctttgacctgacccagatcccggctggggaggcggtcacagctgcggagttccggatttacaaggtgcccagcatccacctgctcaacaggaccctccacgtcagcatgttccaggtggtccaggagcagtccaacagggagtctgacttgttctttttggatcttcagacgctccgagctggagacgagggctggctggtgctggatgtcacagcagccagtgactgctggttgctgaagcgtcacaaggacctgggactccgcctctatgtggagactgaggatgggcacagcgtggatcctggcctggccggcctgctgggtcaacgggccccacgctcccaacagcctttcgtggtcactttcttcagggccagtccgagtcccatccgcacccctcgggcagtgaggccactgaggaggaggcagccgaagaaaascaacgagctgccgcaggccaaccgactcccagggatctttgatgacgtccrcggctcccacggccggcaggtctgccgtcggcacgagctctacgtcagcttccaggacctyggctggctggactgggtcatcgctccccaaggctactcggcctattactgtgagggggagtgctccttcccactggactcctgcatgaatgccaccaaccacgccatcctgcagtccctggtgcacctgatgatgccagacgcagtccccaaggcgtgctgtgcacccaccaagctgagcgccacctctgtgctctactatgacagcagcaacaatgtcatcctgcgcaagcaccgcaacatggtggtcaaggcctgcggctgccactgagtccacccgcccggcccagctgcagccacccttctcatctggatygggcccctcagaagcaggaaaccctcaaacccagccagaccccaggccggggcattgccagggaggaccctcacaaccacgtacatgaccctttctccttcatgccaggctcctatgctccccttgccctgccaggcatttgtgtgactgtcctgtttccagcccaggtggtctcaatcatcaggcagtgttctacccaaatgcaaacgcctctcccggaggcatgtcctggctggttctttggggttggcacagaagtcctgtctgaggtcctatccatgccccttactggctcaggtcgtgagatagatgtggaatgacctgagaggcacctggagcccactgttggccaccttgagctcttcaccatccatcacagggtgtggtgtgtgtagtcagggtctggttggctccccattgcctgsccgaggtgcaaggtggggtataaaactggataacccctgaagtattgtatattcatggatctgaagcactgatccactggtcacaggtagacatgtggagtcaactcaagaaaaagctgagtgaacagcatgatttagggctaaagccaatggcatttatcttcccttgtcttcctgctttgcatttgcctctgccatctaggaaagacatgtaagagcatggacattttactttggagaaacagaaaaatcttggggcttccaattgacccatctatctgccaccatgttgccccaccaggagctcagctctgtggagttttccctttgctgagcaagcatgtggttgcattgggtggcccaggatgacaatgcacagcacagatgccatcatttccctttcccctctgaatggcagacatcagtaatcaatctggaatgtttttcttccaaatctgagtggaattttcaaatgatcagcacagccactgccaacagatatgatgtaaagtgaaacctggttgccatcttctgccatgctgaggagcagtccatccctgcccgagcatgtatcggcaacatgggcagcctgtgaccgggtctggggcgaggccaggggccatcaaaaacaggctgatcaccaaagtcagtgtcaccctggatgcccagcagccctgtcctgtgtcttgggcctgtgagtcaaagaaaaggtccttttcagggagtgacaagtagtaattaggctgagttgggtggagaggtttgtctcagcctctgctgttctcggaaactgctgttctccttggagcagccactgggagttggagtgtttatttgatttctgacttgctaagcctgtaatttacctgctggaatagacagagtccagctgcccaaaccgtgtcattaaaagcagatcctgcgcccgccccatccacaggcacagccyggcagagtggttccacctccccatgggcccaaggatgcgcctctctggagttcacgtgctgcacccccagggaggggcctggggaragctggtccagcagcaggggtggaggctggggccacactgcgggacagcagcccctccacctggaccagggagggcctccatgtgcaagcgcagaggaagagaccctcccatgtacgcaaagggcagccccaggctgtctggaagttggagaattccctatcagcacagggatctcagctctggcctggaggtgaagagacctgccttgtaggtggcttccttatctgcgcctccattttctatctgcactttttgatctccaaacaaccttcagccaaagaatctgtctaccaactcctcatagtgagccagaagcagcctcataaccctgaatgtggggctctggtggctgtcacgaagcagagttggcacataacatggaacctggccaggcatggtggctcacacctataaccccagcactttgggaggccaaggcaggcagatcacctgaagtcaggagttcaagaccatcctggccaacacagtgaaaccccrtctgtactaaaaatacaagattacctgggcatggtggtgcatgcctataatcccagctactcaggaggctgaggcagaattgcttgaacctgggaggtggaggttgcagtgagcagagatcacaacattgcacttcagcctggtgacatgagcaaaactgttgtctcaacaaaatgaaattatg

SEQ ID NO: 1454 - DNA, 1806 bp, Homo sapiens
cagggcgcgggcgcccgccctgctctgtgacgcgcggcccgaggcgcwcgcagggctcacaccacytgtcctggcctccgacccgggccgactatggcggcgctgcggctcctggcgtcagtgctcgggcgcggggtccccgccggcggctcagggctcgcgctgtcccagggctgcgcccgctgctttgccaccagtccccggccccgtgccaagttctacgcggacccggtggagatggtgaaggacatctctgacggggcgaccgtcatgatcgggggcttcgggctctgcgggatccccgagaacctgatcgccgcgctgctcaggacccgcgtgaaagacctgcaggtggtcagcagcaacgtgggcgtggaggacttcggcctgggcctcctgctggccgccaggcaggtccgtcgcatcgtctgttcctacgtgggcgagaacaccctgtgcgagagccagtacctggcaggagagctggagctggagctcacgccccagggcaccctggccgagcgcatccgcgcggggggcgccggggtgcccgccttctacacccccacgggctacgggaccctggtccaggaagggggcgcccccatccgctacaccccggacggccacctggcgctcatgagccagccccgagaggtgagggagttcaacggcgaccacttccttttggagcgcgccatccgggcagacttcgccctggtgaaagggtggaaggccgaccgggcaggaaacgtggtcttcaggagaagcgcccgcaatttcaacgtgcccatgtgcaaagctgcagacgtcacggcggtggaggtgggggcttccccccagaagacatccacgttcctaacatttatgtagrtcgcgtgataaaggggcagaaatacgagaaacgaattgagcgcttaacgatcckgaaagaggaagatggagacgctggaaaggaagaggacgccaggacgcgcatcatcagacgcgcagctctggaatttgaggacggcatgtacgccaatctgggcataggcatccccctgctggccagcaacttcatcagtcccagcatgactgtccatcttcacagtgagaacgggatcctgggcctgggcccgtttcccacggaagatgaggtggatgccgacctcatcaatgcaggcaagcagacggtcacggtgcttcccgggggctgcttcttcgccagcgacgactccttcgccatgatccgagggggacacatccaactaaccatgcttggagccatgcaggtttccaaatacggcgacctggcgaactggatgatccctggcaagaaggtgaaaggcatgggcggtgccatggacttggtgtccagtcagaagaccagagtggtggtcaccatgcagcactgcacaaaggacaacacccccaagatcatggagaaatgcaccatgccgctgaccgggaagcggtgcgtggaccgcatcatcaccgagaaggccgtgtttgacgtgcacaggaagaaaragctgacgctgagggagctctgggagggcctgacggtggacracatcaaaaagagcacggggtgtgcctttgctgtgtccccgaacctcaggcccatgcagcaggtggyaccctgacgggacctggatctgggcggggtggtgcgctcctcagggcggatgccaccgggttccccaggggaatacatgtccccagctctgggaggggtttgctactggcctcctactttcctccctaggtggacagtgctcctctagagagctgcgactttaattaaaaacaacaggaaaacag

SEQ ID NO: 1455 - DNA, 1692 bp, Homo sapiens
ggtcgctgccggagctcgccggtcgcccctgcgctgcgcggaccgcagccacagccggactggtgggaacggcggcgacagacggattggctgacagtcccagccctcagaacagccccggcctcgaagcgttggcgtctgcgtccgcgtcagcgtccgcttgtcccggagccggggcaggtgcgcgcggggggcgctccagggaccgcgctgaggccgcagacgccgcccgccgagccccgccccctgctcgccgaactcagctccccgttcgccgtcggggcgtccccgggcccaggggcggcggcggagctgatgtgcgcccgctgagcgcccccggcccgccatggccgcgcgccccggmccgctctggctyctgggcctgacgttgtgcgcgctgggcgggggcggccccggcctgcgacccccgcccggctgtccccagcgacgtctgggcgcgcgcgagcgccgggacgtgcagcgcgagatcctggcggtgctcgggctrcccgggcggccccggccccgcgcgccacccgccgcctcccggctgcccgcgtccgcgccgctcttcatgctggacctgtaccacgccatggctggcgacgacgacgaggacggcgcgcccgcggagcagcgcctgggccgcgccgacctggtcatgagcttcgtcaacatggtggagcgagaccgtgccctgggccaccaggagccccattggaaggagttccgctttgacctgacccagatcccggctggggaggcggtcacagctgcggagttccggatttacaaggtgcccagcatccacctgctcaacaggaccctccacgtcagcatgttccaggtggtccaggagcagtccaacagggagtctgacttgttctttttggatcttcagacgctccgagctggagacgagggctggctggtgctggatgtcacagcagccagtgactgctggttgctgaagcgtcacaaggacctgggactccgcctctatgtggagactgaggatgggcacagcgtggatcctggcctggccggcctgctgggtcaacgggccccacgctcccaacagcctttcgtggtcactttcttcagggccagtccgagtcccatccgcacccctcgggcagtgaggccactgaggaggaggcarccgaagaaaagcaacgagctgccgcaggccaaccgactcccagggatctttgatgacgtccrcggctcccacggccggcaggtctgccgtcggcacgagctctacgtcagcttccaggacctyggctggctggactgggtcatcgccccccaaggctactcrgcctattactgtgagggggagtgctccttcccrctggactcctgcatgaaygccaccaaccacgccatcctgcagtccctggtgcacctgatgaagccaaacgcagtccccaaggcgtgctgtgcacccaccaagctgagcgccacctctgtgctctactatgacagcagcaacaacgtcatcctgcgcaagcaccgcaacatggtggtcaaggcctgcggctgccactgagtcmrcccgcccrgcccwactgcagccacccttctcatctggatcgggccctgcagaggcagaaaacccttaaatgctgtcacagctcaagcaggagtgtcaggggccctcactctckgtgcctacttcctgtcagg

SEQ ID NO: 1456 - DNA, 1781 bp, Homo sapiens
  misc_feature (1)...(1781): n = A,T,C or G
ggcgcgggcgcccgccctgctctgtgacgcgcggcccgaggcgcacgcagggctcacaccacctgtcctggcctccgacccgggccgactatggcggcgctgcggctcctggcgtcagtgctcgggcgcggggtccccgccggcggctcagggctcgcgctgtcccagggctgcgcccgctgctttgccaccagtccccggccccgtgccaagttctacgcggacccggtggagatggtgaaggacatctctgacggggcgaccgtcatgatcgggggcttcgggctctgcgggatccccgagaacctgatcgccgcgctgctcaggacccgcgtgaaagacctgcaggtggtcagcagcaacgtgggcgtggaggacttcggcctgggcctcctgctggccgccaggcaggtccgtcgcatcgtctgttcctacgtgggcgagaacaccctgtgcgagagccagtacctggcaggagagctggagctggagctcacgccccagggcaccctggccgagcgcatccgcgcggrgggcgccggggtgcccgccttctacacccccacgggctacgggaccctggtccaggaagggggcgcccccatccgctacaccccggacggccacctggcgctcatgagccagccccgagaggtgagggagttcaacggcgaccacttccttttggagcgcgccatccgggcagacttcgccctggtgaaagggtggaaggccgaccgggcaggaaacgtggtcttcaggagaagcgcccgcaatttcaacgtgcccatgtgcaaagctgcagacgnnnnnnnnnnnnnnnnnnnnacgttcctaacatttatgtaggtcgcgtgataaaggggcaggaaatacgagaaacgaattgagcgcttaacgatccggaaagaggaagatggagacgctggaaaggaagaggacgccaggacgcgcatcatcagacgcgcagctctggaatttgaggacggcatgtacgccaatctgggcataggcatccccctgctggccagcaacttcrtcagtcccagcatgactgtccatcttcacagtgagaacgggatcctgggcctgggcccgtttcccacggaagatgaggtggatgccgacctcatcaatgcaggcaagcagacggtcacggtgcttcccgggggctgcttcttcgccagcgacgactccttcgccatgatccgagggggacacatccaactaaccatgcttggagccatgcaggtttccaaatacggcgacctggcgaactggatgatccctrgcaagaaggtgaaaggcatgggcggtgccatggacttggtgtccagtcagaagaccagagtggtggtcaccatgcagcactgcacaaaggacaacacccccaagatcatggagaaatgcaccatgccgctgaccgggaagcggtgcgtggaccgcatcatcaccgagaaggccgtgtttgacgtgcacaggaagaaaragctgacgctgagggagctctgggagggcctgacggtggacgacatcaaaaagagcacggggtgtgcctttgctgtgtccccgaacctcaggcccatgcagcaggtggcaccctgacgggacctggatctgggcggggtggtgcgctcctcagggcggrtgccaccgggttccccaggggaatacatgtccccagctctgggaggggtttgcyactggcctcctactttcctccctaggtggacagtgctcctctagagagctgcgactttaattaaaaacaacaggaaaac

SEQ ID NO: 1457 - DNA, 525 bp, Homo sapiens
gcaggcgtccgcgtcgctagctagtcgttctgaagcggcggccagagaagagtcaagggcacgagcatcgggtagccatgcctttcttggacatccagaaaaggttyggccttaacatagatcgatggttgacaatccagagtggtgaacagccctacaagatggctggtcgatgccatgcttttgaaaaagaatggatagaatgtgcacatggaatcggttatactcgggcagagaaagagtgcaagatagaatatgatgatttcgtagagtgtttgcttcggcagaaaacgatgagacgtgcaggtaccatcaggaagcagcgggataagctgataaaggaaggaaagtacacccctccmcctcaccacattggcaagggggagcctcggccctgaacagagcagctgctgatrtctggaggctgattttcctgttctctgttctccactggaaaggttgtttacgacaaacctccttgtcaaagtgtgtaaaaataaaggattgctccatcctatttgttct

SEQ ID NO: 1458 - DNA, 583 bp, Homo sapiens
gcaggcgtccgcgtcgctagctagtcgttctgaagcggcggccagagaagagtcaagggcacgagcatcgggtagccatgcctttcttggacatccagaaaaggttyggccttaacatagatcgatggttgacaatccagagtggtgaacagccctacaagatggctggtcgatgccatgcttttgaaaaagaatggatagaatgtgcacatggaatcggttatactcgggcagagaaagagtgcaagatagaatatgatgatttcgtagagtgtttgcttcggcagaaaacgatgagacgtgcaggtaccatcaggaagcagcgggataagctgataaaggaaggaaagtacacccctccmcctcaccacattggcaagggggagcctcggccctgaacagagcagctgctgatrtctggaggctgattttcctgttctctgttctccactggaaaggttgtttacgacaaacctccttgtcaaagctggagtgcgayggcatgatctcagcttaccgcaacctccgcctcccgggttgaagcgattctcctgcctcagctgctgagtagctgggattacag

SEQ ID NO: 1459 - DNA, 1684 bp, Homo sapiens
ygacagagcaagactccctttccaaaaacaagcaaatgaaaaaatagagttttctctatcacacaaatgggaaggtttgtattgaatgttatatttatcctctatccagtcttgtcttggagcacaaagcaaaaaggcccagcatcctccactatcttctgaaaacttgccctcaggcctgagcaagagggctgcccggttgcttccatgtagccagccagcatatgtgcagggccaagtctagagggaggagggggtggcacatggatggtttcgtttaattggaagacagtgggtagattggagctggcatttgaagatgttgagagttgtggatcatgggcaagaaaagcgctgttctgggactgcggggcaggagaaggaaactgatgcttctgagggtgagtctgatgagataacatgcctgtgtgtgggcctcaggttagacagtgctgaggtctcccgtcactgggcatccagctgggtgctacggcmgtggctcctgccttctgcagccctgtcagggcccaaggccttccycatcagcacttgctccagcctactcactggagttgtgttctgggtgggtgtgtagaatactcrcactcctacttggggcatcagggagctctctagcaatttcttctgcacctagggagagcccactgctaaaaaaggcctagtcaaatcctcaggtgtacatggacatcaagattgggaacaagccggctggctgcatccaaaccctcctgcgttccgacgtcgtgcccatgaccacagagaattttctctacatgtgcacccatttaaaggactcggcttcaagggaagcagcttccaccgcattatcccccagttcatttgccagggcagtgatttcacaaaccacggtggcaccaggggtctgcgcaggcatggcactaagtgtcccatggcacatttggccctcatggaggcctcaaaagggcaggaccagcaccctcttctacggaggaaggaacgggcacagcagacttgcggatcctgctccccttcccacttctgcacttgggggtctaatgaggcctcagtggaacatagaattcctcccgccctgacatcatagctcccgcctgggaggcctcctggatgactcctttcgcctcctcccttccctgagagcagcccctggctcaacctccacctccgtgctgcctcggaccacctgcccagtcgagctgccatcacctgccagggtgagccactgcgcctgatcaaggcatcaccgttgaacctcctaagaggaaaacataaggctgtgcaataccaggaactgggattctaggttgccccagacaccaaggcatcaaaagccaggggatccagaraaaacacagacagccaagagagaaactgcgggaaaaagccaaaaggttgagagccacaccatctagaagcttcctgcctgtggtgcggcacaggtggaaacaagragagtcagcaattaccagccagccraggtcctggaagctgacgtagagctcgtgccgacggcagacctgccggccgtgggagccgyggacgtcatctgcagggacagaaggggcaaggtcttttctggggttcctrctgtgtgcagctactatggggtaccagggtgggggatgccctgatgagcacatttgtcaaataaatgaatgacagg

SEQ ID NO: 1460 - DNA, 1157 bp, Homo sapiens
cgccgagagggttcacaaagggtagggtggtgtggagcaaggcagggtcctcgcaggcagtgccaagattgagctgggggtgggcagagtgggcggggtgcggacccatggccctacgcatcctgggccaggtctcttgtggtgcttcacgctctcgacctgtgagtggtgcctgctagagctgcccagatcccttttccctaccccttctgaccctggacccagagtggtggttgcgatctgctaccgtgacgtcagccctcattcgttcgttccacaaactccacagctctggtccattagaggaaggaggtcccagaatagctgggaaattacgagaacagcctcactgcacgagttggtgaatgctgtgatggcgattgtatgatggacggtgatgttgaaaccagactggggaatgaccgccccatccggagagaaaagcaccaaggattctcttttgttgaatttgagttggcagagtttggtcagatgaagactgggtggagaagtttgctgggaagaggataaagaggaaggtggttgagacttcccaaagcagaaagccaggagggagagcccactgctaaaaaaggcctagtcaaatcctcaggtgtacatggacatcaagattgggaacaagccggctggctgcatccaaaccctcctgcgttccgacgtcgtgcccatgaccacagagaattttctctacatgtgcacccatttaaaggactcggcttcaagggaagcagcttccaccgcattatcccccagttcatttgccagggcagtgatttcacaaaccacggtggcaccaggggtctgcgcaggcatggcactaagtgtcccatggcacatttggccctcatggaggcctcaaaagggcaggaccagcaccctcttctacggaggaaggaacgggcacagcagaaacaagragagtcagcaattaccagccagccraggtcctggaagctgacgtagagctcgtgccgacggcagacctgccggccgtgggagccgyggacgtcatctgcagggacagaaggggcaaggtcttttctggggttcctrctgtgtgcagctactatggggtaccagggtgggggatgccctgatgagcacatttgtcaaataaatgaatgacaggaaaccat

SEQ ID NO: 1461 - DNA, 4175 bp, Homo sapiens
tcgataaaaaccgattgtaacactactggaatacaggccgcgaggctatgcgttcagatctggagaccctgctgggacagaccagagataattctgtctcgctcacctggctttggcaacggaccgccccggtgcacgaagcgcagggcggtcgcaggagctggctgagcagcgaagcccaggccctcctgggaagaagtccgagcaggggcatcgcgcggcaggacgccggctttccgggacaggaacaaaaggcctgggaaggaggcgggtcagacaccaggaagggtggagggcactgcaaaggcggaacccgcgcaccagggaaaactcgggcgtttgcgcacctcactagtcacgaaggctgaggtgggatcctcccaagttcccttagtagccagcttcggcacttccgggaggagccggaaataatttttgtgctcggcggaggctctctaggcgtgcgacccagcgactcgatagccggaagtcatccttgctgaggctggggcaaccaccgcaggtcgagacagcaggcggctcaagtggacagccgggatggcagagcgtgcggcgctggaggagctggtgaaacttcagggagagcgcgtgcgaggcctcaagcagcagaaggccagcgccgagctgatcgaggaggaggtggcgaaactcctgaaactgaaggcacagctgggtcctgatgaaagcaaacagaaatttgtgctcaaaacccccaagggcacaagagactatagtccccggcagatggcagttcgcgagaaggtgtttgacgtaatcatccgttgcttcaagcgccacggtgcagaagtcattgatacacctgtatttgaactaaaggaaacactgatgggaaagtatggggaagactccaagcttatctatgacctgaaggaycagggcggggagctcctgtcccttcgctatgacctcactgttccttttgctcggtatttggcaatgaataaactgaccaacattaaacgctaccacatagcaaaggtatatcggcgggataacccagccatgacccgtggccgataccgggaattctaccagtgtgattttgacattgctgggaactttgatcccatgatccctgatgcagagtgcctgaagatcatgtgygagatcctgagttcacttcagataggcgacttcctggtcaaggtaaacgatcgacgcattctagatgggatgtttgctatctgtggtgtttctgayagcaagttccgtaccatctgctcctcagtagacaagctggacaaggtgtcctgggaagaggtgaagaatgagatggtgggagagaagggccttgcaccwgaggtggctgaccgcattggggactatgtccagcaacatggtggggtatccctggtggaacagctgctccaggatcctaaactatcccaaaacaagcaggccttggagggcytgggagacctgaagttgctctttgagtacctgaccctatttggcattgatgacaaaatctcctttgacctgagccttgctcgagggctggattactacactggggtgatctatgaggcagtgctgctacagaccccagcccaggcaggggaagagcccctgggtgtgggcagtgtggctgctggaggacgctatgatgggctagtgggcatgttcgaccccaaagggcgcaaggtgccatgtgtggggctcagcattggggtggagcggattttctccatcgtggaacagagactagaggytttggaggagaagatacggaccacggagacacaggtgcttgtggcatctgcacagaagaagctgstagaggaaagactaaagcttgtctcagaactgtgggatgctgggatcaaggctgagctgctgtacaagaagaacccaaagctactgaaccagttacagtactgtgaggaggcaggcatcccactggtggctatcatcggcgagcaggaactcaaggatggggtcatcaagctccgttcagtgacgagcagggaagaggtggatgtccgaagagaagaccttgtggaggaaatcaaaaggagaacaggccagcccctctgcatctgctgaactgaacaaactatcagaggaaaggaagtgggactggcactatttgaggttaagacaaactgcatatgtacttcaattgctttgcacttttccgtttcagcggaagacctgaagagtggtcagaacagagcctttgatttttattatggttattttattgattattactggcaaaaacggccaggtacaacacctttttcatacaaggcccaggaggcttagtccagtctgtgctcctgggctacaaggacccagcctgagatggtcccatytgcagggccccgcaccagttggagcagatgcctccccmccaccaattgccaaaggtccaataaaatgcctcaaccmcggagtctgcgtgtgtcagtgatgcctagccccgccttccccagcagaccaatgtagggatggaaaagggagaaaaacagtaaacttgtgaccctgaggttcttgtctccagcgtccaccctgcggcttgggagctcctcctsgggaggcagcccccgtacatacgcacccgcgactttgcagctttcacctgaaggtctgagcgaagcccgggcggcgcacgtgcagtggatacctccacccccctgggaggcggggtcgcgctcagagccaatgagagcttgcggggtggaggggtagggaagcttccagaggccggtggggaggaagttataaagagggtacgagggggccagctggagagccatgcagtccaagcgggattgtgaggtaagcggctggcgacttgggggccggcgagccccgccggagcgggggtcggctttagggaccccagtaccacaggagaggtgggggcgcgcttggcgatccgccattccaaccttcctttccctctcagctgtggtgtgagagggtgaatccagagaacaaggcggcgctggaggcgtgggtcagggagacaggcatccgcctggtgcaggtgaacgggcagaggaagtatggcgggccacccccaggtacggtagtcccagcccctccgcctgtccggctacaccagccccctttgggggaggggctgctccgagccttcactgtcagaaactgcgaactacccggatttataccccccagcaaaggaggaactgtggctccacgtccacccgccccgtcgagggagggggccaatctcaaggtgtacctactctgtgccagcccccttgttagcgcagtcacctaattatgccaaccacccagggtacgggtgtaaacccatttcacagacctttgttcacatcgcctcccacccccgcgcgctgggtccgtgggctcagaattcgaaagcgtcgcctgacggtggccttgcataccctcttcccacaggctgggtgggcagcccgccgccagctgggtcagaggtgttcatcgggcggctgcctcaggacgtgtacgagcaccagcttatcccgctgttccagcgcgtgggccgcctctacgagttccgcctgatgatgaccttcagcggcctgaaccgcggcttcgcctatgcccgctacagctcgaggcgcggcgcgcaggccgccatcgccacgctgcacaaccayccgctgcggccgtcctgcccgctgctcgtgtgccgcagcaccgagaagtgtgagctgagcgttgacggcctgccgccgaatctgacccgcagcgcgctgctgctcgcgctgcagccgctgggtcccggcttgcaggaggcgcggctgctgcccagccccggaccggcgcccgggcagatcgctctgctcaaattcagctcgcaccgggccgctgccatggccaaaaaggccctggtggaagggcagtcacacctctgtggagagcaggtggctgtggagtggctcaagccagacctgaagcagcgacttcgccagcagcttgtgggtcccttcttgcggtccccacagccagagggcagccagttggctttggcaagggacaagttagggttccaaggggctcgggctaccctgcagttgctgtgccaacgaatgaagctgggcagccctgtgttcctcaccaagtgtttgggcataggacctgctggctggcaccgcttctggtaccaggtggtg

SEQ ID NO: 1462 - DNA, 3900 bp, Homo sapiens
tcgataaaaaccgattgtaacactactggaatacaggccgcgaggctatgcgttcagatctggagaccctgctgggacagaccagagataattctgtctcgctcacctggctttggcaacggaccgccccggtgcacgaagcgcagggcggtcgcaggagctggctgagcagcgaagcccaggccctcctgggaagaagtccgagcaggggcatcgcgcggcaggacgccggctttccgggacaggaacaaaaggcctgggaaggaggcgggtcagacaccaggaagggtggagggcactgcaaaggcggaacccgcgcaccagggaaaactcgggcgtttgcgcacctcactagtcacgaaggctgaggtgggatcctcccaagttcccttagtagccagcttcggcacttccgggaggagccggaaataatttttgtgctcggcggaggctctctaggcgtgcgacccagcgactcgatagccggaagtcatccttgctgaggctggggcaaccaccgcaggtcgagacagcaggcggctcaagtggacagccgggatggcagagcgtgcggcgctggaggagctggtgaaacttcagggagagcgcgtgcgaggcctcaagcagcagaaggccagcgccgagctgatcgaggaggaggtggcgaaactcctgaaactgaaggcacagctgggtcctgatgaaagcaaacagaaatttgtgctcaaaacccccaagggcacaagagactatagtccccggcagatggcagttcgcgagaaggtgtttgacgtaatcatccgttgcttcaagcgccacggtgcagaagtcattgatacacctgtatttgaactaaaggaaacactgatgggaaagtatggggaagactccaagcttatctatgacctgaaggaycagggcggggagctcctgtcccttcgctatgacctcactgttccttttgctcggtatttggcaatgaataaactgaccaacattaaacgctaccacatagcaaaggtatatcggcgggataacccagccatgacccgtggccgataccgggaattctaccagtgtgattttgacattgctgggaactttgatcccatgatccctgatgcagagtgcctgaagatcatgtgygagatcctgagttcacttcagataggcgacttcctggtcaaggtaaacgatcgacgcattctagatgggatgtttgctatctgtggtgtttctgayagcaagttccgtaccatctgctcctcagtagacaagctggacaaggtgtcctgggaagaggtgaagaatgagatggtgggagagaagggccttgcaccwgaggtggctgaccgcattggggactatgtccagcaacatggtggggtatccctggtggaacagctgctccaggatcctaaactatcccaaaacaagcaggccttggagggcytgggagacctgaagttgctctttgagtacctgaccctatttggcattgatgacaaaatctcctttgacctgagccttgctcgagggctggattactacactggggtgatctatgaggcagtgctgctacagaccccagcccaggcaggggaagagcccctgggtgtgggcagtgtggctgctggaggacgctatgatgggctagtgggcatgttcgaccccaaagggcgcaaggtgccatgtgtggggctcagcattggggtggagcggattttctccatcgtggaacagagactagaggytttggaggagaagatacggaccacggagacacaggtgcttgtggcatctgcacagaagaagctgstagaggaaagactaaagcttgtctcagaactgtgggatgctgggatcaaggctgagctgctgtacaagaagaacccaaagctactgaaccagttacagtactgtgaggaggcaggcatcccactggtggctatcatcggcgagcaggaactcaaggatggggtcatcaagctccgttcagtgacgagcagggaagaggtggatgtccgaagagaagaccttgtggaggaaatcaaaaggagaacaggccagcccctctgcatctgctgaactgaacaaactatcagaggaaaggaagtgggactggcactatttgaggttaagacaaactgcatatgtacttcaattgctttgcacttttccgtttcagcggaagacctgaagagtggtcagaacagagcctttgatttttattatggttattttattgattattactggcaaaaacggccaggtacaacacctttttcatacaaggcccaggaggcttagtccagtctgtgctcctgggctacaaggacccagcctgagatggtcccatytgcagggccccgcaccagttggagcagatgcctccccmccaccaattgccaaaggtccaataaaatgcctcaaccmcggagtctgcgtgtgtcagtgatgcctagccccgccttccccagcagaccaatgtagggatggaaaagggagaaaaacagtaaacttgtgaccctgaggttcttgtctccagcgtccaccctgcggcttgggagctcctcctsgggaggcagcccccgtacatacgcacccgcgactttgcagctttcacctgaaggtctgagcgaagcccgggcggcgcacgtgcagtggatacctccacccccctgggaggcggggtcgcgctcagagccaatgagagcttgcggggtggaggggtagggaagcttccagaggccggtggggaggaagttataaagagggtacgagggggccagctggagagccatgcagtccaagcgggattgtgaggtaagcggctggcgacttgggggccggcgagccccgccggagcgggggtcggctttagggaccccagtaccacaggagaggtgggggcgcgcttggcgatccgccattccaaccttcctttccctctcagctgtggtgtgagagggtgaatccagagaacaaggcggcgctggaggcgtgggtcagggagacaggcatccgcctggtgcaggtgaacgggcagaggaagtatggcgggccacccccaggtacggtagtcccagcccctccgcctgtccggctacaccagccccctttgggggaggggctgctccgagccttcactgtcagaaactgcgaactacccggatttataccccccagcaaaggaggaactgtggctccacgtccacccgccccgtcgagggagggggccaatctcaaggtgtacctactctgtgccagcccccttgttagcgcagtcacctaattatgccaaccacccagggtacgggtgtaaacccatttcacagacctttgttcacatcgcctcccacccccgcgcgctgggtccgtgggctcagaattcgaaagcgtcgcctgacggtggccttgcataccctcttcccacaggctgggtgggcagcccgccgccagctgggtcagaggtgttcatcgggcggctgcctcaggacgtgtacgagcaccagcttatcccgctgttccagcgcgtgggccgcctctacgagttccgcctgatgatgaccttcagcggcctgaaccgcggcttcgcctatgcccgctacagctcgaggcgcggcgcgcaggccgccatcgccacgctgcacaaccayccgctgcggccgtcctgcccgctgctcgtgtgccgcagcaccgagaagtgtgagctgagcgttgacggcctgccgccgaatctgacccgcagcgcgctgctgctcgcgctgcagccgctgggtcccggcttgcaggaggcgcggctgctgcccagccccggaccggcgcccgggcagatcgctctgctcaaattcagctcgcaccgggccgctgccatggccaaaaaggccctggtggaag

SEQ ID NO: 1463 - DNA, 3219 bp, Homo sapiens
cggagtgccaggctactcctcccgcagtgtgggtggttccgaggctgactaccctgmggcggcgcggytcgcagtccttctcagcatggaccgcacttgtgaggagaggcccgctgaggatgggagcgacgaggaggacccagactccatggaagccccaacccggatccgggacactccggaagacatcgtgctggaagctccggctagtgggctggcgttccatccggccygtgacctactggctgcaggggacgtggacggggacgtgttcgtcttttcctactcttgccaagagggagaaaccaaggagctctggtcatcaggtcaccatctcaaggcctgccgagctgtggccttctctgaagatgggcagaagctcattactgtctccaaggacaaagccatccatgttctagatgtggagcagggccaactggaaagacgtgtttccaaggctcatggtgcccccatcaayagtcttctgctggtggatgagaatgttctggccactggggatgacacaggtggtatcygtctctgggaccagcggaaggagggccccttaatggatatgaggcaacatgaagagtacatcgcagacatggctctggatccagccaaaaagctgctgctgacagccagcggggatggctgccttggcatcttcaacattaagaggcgtcggtttgagctgctctcagaacctcagtytggggacctgacctctgtcactctcatgaaatgggggaagaaggtagcctgtggctccagtgaaggtaccatctrcctcttcaattggaatggctttggggccacaagtgaccgctttgccctgagagctgaatctatcgactgcatggttccagtcacmgagagtctgctgtgtactggctccactgatggagtcatcagggctgtgaacatcctaccgaaccgagtggtgggcagtgtgggccagcacactggggagcctgtggaggagctggccctctcccactgtggccgcttcctggccagtagtggccatgaccagcgcctcaagttttgggacatggcccagctgcgagctgtggtggtggatgactaccgtcggcgcaaaaaaaagggaggaccactgcgggctctgagcagcaagacttggagcaccgatgacttyttcgcaggactgagrgaagagggagaagactccatggctcaggaagaaaaggaggagactggggatgacagtgactgaaggaatgaattgaatcttgagaygggtcctcaccagccccagcagaccacaggaggttggccccagactcactgagtgcctgcagcagccgtacagacacagcatccttggccacctcatgcccatcccggccatctagggtcagcacaacccagatgaggccgctgaagggcaccggatgcccaggaatcaccacctggtaccagaagcggtgccagccagcaggtcctatgcccaaacacttgctatgctcagtataaagtgcygggcagaacgcgtttggccccaaccagcacccccgccccagcctaccttccaccagggcctttttggccatggcagcggcccggtgcgagctgaatttgagcagagcgatctgcccgggcgccggtccggggctgggcagcagccgcgcctcctgcaagccgggacccagcggctgcagcgcgagcagcagcgcgctgcgggtcagattcggcggcaggccgtcaacgctcagctcacacttctcggtgctgcggcacacgagcagcgggcaggacggccgcagcggrtggttgtgcagcgtggcgatggcggcctgcgcgccgcgcctcgagctgtagcgggcataggcgaagccgcggttcaggccgctgaaggtcatcatcaggcggaactcgtagaggcggcccacgcgctggaacagcgggataagctggtgctcgtacacgtcctgaggcagccgcccgatgaacacctctgacccagctggcggcgggctgcccacccagcctgtgggaagagggtatgcaaggccaccgtcaggcgacgctttcgaattctgagcccacggacccagcgcgcgggggtgggaggcgatgtgaacaaaggtctgtgaaatgggtttacacccgtaccctgggtggttggcataattaggtgactgcgctaacaagggggctggcacagagtaggtacaccttgagattggccccctccctcgacggggcgggtggacgtggagccacagttcctcctttgctggggggtataaatccgggtagttcgcagtttctgacagtgaaggctcggagcagcccctcccccaaagggggctggtgtagccggacaggcggaggggctgggactaccgtacctgggggtggcccgccatacttcctctgcccgttcacctgcaccaggcggatgcctgtctccctgacccacgcctccagcgccgccttgttctctggattcaccctctcacaccacagctgagagggaaaggaaggttggaatggcggatcgccaagcgcgcccccacctctcctgtggtactggggtccctaaagccgacccccgctccggcggggctcgccggcccccaagtcgccagccgcttacctcacaatcccgcttggactgcatggctctccagctggccccctcgtaccctctttataacttcctccccaccggcctctggaagcttccctacccctccaccccgcaagctctcattggctctgagcgcgaccccgcctcccaggggggtggaggtatccactgcacgtgcgccgcccgggcttcgctcagaccttcaggtgaaagctgcaaagtcgcgggtgcgtatgtacgggggctgcctcccsaggaggagctcccaagccgcagggtggacgctggagacaagaacctcagggtcacaagtttactgtttttctcccttttccatccctacattggtctgctggggaaggcggggctaggcatcactgacacacgcagactccgkggttgaggcattttattggacctttggcaattggtggkggggaggcatctgctccaactggtgcggggccctgcaratgggaccatctcaggctgggtccttgtagcccaggagcacagactggactaagcctcctgggccttgtatgaaaaaggtgttgtacctggccgtttttgccagtaataatcaataaaataaccataat

SEQ ID NO: 1464 - DNA, 2943 bp, Homo sapiens
cttttcctactcttgccaagagggagaaaccaaggagctctggtcatcaggtcaccatctcaaggcctgccgagctgtggccttctctgaagatgggcagaagctcattactgtctccaaggacaaagccatccatgttctagatgtggagcagggccaactggaaagacgtgtttccaaggctcatggtgcccccatcaayagtcttctgctggtggatgagaatgttctggccactggggatgacacaggtggtatcygtctctgggaccagcggaaggagggccccttaatggatatgaggcaacatgaagagtacatcgcagacatggctctggatccagccaaaaagctgctgctgacagccagcggggatggctgccttggcatcttcaacattaagaggcgtcggtttgagctgctctcagaacctcagtytggggacctgacctctgtcactctcatgaaatgggggaagaaggtagcctgtggctccagtgaaggtaccatctrcctcttcaattggaatggctttggggccacaagtgaccgctttgccctgagagctgaatctatcgactgcatggttccagtcacmgagagtctgctgtgtactggctccactgatggagtcatcagggctgtgaacatcctaccgaaccgagtggtgggcagtgtgggccagcacactggggagcctgtggaggagctggccctctcccactgtggccgcttcctggccagtagtggccatgaccagcgcctcaagttttgggacatggcccagctgcgagctgtggtggtggatgactaccgtcggcgcaaaaaaaagggaggaccactgcgggctctgagcagcaagacttggagcaccgatgacttyttcgcaggactgagrgaagagggagaagactccatggctcaggaagaaaaggaggagactggggatgacagtgactgaaggaatgaattgaatcttgagaygggtcctcaccagccccagcagaccacaggaggttggccccagactcactgagtgcctgcagcagccgtacagacacagcatccttggccacctcatgcccatcccggccatctagggtcagcacaacccagatgaggccgctgaagggcaccggatgcccaggaatcaccacctggtaccagaagcggtgccagccagcaggtcctatgcccaaacacttgctatgctcagtataaagtgcygggcagaacgcgtttggccccaaccagcacccccgccccagcctaccttccaccagggcctttttggccatggcagcggcccggtgcgagctgaatttgagcagagcgatctgcccgggcgccggtccggggctgggcagcagccgcgcctcctgcaagccgggacccagcggctgcagcgcgagcagcagcgcgctgcgggtcagattcggcggcaggccgtcaacgctcagctcacacttctcggtgctgcggcacacgagcagcgggcaggacggccgcagcggrtggttgtgcagcgtggcgatggcggcctgcgcgccgcgcctcgagctgtagcgggcataggcgaagccgcggttcaggccgctgaaggtcatcatcaggcggaactcgtagaggcggcccacgcgctggaacagcgggataagctggtgctcgtacacgtcctgaggcagccgcccgatgaacacctctgacccagctggcggcgggctgcccacccagcctgtgggaagagggtatgcaaggccaccgtcaggcgacgctttcgaattctgagcccacggacccagcgcgcgggggtgggaggcgatgtgaacaaaggtctgtgaaatgggtttacacccgtaccctgggtggttggcataattaggtgactgcgctaacaagggggctggcacagagtaggtacaccttgagattggccccctccctcgacggggcgggtggacgtggagccacagttcctcctttgctggggggtataaatccgggtagttcgcagtttctgacagtgaaggctcggagcagcccctcccccaaagggggctggtgtagccggacaggcggaggggctgggactaccgtacctgggggtggcccgccatacttcctctgcccgttcacctgcaccaggcggatgcctgtctccctgacccacgcctccagcgccgccttgttctctggattcaccctctcacaccacagctgagagggaaaggaaggttggaatggcggatcgccaagcgcgcccccacctctcctgtggtactggggtccctaaagccgacccccgctccggcggggctcgccggcccccaagtcgccagccgcttacctcacaatcccgcttggactgcatggctctccagctggccccctcgtaccctctttataacttcctccccaccggcctctggaagcttccctacccctccaccccgcaagctctcattggctctgagcgcgaccccgcctcccaggggggtggaggtatccactgcacgtgcgccgcccgggcttcgctcagaccttcaggtgaaagctgcaaagtcgcgggtgcgtatgtacgggggctgcctcccsaggaggagctcccaagccgcagggtggacgctggagacaagaacctcagggtcacaagtttactgtttttctcccttttccatccctacattggtctgctggggaaggcggggctaggcatcactgacacacgcagactccgkggttgaggcattttattggacctttggcaattggtggkggggaggcatctgctccaactggtgcggggccctgcaratgggaccatctcaggctgggtccttgtagcccaggagcacagactggactaagcctcctgggccttgtatgaaaaaggtgttgtacctggccgtttttgccagtaataatcaataaaataaccataat

SEQ ID NO: 1465 - DNA, 3098 bp, Homo sapiens
gaggatgggagcgacgaggaggacccagactccatggaagccccaacccggatccgggacactccggaagacatcgtgctggaagctccggctagtgggctggcgttccatccggccygtgacctactggctgcaggggacgtggacggggacgtcttttcctactcttgccaagagggagaaaccaaggagctctggtcatcaggtcaccatctcaaggcctgccgagctgtggccttctctgaagatgggcagaagctcattactgtctccaaggacaaagccatccatgttctagatgtggagcagggccaactggaaagacgtgtttccaaggctcatggtgcccccatcaayagtcttctgctggtggatgagaatgttctggccactggggatgacacaggtggtatcygtctctgggaccagcggaaggagggccccttaatggatatgaggcaacatgaagagtacatcgcagacatggctctggatccagccaaaaagctgctgctgacagccagcggggatggctgccttggcatcttcaacattaagaggcgtcggtttgagctgctctcagaacctcagtytggggacctgacctctgtcactctcatgaaatgggggaagaaggtagcctgtggctccagtgaaggtaccatctrcctcttcaattggaatggctttggggccacaagtgaccgctttgccctgagagctgaatctatcgactgcatggttccagtcacmgagagtctgctgtgtactggctccactgatggagtcatcagggctgtgaacatcctaccgaaccgagtggtgggcagtgtgggccagcacactggggagcctgtggaggagctggccctctcccactgtggccgcttcctggccagtagtggccatgaccagcgcctcaagttttgggacatggcccagctgcgagctgtggtggtggatgactaccgtcggcgcaaaaaaaagggaggaccactgcgggctctgagcagcaagacttggagcaccgatgacttyttcgcaggactgagrgaagagggagaagactccatggctcaggaagaaaaggaggagactggggatgacagtgactgaaggaatgaattgaatcttgagaygggtcctcaccagccccagcagaccacaggaggttggccccagactcactgagtgcctgcagcagccgtacagacacagcatccttggccacctcatgcccatcccggccatctagggtcagcacaacccagatgaggccgctgaagggcaccggatgcccaggaatcaccacctggtaccagaagcggtgccagccagcaggtcctatgcccaaacacttgctatgctcagtataaagtgcygggcagaacgcgtttggccccaaccagcacccccgccccagcctaccttccaccagggcctttttggccatggcagcggcccggtgcgagctgaatttgagcagagcgatctgcccgggcgccggtccggggctgggcagcagccgcgcctcctgcaagccgggacccagcggctgcagcgcgagcagcagcgcgctgcgggtcagattcggcggcaggccgtcaacgctcagctcacacttctcggtgctgcggcacacgagcagcgggcaggacggccgcagcggrtggttgtgcagcgtggcgatggcggcctgcgcgccgcgcctcgagctgtagcgggcataggcgaagccgcggttcaggccgctgaaggtcatcatcaggcggaactcgtagaggcggcccacgcgctggaacagcgggataagctggtgctcgtacacgtcctgaggcagccgcccgatgaacacctctgacccagctggcggcgggctgcccacccagcctgtgggaagagggtatgcaaggccaccgtcaggcgacgctttcgaattctgagcccacggacccagcgcgcgggggtgggaggcgatgtgaacaaaggtctgtgaaatgggtttacacccgtaccctgggtggttggcataattaggtgactgcgctaacaagggggctggcacagagtaggtacaccttgagattggccccctccctcgacggggcgggtggacgtggagccacagttcctcctttgctggggggtataaatccgggtagttcgcagtttctgacagtgaaggctcggagcagcccctcccccaaagggggctggtgtagccggacaggcggaggggctgggactaccgtacctgggggtggcccgccatacttcctctgcccgttcacctgcaccaggcggatgcctgtctccctgacccacgcctccagcgccgccttgttctctggattcaccctctcacaccacagctgagagggaaaggaaggttggaatggcggatcgccaagcgcgcccccacctctcctgtggtactggggtccctaaagccgacccccgctccggcggggctcgccggcccccaagtcgccagccgcttacctcacaatcccgcttggactgcatggctctccagctggccccctcgtaccctctttataacttcctccccaccggcctctggaagcttccctacccctccaccccgcaagctctcattggctctgagcgcgaccccgcctcccaggggggtggaggtatccactgcacgtgcgccgcccgggcttcgctcagaccttcaggtgaaagctgcaaagtcgcgggtgcgtatgtacgggggctgcctcccsaggaggagctcccaagccgcagggtggacgctggagacaagaacctcagggtcacaagtttactgtttttctcccttttccatccctacattggtctgctggggaaggcggggctaggcatcactgacacacgcagactccgkggttgaggcattttattggacctttggcaattggtggkggggaggcatctgctccaactggtgcggggccctgcaratgggaccatctcaggctgggtccttgtagcccaggagcacagactggactaagcctcctgggccttgtatgaaaaaggtgttgtacctggccgtttttgccagtaataatcaataaaataaccataat

SEQ ID NO: 1466 - DNA, 1186 bp, Homo sapiens
cgttcgcagcctttccgcttcctgtttttccctccgaccaaccccgagcgcaaagaaattgacctcgcagcggtcctacaatrcttttatatcattggccaagctttaccccgcccctgcctcatgcagcctatgggctaggctttagggtccgcggttggtcagaccggrgcacttggcctgaagacctggaattggcgacttcgatattaacaaggatggcggcggccgcagcaagtcgaggagtcggggcaaagstgggcctgcgtgagattcgcatccacttatgtcagcgctcgcccggcagccagggcgtcagggacttcattgagaaacgctacgtggagctgaagaaggcgaatcccgacctacccatcctaatccgcgaatgctccgatgtgcagcccaagctctgggcccgctacgcatttggccaagagacgaatgtccctttgaacaacttcagtgctgatcaggtaaccagagccctggagaacgttctaagtggtaaagcctgaagcctccactgaggattaagagcaacagccccagagcctgggctctgctggacttagtataatgtgaaaaaaatgtgttctcctattcctcataaagcttgtgctgtaaaatactttctcagggtgttcttgtcctcatctaccctctaccccttactgtgcaaccactgaggcaaagtagcttaatataaaaataaaactttattctgtctcatcaaaagctaccagctgctgaagcaaacatgaagggtggcgggggggcagggattctagggccccagagtaagtagaccacactgagtcccttttggtcctcctgcctggatagtgctgagtggaaggggaggagctgggacccaaaggtcttggcttaggtgtgggagcagagaacatgagacctcattatggtcctaaatctccaaaggctctactggacaaacaagcttgatgttaagagagaggggaatgagtgacattgagaaacaagatcacccttgaagagctgtctgctggagagcatacacacgatcctggagctgggcctcttcctgatgcctttccagggcttgcacagtggagtggacagagaatcagaactgagttctaataccatacctgccacttactccatatgggacctgaacctaagtttcctcacctgaaaatga

SEQ ID NO: 1467 - DNA, 1089 bp, Homo sapiens
cgttcgcagcctttccgcttcctgtttttccctccgaccaaccccgagcgcaaagaaattgacctcgcagcggtcctacaatrcttttatatcattggccaagctttaccccgcccctgcctcatgcagcctatgggctaggctttagggtccgcggttggtcagaccggrgcacttggcctgaagacctggaattggcgacttcgatattaacaaggatggcggcggccgcagcaagtcgaggagtcggggcaaagstgggcctgcgtgagattcgcatccacttatgtcagcgctcgcccggcagccagggcgtcagggacttcattgagaaacgctacgtggagctgaagaaggcgaatcccgacctacccatcctaatccgcgaatgctccgatgtgcagcccaagctctgggcccgctacgcatttggccaagagacgaatgtccctttgaacaacttcagtgctgatcaggtaaccagagccctggagaacgttctaagtggtaaagcctgaagcctccactgaggattaagagcaacagccccagagcctgggctctgctggacttagtataatgtgaaaaaaatgtgttctcctattcctcataaagcttgtgctgtaaaatactttctcagggtgttcttgtcctcatctaccctctaccccttactgtgcaaccactgaggcaaagtagcttaatataaaaataaaactttattctgtctcatcaaaagctaccagctgctgaagcaaacatgaagggtggcgggggggcagggattctagggccccagagtaagtagaccacactgagtcccttttggtcctcctgcctggatagtgctgagtggaaggggaggagctgggacccaaaggtcttggcttaggtgtgggagcagagaacatgagacctcattatggtcctaaatctccaaaggctctactggacaaacaagcttgatgttaagagagaggggaatgagtgacattgagaaacaagatcacccttgaagagctgtctgctggagagcatacacacgatcctggagctgggcctcttcctgatgcctttccagggcttgca

SEQ ID NO: 1468 - DNA, 2527 bp, Homo sapiens
acttagagaaggaaggcggcgggtgtcagggctatgagtgcttttaaggaaggtctccatagaaggttcccccagcaaagtagggaggggtactccccgagaggagtcgaggtgccggagcctgctgcctcgccgacgctgggaggagccccgtgtcccgccgcgcttgccaagggttggctgcgcgtgcggcgggagtagaggcgccttgcgcaccaggaagtgactgtttccccgccgcagcaaaccaggccatccgctggccttttagtttgccgcctcagcaaggaatagtgtctggagccggtccagctgaaggaagggtgagcagagagtgcaagcaggacccttgtcggtgggtgaacattttgctccaaaagggatccttggccctgcgcaggtggatttcagtgtgttctttggatggcaggccttaagagaagagtcccactgcacagcctcagatacttcatctccatggtgggtctcttctccaaaccaggactgcttccctggtatgccagaaatccaccaggatggtcacagctctttctgggcacagtatgtaagggagatttcacccgtgtgatagccacgaaatgtcagaaaggacaaaaaagtcagaagaaaccaagccatcttggaccactagatggttcctggcaggaaaggctggctgatgttgtgacaccactctggaggttgagctatgaagaacagctcaaggtgaaatttgcagctcagaagaaaattttacaaagactagagtcttacatccaaatgctcaatggagtcagtgtgacaacggctgtacccaaatctgagaggctctcttgtcttctccatcctattataccctctcctgtcatcaatggttaccgaaataagtccaccttctctgtgaaccgaggtccagatggcaatccaaagactgtggggttctacctgggaacttggagagatgggaacgttgtctgtgtgcagtctaatcatctgaaaaacatccctgagaaacacagtcaagtggcgcagtactatgaagtattccttcgacagtctccattggagccctgccttgtrtttcatgaaggtggatactggcgtgagctcacagtccgcaccaatagccaagggcacacaatggctatcatcactttccatccccagaaattaagtcaggaggagctccatgttcagaaggagattgtaaaggaatttttcatcagaggtcctggagcagcctgtggcttgacctcactttacttccaggaaagtaccatgacccgttgcagccatcagcagtctccctatcagcttctgtttggggaaccctacatctttgaagaacttctgagcttgaagatccgcatctctccagatgcctttttccagattaacacagctggtgcagagatgctgtatcggactgtgrgggagctgactggagtgaactctgacaccatccttcttgacatctgctgtggaactggcaagtgtgattggcctctctctggctcagcatacatctcgggtccttgggattgaattgttggagcaggcagtggaggatgcaagatggactgcagccttcaatggcatcaccaactctgaatttcatactggtcaagcagagaagattttgccagggctgctaaagtcaaaggaagatggacagtcaattgttgctgtggtgaacccagcccgtgccggactgcattacaaggtgattcaagccattcgaaacttcagggccatccacacgctagtttttgtttcctgcaagctccatggtgaatccactaggaatgtcattgaacggagtctcatcttgctggagtgcagtggcatggtctcggctcactacagcctccacctcccaggttcaagcgattctcctgcctcagcctcctgagtagctggtattacaggctgtgctgtcctccagaccctgctaagaagctcttaggcgagccctttgtcctgcagcaagctgtacctgtggatttgttccctcacaccccacattgtgagctggtgctcctctttactcgataagcagcctcctagaagacwgcaggctatttgttaaggctgaagtttcagaaactttcaggtttggcatattgctacattgcagaccctgggagcattacagtggaaaccaatctttggtttgtgaataggaagaatctattaggcctctggtctgaggcagattttttttttgagatagagtctcactcttgcccagtgagctgarwttgtgccactgcactccagcctgggtgacagagtgagacaccatctcaaaaaaaaaaaaaaaaagaaaatgtagttatccctaggagcaatagcaccaattaactctcacccgtggaggaagaattggttattggagagaccctaagggaaaggagattttcagagagactgaatacctataattgtgctgtgtagtgtggaggcaaaaagctccaaaatctagtataacataataaactggatattgaaaactgactgtatttaa

SEQ ID NO: 1469 - DNA, 2414 bp, Homo sapiens
acttagagaaggaaggcggcgggtgtcagggctatgagtgcttttaaggaaggtctccatagaaggttcccccagcaaagtagggaggggtactccccgagaggagtcgaggtgccggagcctgctgcctcgccgacgctgggaggagccccgtgtcccgccgcgcttgccaagggttggctgcgcgtgcggcgggagtagaggcgccttgcgcaccaggaagtgactgtttccccgccgcagcaaaccaggccatccgctggccttttagtttgccgcctcagcaaggaatagtgtctggagccggtccagctgaaggaagggtgagcagagagtgcaagcaggacccttgtcggtgggtgaacattttgctccaaaagggatccttggccctgcgcaggtggatttcagtgtgttctttggatggcaggccttaagagaagagtcccactgcacagcctcagatacttcatctccatggtgggtctcttctccaaaccaggactgcttccctggtatgccagaaatccaccaggatggtcacagctctttctgggcacagtatgtaagggagatttcacccgtgtgatagccacgaaatgtcagaaaggacaaaaaagtcagaagaaaccaagccatcttggaccactagatggttcctggcaggaaaggctggctgatgttgtgacaccactctggaggttgagctatgaagaacagctcaaggtgaaatttgcagctcagaagaaaattttacaaagactagagtcttacatccaaatgctcaatggagtcagtgtgacaacggctgtacccaaatctgagaggctctcttgtcttctccatcctattataccctctcctgtcatcaatggttaccgaaataagtccaccttctctgtgaaccgaggtccagatggcaatccaaagactgtggggttctacctgggaacttggagagatgggaacgttgtctgtgtgcagtctaatcatctgaaaaacatccctgagaaacacagtcaagtggcgcagtactatgaagtattccttcgacagtctccattggagccctgccttgtrtttcatgaaggtggatactggcgtgagctcacagtccgcaccaatagccaagggcacacaatggctatcatcactttccatccccagaaattaagtcaggaggagctccatgttcagaaggagattgtaaaggaatttttcatcagaggtcctggagcagcctgtggcttgacctcactttacttccaggaaagtaccatgacccgttgcagccatcagcagtctccctatcagcttctgtttggggaaccctacatctttgaagaacttctgagcttgaagatccgcatctctccagatgcctttttccagattaacacagctggtgcagagatgctgtatcggactgtgrgggagctgactggagtgaactctgacaccatccttcttgacatctgctgtggaactggcaagtgtgattggcctctctctggctcagcatacatctcgggtccttgggattgaattgttggagcaggcagtggaggatgcaagatggactgcagccttcaatggcatcaccaactctgaatttcatactggtcaagcagagaagattttgccagggctgctaaagtcaaaggaagatggacagtcaattgttgctgtggtgaacccagcccgtgccggactgcattacaaggtgattcaagccattcgaaacttcagggccatccacacgctagtttttgtttcctgcaagctccatggtgaatccactaggaatgtcattgagctgtgctgtcctccagaccctgctaagaagctcttaggcgagccctttgtcctgcagcaagctgtacctgtggatttgttccctcacaccccacattgtgagctggtgctcctctttactcgataagcagcctcctagaagacwgcaggctatttgttaaggctgaagtttcagaaactttcaggtttggcatattgctacattgcagaccctgggagcattacagtggaaaccaatctttggtttgtgaataggaagaatctattaggcctctggtctgaggcagattttttttttgagatagagtctcactcttgcccagtgagctgarwttgtgccactgcactccagcctgggtgacagagtgagacaccatctcaaaaaaaaaaaaaaaaagaaaatgtagttatccctaggagcaatagcaccaattaactctcacccgtggaggaagaattggttattggagagaccctaagggaaaggagattttcagagagactgaatacctataattgtgctgtgtagtgtggaggcaaaaagctccaaaatctagtataacataataaactggatattgaaaactgactgtatttaa

SEQ ID NO: 1470 - DNA, 3455 bp, Homo sapiens
ggggaggggaggagaggagaacttagagaaggaaggcggcgggtgtcagggctatgagtgcttttaaggaaggtctccatagaaggttcccccagcaaagtagggaggggtactccccgagaggagtcgaggtgccggagcctgctgcctcgccgacgctgggaggagccccgtgtcccgccgcgcttgccaagggttggctgcgcgtgcggcgggagtagaggcgccttgcgcaccaggaagtgactgtttccccgccgcagcaaaccaggccatccgctggccttttagtttgccgcctcaggtttgtaagaggatttattggttacgaaggaaggtggatttcagtgtgttctttggatggcaggccttaagagaagagtcccactgcacagcctcagatacttcatctccatggtgggtctcttctccaaaccaggactgcttccctggtatgccagaaatccaccaggatggtcacagctctttctgggcacagtatgtaagggagatttcacccgtgtgatagccacgaaatgtcagaaaggacaaaaaagtcagaagaaaccaagccatcttggaccactagatggttcctggcaggaaaggctggctgatgttgtgacaccactctggaggttgagctatgaagaacagctcaaggtgaaatttgcagctcagaagaaaattttacaaagactagagtcttacatccaaatgctcaatggagtcagtgtgacaacggctgtacccaaatctgagaggctctcttgtcttctccatcctattataccctctcctgtcatcaatggttaccgaaataagtccaccttctctgtgaaccgaggtccagatggcaatccaaagactgtggggttctacctgggaacttggagagatgggaacgttgtctgtgtgcagtctaatcatctgaaaaacatccctgagaaacacagtcaagtggcgcagtactatgaagtattccttcgacagtctccattggagccctgccttgtrtttcatgaaggtggatactggcgtgagctcacagtccgcaccaatagccaagggcacacaatggctatcatcactttccatccccagaaattaagtcaggaggagctccatgttcagaaggagattgtaaaggaatttttcatcagaggtcctggagcagcctgtggcttgacctcactttacttccaggaaagtaccatgacccgttgcagccatcagcagtctccctatcagcttctgtttggggaaccctacatctttgaagaacttctgagcttgaagatccgcatctctccagatgcctttttccagattaacacagctggtgcagagatgctgtatcggactgtgrgggagctgactggagtgaactctgacaccatccttcttgacatctgctgtggaactggtgtgattggcctctctctggctcagcatacatctcgggtccttgggattgaattgttggagcaggcagtggaggatgcaagatggactgcagccttcaatggcatcaccaactctgaatttcatactggtcaagcagagaagattttgccagggctgctaaagtcaaaggaagatggacagtcaattgttgctgtggtgaacccagcccgtgccggactgcattacaaggtgattcaagccattcgaaacttcagggccatccacacgctagtttttgtttcctgcaagctccatggtgaatccactaggaatgtcattgagctgtgctgtcctccagaccctgctaagaagctcttaggcgagccctttgtcctgcagcaagctgtacctgtggatttgttccctcacaccccacattgtgagctggtgctcctctttactcgataagcagcctcctagaagacwgcaggctatttgttaaggctgaagtttcagaaactttcaggtttggcatattgctacattgcagaccctgggagcattacagtggaaaccaatctttggtttgtgaataggaagaatctattaggcctctggtctgaggcagattttttttttgagatagagtctcactcttgcccaggctggagtgtcgtggcgtgatctcagctcactgcracctccgcctcccgggttcragtgattctcgtgcctcagcttccccagtagctaggattaaaggtgcgtgccaccatgcccggctaatttttgtatttttggtagagacagggtttcaccatgttggccaggctggtctcaaactcctgacctcaagtgatccacccgcctcggcctctcaaagtgctgggattataggcgtgagccaccacaccccgccgcggctgacttaaccttagatttcagattccctttcaatcatgcccgtttgcttgggtttgaccactccccactcctggatctggactgtttcttcctgttgctgtcagccttggttctagtttatagtcttgtctcctccgtttctgcttatggtgtggacaaatgaccttttttaagcagctggtaataattttacattgactggagcctgtgcatttgctcagagatgctacaatttttagatatttctaagacttctggattcttgaggtagttaaggattaaaaccagaaacagtcgaggttttttaaaagcagggtaagccatgaagtgaatacagggtgactgagtgatcatcagatgagattaattcttttgggttttcttggttttaaggcatctcgaatgccccttgaaaatgtagttttccctggtggtgggcacctgtaatcccagctactcgggaggctgaggcaggataattgcttgaacctgggaggtggaggttgcagtgagctgarwttgtgccactgcactccagcctgggtgacagagtgagacaccatctcaaaaaaaaaaaaaaaaagaaaatgtagttatccctaggagcaatagcaccaattaactctcacccgtggaggaagaattggttattggagagaccctaagggaaaggagattttcagagagactgaatacctataattgtgctgtgtagtgtggaggcaaaaagctccaaaatctagtataacataataaactggatattgaaaactgactgtatttaacattctctagtccatgatttcatcaactctggagttgttcttgggtacttgcccaacaatttagattatgttttgataatctaaaggcctaaggatgtgtaacttagtaagtgttgtctgattcacaaagtgatatcaggttaactggtatttttaattcttctcaatcaaacattctagagaagcctccttcttagaaaaatatggctgttaaagctactatataatgttttctattctttttttagatggtgggtcaggtatagccacaagaggagacacaggagaggctcaggaaaacaaagtctattatgcttacaggtcctagagacaggagac

SEQ ID NO: 1471 - DNA, 1858 bp, Homo sapiens
ggggaggggaggagaggagaacttagagaaggaaggcggcgggtgtcagggctatgagtgcttttaaggaaggtctccatagaaggttcccccagcaaagtagggaggggtactccccgagaggagtcgaggtgccggagcctgctgcctcgccgacgctgggaggagccccgtgtcccgccgcgcttgccaagggttggctgcgcgtgcggcgggagtagaggcgccttgcgcaccaggaagtgactgtttccccgccgcagcaaaccaggccatccgctggccttttagtttgccgcctcaggtttgtaagaggatttattggttacgaaggaagatgggaacgttgtctgtgtgcagtctaatcatctgaaaaacatccctgagaaacacagtcaagtggcgcagtactatgaagtattccttcgacagtctccattggagccctgccttgtrtttcatgaaggtggatactggcgtgagctcacagtccgcaccaatagccaagggcacacaatggctatcatcactttccatccccagaaattaagtcaggaggagctccatgttcagaaggagattgtaaaggaatttttcatcagaggtcctggagcagcctgtggcttgacctcactttacttccaggaaagtaccatgacccgttgcagccatcagcagtctccctatcagcttctgtttggggaaccctacatctttgaagaacttctgagcttgaagatccgcatctctccagatgcctttttccagattaacacagctggtgcagagatgctgtatcggactgtgrgggagctgactggagtgaactctgacaccatccttcttgacatctgctgtggaactggcaagtggaagcccagggcagaatctgcatgctgctcagctcccaaggcccttgtagcttgcggaggtggtcggggagaggtagtggtagtggtgcagcatacatctcgggtccttgggattgaattgttggagcaggcagtggaggatgcaagatggactgcagccttcaatggcatcaccaactctgaatttcatactggtcaagcagagaagattttgccagggctgctaaagtcaaaggaagatggacagtcaattgttgctgtggtgaacccagcccgtgccggactgcattacaaggtgattcaagccattcgaaacttcagggccatccacacgctagtttttgtttcctgcaagctccatggtgaatccactaggaatgtcattgagctgtgctgtcctccagaccctgctaagaagctcttaggcgagccctttgtcctgcagcaagctgtacctgtggatttgttccctcacaccccacattgtgagctggtgctcctctttactcgataagcagcctcctagaagacwgcaggctatttgttaaggctgaagtttcagaaactttcaggtttggcatattgctacattgcagaccctgggagcattacagtggaaaccaatctttggtttgtgaataggaagaatctattaggcctctggtctgaggcagattttttttttgagatagagtctcactcttgcccagtgagctgarwttgtgccactgcactccagcctgggtgacagagtgagacaccatctcaaaaaaaaaaaaaaaaagaaaatgtagttatccctaggagcaatagcaccaattaactctcacccgtggaggaagaattggttattggagagaccctaagggaaaggagattttcagagagactgaatacctataattgtgctgtgtagtgtggaggcaaaaagctccaaaatctagtataacataataaactggatattgaaaactgactgtatttaa

SEQ ID NO: 1472 - DNA, 642 bp, Homo sapiens
atggcctgggcgtcgggcttcctctgctctctggcggggcgattttcacggtcaccaggctgcggacaggctgtgggggtggcgggcggtccaaagccaccgcttcacgtaggccaggggagccttsgagaaatcaggcctgatgttgctcagcagcggcagcctgttgggaaagcacctccaggcctcggggaccatctctctcaggacgcggatgcgggcggggaccatctctctctggatgcagatgcgggtgtagtcccagctgggaggagtggtgcggaggggccggatgcggacccagtgyttcctgtggaagtaggtgaccttgcagttctcctggacctgggagctgaggaagggcctggactgcagaacccagtgcttttgggcggggcgcagctttctggcaagcggcttgggccttccagtagacactgggctgccagaagtttccgaaatctgcggtcaaggccagagatcaaatgtcagggctcagtgactagcgacggttagcatcaaaatgttggaaagtgcacaaggcgccgtgtgccaggtacggtctgtccaccaactgttgcatggggcaggaggccacggccaggccacagctttgcsgcgygcagctgcagaaggggcaag

SEQ ID NO: 1473 - DNA, 993 bp, Homo sapiens
gccatggcgacctccaggaagttcgttggggggaactggaagatgaaccgacggaagaagagcctgggggagctcatccgcactctgaaggcggccaaggtgccggccaacactgaggtggtttgcactctccccactgcctatatcgactttgccccagaagctagagcccaagattgctgtggctgcgcagaactgctacaaagtaactaacggggcctttacytgggagatcagccctggcatgatcaaagactgcaaagccaatcgagggtcctggggcactcagagagtaggcatgtctttggggagtcagataagctgattgggcagaaagtggcccatgctctggcaaagggactcagagtaatcgcttgcactggggagaagctagctgaaagggaagtggcatcactgagaagtttgttttcgagaagaaagaggtcatcgcagataacgtgaaggactggagcaaggtcgtcctggcctgcgagcctgtgtgggccattggtaccagcaagactgcaacaccccagaaggcccaggaagtacacgagaagttctgagaatggtgtccaacatctctgatgtggtggctcagagcacccgtatccatttatggaggctctgtgatgggggcaacctgcaaggagctggccagccagcctgaagtggatggcttcctcrtgggtgatgcttccctcaagccctaattcgtggacatcatcaatgccaaacaatgagccccatccatcttccctacccttcctgccaagccagggactaagcagcccagaagcccagtaactgcccctcccctgcacatgtttctgatggtgtcatctgccccctcttgcggcctcatccaaactgtaccttcctttactgtttatatcttcaccctgtaatggttgggaccaggccactcccttctccacttagtataatcgttggaactagacgtcaccaaggtggcttctccttggctgagag

SEQ ID NO: 1474 - DNA, 2291 bp, Homo sapiens
tctcacgtgagccaacagtatagattctgaaggcgtttatggcaggagaaacaaaatacgcagggaaagataatctcagtgttaaagacagatgtatgcctggaggccaagacagaaaatgagctgcagagagaacgcagtagcctgctagccagccagtaaagaagtgaggctagttcagcggactcgcgcggcctcgctctttggactcgtcaccctcccctccccctcccgccgccgtcacccaggaaaccggccgcaawcgcsggcggacctgaagctggtttcatggcagcctcaaagaaggcagttttggggccattggtgggggcrgtggaccaaggcaccagttcsacgcgctttttggttttcaattcaaraacagctgaactacttagtcatcatcaagtrgaaataaaacaagagttcccaagagaaggatgggtggaacaggaccctaaggaaattctacattctgtctatgagtgtatagagaaaacatgtgagaaacttggacagctcaatattggtatttccaacataaaagctattggtgtcagcaaccagagggaaaccaccgtagtctgggacaagataactggagagcctctctacaatgctgtggtgtggcttgatctaagaacmcagtctaccgttgagagtcttagtaaaagaattccaggaaataataactttgtcaagtccaagacaggccttccacttagcacttacttcagtgcagtgaaacttcgytggctcctcgacaatgtgagaaaagttcaaaaggccgttgaagaaaaacgagctctttttgggactattgattcatggcttatttggagtttgacaggaggmgtcaatggaggtgtccactgtacagatgtaacaaatgcaagtaggactatgcttttcaacattcattctttggaatgggataaacaactctgygaattttttggaattccaatggaaattcttccacatgttcggagttcttctgagatctatggcctaatgaaagcgggggccttggaaggtgtrccaatatctgggtgttyaggggaccagtctgctgcaytggtgggacaaatgtgcttccagattggacaagccaaaaatacgtatggaacaggatgtttcttactatgtratacaggccataagtgtgtattttctgatcatggccttctcaccacagtggcttacaaacttggcagagacaaaccggtatattacgctttggaaggttctgtagctatagctggtgctgttattcgctggctaagagacaatcttggaattataaagacctcagaagaaattgaaaaacttgctaaagaagtaggtacttcttatggctgctacttcgtcccagcattttcggggttatatgcaccttattgggagcccagcgcaagagggataatctgtggactcactcaattcacgaataaatgccatattgcttttgctgcattaraagctgtttgtttccaaactcgagagattttggatgccaygaatcgagactgtggaattccactcagtcatttgcaggttgatggaggaatgaccagcaacaaaattcttatgcagctacaagcagacattctgtatattccagtagtgaagcccttgatgcccgaaaccactgcactgggtgctgccatggcggcaggggctgcagaaggagtcgacgtatggagtcttgaacctgaggatttgtccgccgtcacgatggagcggtttgaacctcagattaatgctgaggaaagtgaaattcgttattctacatggaagaaagctgtgatgaagtcaatgggttgggttacaactcaatctccagaaggtggtattccataaaacctaccaactcatggattcccaagatgcgagctttttacataatgaaagaacaacccagcaattgtctcttaatgcgatgacactattcatagactttgattttatttataagccacttgctgcgtgaccctccaagtagacctgtggcttaaaataaagaaaatgcagcaaaaagaatgctatagaaatatttggttgtgtgtgtgtgtttttaacatccacagttaaggttgggccagctacctttggggstgacccccyccattgccataacatcctgctccattccctctaagatgtacgaagaattcagatcctcaccattggaatcttccatcaaacatactcaaacactactggaacaggacttgagtctttgcatgacatatacttgattaaaaggttattactaacctgttaaaaat

SEQ ID NO: 1475 - DNA, 3330 bp, Homo sapiens
tctcacgtgagccaacagtatagattctgaaggcgtttatggcaggagaaacaaaatacgcagggaaagataatctcagtgttaaagacagatgtatgcctggaggccaagacagaaaatgagctgcagagagaacgcagtagcctgctagccagccagtaaagaagtgaggctagttcagcggactcgcgcggcctcgctctttggactcgtcaccctcccctccccctcccgccgccgtcacccaggaaaccggccgcaawcgcsggcggacctgaagctggtttcatggcagcctcaaagaaggcagttttggggccattggtgggggcrgtggaccaaggcaccagttcsacgcgctttttggttttcaattcaaraacagctgaactacttagtcatcatcaagtrgaaataaaacaagagttcccaagagaaggatgggtggaacaggaccctaaggaaattctacattctgtctatgagtgtatagagaaaacatgtgagaaacttggacagctcaatattggtatttccaacataaaagctattggtgtcagcaaccagagggaaaccaccgtagtctgggacaagataactggagagcctctctacaatgctgtggtgtggcttgatctaagaacmcagtctaccgttgagagtcttagtaaaagaattccaggaaataataactttgtcaagtccaagacaggccttccacttagcacttacttcagtgcagtgaaacttcgytggctcctcgacaatgtgagaaaagttcaaaaggccgttgaagaaaaacgagctctttttgggactattgattcatggcttatttggagtttgacaggaggmgtcaatggaggtgtccactgtacagatgtaacaaatgcaagtaggactatgcttttcaacattcattctttggaatgggataaacaactctgygaattttttggaattccaatggaaattcttccacatgttcggagttcttctgagatctatggcctaatgaaagcgggggccttggaaggtgtrccaatatctgggtgttyaggggaccagtctgctgcaytggtgggacaaatgtgcttccagattggacaagccaaaaatacgtatggaacaggatgtttcttactatgtratacaggccataagtgtgtattttctgatcatggccttctcaccacagtggcttacaaacttggcagagacaaaccggtatattacgctttggaaggttctgtagctatagctggtgctgttattcgctggctaagagacaatcttggaattataaagacctcagaagaaattgaaaaacttgctaaagaagtaggtacttcttatggctgctacttcgtcccagcattttcggggttatatgcaccttattgggagcccagcgcaagagggataatctgtggactcactcaattcacgaataaatgccatattgcttttgctgcattaraagctgtttgtttccaaactcgagagattttggatgccaygaatcgagactgtggaattccactcagtcatttgcaggttgatggaggaatgaccagcaacaaaattcttatgcagctacaagcagacattctgtatattccagtagtgaagcccttgatgcccgaaaccactgcactgggtgctgccatggcggcaggggctgcagaaggagtcgacgtatggagtcttgaacctgaggatttgtccgccgtcacgatggagcggtttgaacctcagattaatgctgaggaaagtgaaattcgttattctacatggaagaaagctgtgatgaagtcaatgggttgggttacaactcaatctccagaaggtggtattccataaaacctaccaactcatggattcccaagatgcgagctttttacataatgaaagaacaacccagcaattgtctcttaatgcgatgacactattcatagactttgattttatttataagccacttgctgcgtgaccctccaagtagacctgtggcttaaaataaagaaaatgcagcaaaaagaatgctatagaaatatttggtgtgtgtgtgtgtgtgtgtgtgtgtgtgtgtgtgtgtttttaacatccacagttaaggttgggccagctacctttggggstgacccccyccattgccataacatcctgctccattccctctaagatgtacgaagaattcagatcctcaccattggaatcttccatcaaacatactcaaacactactggaacaggacttgagtctttgcatgacatatacttgattaaaaggttattactaacctgttaaaaatgagcagctcttcgcttttaacagataccccaaaagtcttcttttctacatagtagaagacggaaacacctttactgaatgtttgaatagaaatatctactaaattattaaaatagacatttagtgttctcatagcttggatatttttctgaaaagtatttgccaaaactgaaatccttccaatattttccatggtcccattaattataatgactttctgtctagatcttataggaaaggatactttcttttttcttccatctttcctttttatattttttactttgtatgtataacatatatgcctatatattttatacactgagggtagcccatttataaattaagagcacattatattcagaaggttctaacagggctggtcttaagtgaaccactatgtatatmaatatgttggaaaacagctgtatacatttttgggcaatggttatgcataatatctaccagaatttttttcttaaacagccaacatttaaaatttatgttttatgtccataaaagaaaatatrctttattgtgacttcaactatatttcttatcccttacatttttatttaattgtcttagcctaaaaaaagaagaaactgtggaatactacagtaaatactgttttcaaacacaagcaataattcaaatagttttcttttgaattaattttagacatattttggatcctattgaggggataagaggatgtcaaaaaagttaaatacctaagtagaaaaaaatatagaaataaagccaggaatctctttcagttcaaatgttatcaattgtgaataagaaattgctatctgggatgacaaaattatctctgcttagtatcttattataactgaaaaaaggtttatcattataaatgccttccaaggaaaccaagaatttctcaaaatatttaatgtcacatattataagaagtcacctaatctagcttcttaacgtcaatctttaaaaatatcttaaaattactttgttttgtaataaacagtgaaaaaa

SEQ ID NO: 1476 - DNA, 2061 bp, Homo sapiens
atggcaccagcagaaatcctgaacaggaaggagatctccgcacaaataagggcgagactgaagaatcaagtcactcagttgaaggacaagtacctgctgaaggctgctgaagagattgggatgaaagccactgacattaagttaccaagaacaaccacagaatctgaggtgatcaagtacatcatatctttgaatgaagactctactgtacacrgacaatacactgaaggagtgatcaatgctattgcacctgaaaaggatgtggatggattgactagcatcagtgctgggaaacttgctagaggtgacctaaatgactgtttcattccttgtatgcctaaaggatgcttggaactcatgaaagagacagggagcactgtagagagtgccaagcrtttcctggagaaatttaagccaggaaagtggatgattcagtataacaaccttaacctcaagacacctgttccaaaggtagaattatatggtgaaacaaaggccaaagttctgctgtcagcactagaacgcctgaagcaccagcctgttgggaaatatcaggtggtgactggaataactccaacacccctgggagaagggaaaagcacgactacaatcgggctggtgcaagcccttcttgcccatctttaccagaacttttttatgtgtgtgcgacagccttctcagggccccacctttggaataaaaggtggtgttgcaggaggcggctactcccaggtcattcctatggaagagtttaatcttcacctcacaggtgacatccatgccatcactgtatctaataaccttgttgctgcggctattgatgctcagatatttcatgaactgacccagacagacaaggctacctttactcatttggtgccatcagtaaatggagtgagaaagttctctgatatccacatacaaaggttaaacagactaggcattgacaagactgactctaccacactgacagatgaagagataaacagatttgcaagattggacattgatccagaaaccatagcttggcaaagagtgttgaataccaatgatagattcctgaggaagatcacgattggacaggctccaacgaagaaaagtcacacacagacggtccactttgatatctctgtggccagtgaaattatggctgtcctggctctcaccacttctctagaagacaggagagagagactgggcaaaatggtggtggcatccagtaagaaaggagaccccgtcagtgctgaagatctggggcttgttggcccagaagggtttgtagtgacggaggcgggatttggagcagacattggaatagaaaagtttcttaacatcaaatcccagtattccggtctccaccctcacgtggtggtgcttgttgccactgtcagcrctctaaagatgcacaggggtggccctatggtcactgctggaatgcctcttcccaaggcttacatagaggagaacctggagctggttgaaaaagkcttcagtaacttgaagaaacaaactgaaaatgccagaatgtttggaattccagtagtagtggccgtgaatgcattcaagayagatacagagactgagctggacctcatcggctgcctttccagagaacagagggcttttgatgccgtgaagtgcactcactggcagaagggggcaaggctcccagttgaggataaaatcaggatcattgcacagaagatctatggagcagacaacattgaattactcctcaaagctcaacacaaagctgaagtctacacaaagcagggctttgggaatctccccatctgcatggccaaaacacacttgtccttgtctcacaacccagagcgaaaaggtgtccctacaggattcattctgcccattcgcaacatccatgccarcatcggggctggttttctgtaccctttagtaggaacgatgagcacaatggactccccacccagccctgtttttatgatactgatttggaccctgaaacagaacagctcgccaggaaagtaccaatttgctttgccactagcattctatggtttatcaacccaagcaacgaag

SEQ ID NO: 1477 - DNA, 3075 bp, Homo sapiens
ctaagaactgaacaggatattggtggtgtccatcgtgggcagcagactaataaaggccatggcaccagcagaaatcctgaacaggaaggagatctccgcacaaataagggcgagactgaagaatcaagtcactcagttgaaggacaagtacctggtttcacaccaggcctggcaatattacaggttggcaacagagatgattccaatctttatataatgtgaagctgaaggctgctgaagagattgggatgaaagccactgacattaagttaccaagaacaaccacagaatctgaggtgatcaagtacatcatatctttgaatgaagactctactgtacacrggttcgtagtgcagctatctctagactcagacaatacactgaaggagtgatcaatgctattgcacctgaaaaggatgtggatggattgactagcatcagtgctgggaaacttgctagaggtgacctaaatgactgtttcattccttgtatgcctaaaggatgcttggaactcatgaaagagacaggggtgcagattgccagaaggcatgctgtggtggttgggtgcagtaaaatagtcagggccctgatgygtgacttgcttctgtggaacaatgccacagtgaccacctgccactccaagactgccaatctggatgaggaggtaaataaaggcgacatcctggtggttgcaactggtyggcctgaaatggttaaaggggaatggatcaaacctagcaatagtcatcaactgtggaatcaattatgtcccagatgataaaaaaaacaaatgggagaaaagttgtgggtgatgtggcatacgacgaggcccgttcctggtggcttagggctcatgacggttgcaatgctcatgcagagcactgtagagagtgccaagcrtttcctggagaaatttaagccaggaaagtggatgattcagtataacaaccttaacctcaagacacctgttccaagtgacattgatatatcacgatcttgtaaaccgaagcccattggtaagctggcttgagtaattggtctgctgtctgaagaggtagaattatatggtgaaacaaaggccaaagttctgctgtcagcactagaacgcctgaagcaccagcctgttgggaaatatcaggtggtgactggaataactccaacacccctgggagaagggaaaagcacgactacaatcgggctggtgcaagcccttcttgcccatctttaccagaacttttttatgtgtgtgcgacagccttctcagggccccacctttggaataaaaggtggtgttgcaggaggcggctactcccaggtcattcctatggaagagtttaatcttcacctcacaggtgacatccatgccatcactgtatctaataaccttgttgctgcggctattgatgctcagatatttcatgaactgacccagacagacaaggctacctttactcatttggtgccatcagtaaatggagtgagaaagttctctgatatccacatacaaaggttaaacagactaggcattgacaagactgactctaccacactgacagatgaagagataaacagatttgcaagattggacattgatccagaaaccatagcttggcaaagagtgttgaataccaatgatagattcctgaggaagatcacgattggacaggctccaacgaagaaaagtcacacacagacggtccactttgatatctctgtggccagtgaaattatggctgtcctggctctcaccacttctctagaagacaggagagagagactgggcaaaatggtggtggcatccagtaagaaaggagaccccgtcagtgctgaagatctgggggtgagtggtgcattgatagtgcttatgaaggacacaatcaagcccaatctcatgcagagattggagggcactccagtgtttgtccatgcaggcccatttgccawcatcgcacacggcaattcctctatcattgcagaccggatcacactctagcttgttggcccagaagggtttgtagtgacggaggcgggatttggagcagacattggaatagaaaagtttcttaacatcaaatcccagtattccggtctccaccctcacgtggtggtgcttgttgccactgtcagcrctctaaagatgcacaggggtggccctatggtcactgctggaatgcctcttcccaaggcttacatagaggagaacctggagctggttgaaaaagkcttcagtaacttgaagaaacaaactgaaaatgccagaatgtttggaattccagtagtagtggccgtgaatgcattcaagayagatacagagactgagctggacctcatcggctgcctttccagagaacagagggcttttgatgccgtgaagtgcactcactggcagaagggggcaagggtaccttagccctggctcaggctgtccagagagcaggacaagcacccagcagcttccaactcctttatgacctcaagctcccagttgaggataaaatcaggatcattgcacagaagatctatggagcagacaacattgaattactcctcaaagctcaacacaaagctgaagtctacacaaagcagggctttgggaatctccccatctgcatggccaaaacacacttgtccttgtctcacaacccagagcgaaaaggtgtccctacaggattcattctgcccattcgcaacatccatgccarcatcggggctggttttctgtaccctttagtaggaacgatgagcacaatggactccccacccagccctgtttttatgatactgatttggaccctgaaacagaacaggtgaatggatcattctaaacagatcatcatccatcttcaagaagctactttgaaaatctggccagtgtctattcaggcccactgggagttaggaagtataaggcagccaagagtcagcccctgcccagaagatctgaaactaatagtaggagttttcccggatgtcattttcagccttaattctcatcgtgtataaattaacataaatcatgcacatgtctatttacgttagtgacgttccacagaataaaaggaaatagttttgcca

SEQ ID NO: 1478 - DNA, 4239 bp, Homo sapiens
ggccactacccagagggctgccgccgcctctccaagttcttgtggcccccgcggtgcggagtatggggcgctgatggccatggagggctactggcgcttcctggcgctgctggggtcggcactgctcgtcggcttcctgtcggtgatcttcgccctcgtctgggtcctccactaccgagaggggcttggctgggatgggagcgcactagagtttaactggcacccagtgctcatggtcaccggcttcgtcttcatccagggcatcgccatcatcgtctacagactgccgtggacctggaaatgcagcaagctcctgatgaaatccatccatgcagggttaaatgcagttgctgccattcttgcaattatctctgtggtggccgtgtttgagaaccacaatgttaacaatatagccaatatgtacagtctgcacagctgggttggactgatagctgtcatatgctatttgttacagcttctttcaggtttttcagtctttctgcttccatgggctccgctttctctccgagcatttctcatgcccatacatgtttattctggaattgtcatctttggaacagtgattgcaacagcacttatgggattgacagagaaactgattttttccctgagagatcctgcatacagtacattcccgccagaaggtgttttcgtaaatacgcttggccttctgatcctggtgttcggggccctcattttttggatagtcaccagaccgcaatggaaacgtcctaaggagccaaattctaccattcttcatccaaatggaggcactgaacagggagcaagaggttccatgccagcctactctggcaacaacatggacaaatcagattcagagttaaacartgaagtagcagcaaggaaaagaaacttagctctggatgaggctgggcagagatctaccatgtaaaatgttgtagagatagagccatataacgtcacgtttcaaaactagctctacagttttgcttctcctattagccatatgataattgggctatgtagtatcaatatttactttaatcacaaaggatggtttcttgaaataatttgtattgattgaggcctatgaactgacctgaattggaaaggatgtgattaatataaataatagcagatataaattgtggttatgttacctttatcttgttgaggaccacaacattagcacggtgccttgtgcagaatagatactcaatatgtgaatatgtgtctaytagtagttaattggataaactggcagcatccctggcctgttgtcatgcagtcatttcctgttaattctgggagacaatgatttcacaactagmgggaagcagtcctaaaagtttaaaatccgataaggaatatctgggacagggtttagatcatgactctacacagataccatgatgagagtatattaaagaaatttaggaaagcacctggttcctttctccccatgcctgccttctgctccctccccagctggtttgggctcaaattgtccctggagactagggtttatgttagggtattgatagattagagcaggtggttgaagagatcttctctggtcagacttggaagaatttccaaaastgaagttagccccaagacttccctagggttgatgtactttatgatccagatgctaaacttcttagaatgaaaatatgcttcaacacttaagtagcatacactgccctacaaacctcagagagcacttttccccaagttcttgtttttatttttgaaagtactcacacagcacttactatgctccaaacactcctctaagcactttacacatattagctcattcagtccccagacagacgggatgaagtaggtattgttactgttcccattttacaggtgagagatttgaagcctggggaggctagtaactcaccccaaggtcacacggctcatacatggtgggactgagactcagatgcaggcagtctggcacctcagtctggattctaaccatttcactaagctatttttgtcttgtactactttgacccacccctgaataaacctcaattgctggagtggggtgtagttattaaagggatgctttttaccttttgctgtytgctgtggcagattccccagataaccaaggaaaaggggccacccatacctggaaataggccatagggcccctactactgccaacaagccatggcctaccttgacamttgtttgatcttaaaattgtgtcttggtaacaaaagatttggacaggcatatctgtagctttcaagttaattaattgcaatatttttttcttcaggattttagctgctgaacaactttcagtttggagctaaaagagacctgtctcatggtctgcccttccctggggcaatagctagggtctttcctgatttttatggaattttaggggatattttgaacttgggttctcagtagtgaattgagacttggaggtgacttttcatgtttggagtatcatctctgtctgggmtctgggctgacaaattaaaacytagagtagtgcttatgctgaaatgatacttttcattttttggttgatttttttgccttcccttcaattttaaactgaagcattttaatrtgggtagaaactctacaccaaatacactaaacattttggtgcttagtggatttctttttaggtaactggtacttacttccaaagactgaatacaagccacactccatcatatcccttaaacttcatgaaaaaccattcaagatccccttgctgcaacactgttctcttcttctctactaaattctatttccaaaattggtaatagagccagaaggatccccagtacccagccctctgcctggcacaaastggtagcacaattaaattcagtatgggtggagcatggtacagtcttggtgccatagaaggagtagttgcatagtcacacatcatttgataagttggatgttccattacatagaggaacacaaaattccagggtttttggaggaagggattagatagtgactaagccgccagaattgaggtggccattcctttttgtataggctaagaaacaggttatcagtgaaaagttaattatggctttggcactagaatagcactgttgcaaagtatttaagcaccccccatctcagccctttattttatctttcatgtgggctaatgrgaggataatcttacagatattataggaatttcttttctatctttatgaaaacaacgtatataaaatatatctagaaaacctttgtttgagactcttatttaatgggcttttgattctaatgataattgtacctttatctttcaaaagctgatatttcctacctaagcatctcccgagaaaaatatctcattaaaaagcccataaataataggggagaagaaagccttaggtatcaattccaaaacagtgattgaaatttcccaaaataattatggcttctgtcatctccagagataatctggcttggtttaccccataatctaatttcagaaaagaaagctttattttaacactcatctgaatcaacattaaagccttttctctcaaagcgtttattgagaaactcaaatgaatatactttttgaattactgtcatcaaaagtgtacggcttcctgtgctgcttgtgtcaaatggaacctgccctctaaagcactttctttcctttacttgcgtggtttcatgtaagctgtgctgtttagaaacaacatctcagactttacaaagaaatgacaaagaaggcaattgcactttttaagggatatcgacaagcagtttctgttttctaaaggacaaaatacagagtgtgtgtcatttttaattagattctttcccctgctgagttggaaattccagtgcagcactgattgaccacagttgccaatctaaaagcacaaagacagaagtaaagctttatgctaattttatttcaatatgatagaaaatttatcttggtatgtccttttttagataactccagcaggaaactgtaactgctatgtctttaggaaaatgtagaagaaagaacattattrttctttaattcctacaaggtactygaaaaccttaagtgaaaaagatttctatctttttatcttagygcatttatggaaaaaatattaactrtcctgaatattttataattttgtaggaaaaatatgcatctattttttcttgacttcttttatatagtaataaaagttattttggaagctc

SEQ ID NO: 1479 - DNA, 817 bp, Homo sapiens
tcttgagctaggaaaggattactcgagccttgttagaatcagacatggcttcaggggatgcaggacgctcccctgagctgcctgtcaccgactaagtggagcagtgtttctyccgcagactcaactgagaagtcagcctctgcggcaggcaccaggaatctgccttttcagttctgtctccggcaggctttgaggatgaaggctgcgggcattctgaccctcattggctgcctggtcacaggcgccgagtccaaaatctacactcgttgcaaactggcaaaaatattctcgagggctggcctggacaattactggggcttcagccttggaaactggatctgcatggcgtattatgagagcggctacaacaccacagcccagacggtcctggatgacggcagcatcgactacggcatcttccagatcaacagcttcgcgtggtgcagacgcggaaagctgaaggagaacaaccactgccacgtcgcctgctcagccttggtcactgatgacctcacagatgcgattatctgtgccaagaaaattgttaaagagacacaaggaatgaaytattggcaaggctggaagaaacactgtgaggggagagacctgtccgastggaaaaaagrctgtgaggtttcctaaactggaactggacccaggatgctttgcagcaacgccctagggtttgcagtgaatgtccaaatgcctgtgtcatcttgtcccgtttcctcccaatattccttctcaaacttggagagggaaaattaagctatacttttaagaaaataaatatttccatttaaatgtcttcaccctg

SEQ ID NO: 1480 - DNA, 3487 bp, Homo sapiens
ggctaaagccaatttttaggttggcttgggcagaaaagtgaaaagagaatgctccactttaaccgatgtcatcatctgaaaaagataacacagaaatgtttttctagtatacatgttaaaacggataaacatgcacagcgatttctttcaagaacctttgcacttgcggaattgaggaagtcatggtattcaacccactctcttgttggagacaaaaatattatcctgatgggacctcctggtgctgggaaaacaacagtaggcagaataataggtcagaaactaggttgttgtgtcatagatgtggatgatgatatccttgaaaaaacctggaatatgagtgtgtctgaaaaattacaggatgttggtaatgagcaatttttagaagaggaaggaaaagctgtgttaaacttctctgcatctggaagtgtgmtttcccttactgggtccaatccaatgcatgatgctagcatgtggcatctgaagaaaaatggaataattgtataccyggatgtacctctactagatctaatttgtcgtctaaaattaatgaagacagataggattgtaggtcagaattctggracatctatgaaagacttacttaaatttagaagacagtattataagaagtggtatgatgctcgtgttttctgtgaaagtggggcttccccagaggaggtagctgacaaagtgctgaatgcaattaaaagataccaagatgtggactcggaaacattcatttcaacaagacacgtttggcctgaagactgtgaacagaaggtttcagmaaaattctttagtgaagctgtaattgaggggttggcttctgatggtggcctctttgttcctgcaaaggagtttccaaaattaagctgcggggagtggaaaagcctagtaggagcaacctacgtagaaagagcacagatactgttggaaagatgtatccatcctgcagacatacctgctgccaggttgggagaaatgattgaaactgcttatggggaaaactttgcctgctcaaaaattgctcctgtcaggcacctttcaggcaaccagttcatcctggagttgtttcatggaccaacaggatcatttaaagatttgtctttacagcttatgcctcatatttttgcacactgtatcccaccaagttgcaattatatgatacttgtagctacttcaggagacacagggagtgcagtcttaaatggttttagtcgtctaaataagaatgataagcaaaggatagctgtggttgcrttttttcctgagaatggagtaagtgattttcaaaaagcacaaataattggcagtcagagagaaaatggatgggcagtgggtgttgagtcagattttgatttttgccagacagctataaaaagaatttttaatgattctgattttactggctttcttactgtggaatatggaacaatcttaagttcggctaactccataaactggggccgactacttccgcaggtagtttatcatgcttccgcatatcttgatcttgttagtcaaggatttatttcttttggaagcccagtcgatgtctgtattcccacaggaaactttggtaacattttagcagcagtgtatgccaaaatgatgggaatcccgattcgaaaatttatctgtgcctctaatcagaaccatgttttgactgattttataaaaacaggacattatgatctaagggaaagaaaaytagcacaaaccttttcaccgtcaatagatattctcaaatcttcaaacctagaacgacatttacacttgatggctaataaagatggacagctaatgacagaattatttaatcgattagaaagtcagcatcatttccagatagaaaaggctctagttgagaaacttcagcaggattttgtagctgactggtgctctgagggagagtgcctagcagctattaactccacctataatacttcagggtatattttggatccacacactgctgttgcaaaagtggttgcagatagggtgcaagacaaaacttgccctgtgattatctcatctacagcccattactcaaagtttgcacctgctatcatgcaggctttaaagattaaagaaatcaatgagacttcatcaagtcagctctatttgctgggttcatacaatgcattacctccactgcatgaggctttattagagagaacaaaacagcaagagaagatggagtaccaggtctgtgcagctgatatgaatgtcttgaagagtcatgtggaacaacttgtccaaaatcaattcatatgaaagctttcagagtaaatttttttttctagctataagcatgcaataataaatctcaaacactgatttggagtacagtagcattttgtcttttatgtaaatatctctatatctgtttggaatttcaaaagtctgatctctagggctgacatgagamctccatgtcacctcctcagatctttaatctggaagtgacaaaaggtaacacagtgcacggacctttgagctatcatacttttgccttctgctcatgaggggtgtatcaatttccactcccacaccctcactgttatgtggaccaaaatgtctggtatactatttggcgattaaaatatttaagcccagttttcaggtactacatctgtaactagtgaatactctgttgattagaaagttaatttaccactcaaaatggctaacttgaatggaggaagtagtaaactcttctattaggatttgggccagtgttttttgtttgttttttggtgcagtttcagctcactgcaacctccgcctcccaggttcaagtgattctcctgcctcagcctcccaggtagctgggattacaggcatgcaacaccacacatggctaatttttttatttttaatagagatgaggtttcgccatgttttccaggctgatcttgaacctctgacctcaggtgatccatccacctcggcctcccaaagtgctaggattacaggcgtgagcctctgcacctggctagggccagtgtttttaaccctcctcaaattccattttggactacaactaatgtgtatctcacactgtccaaattaaagatgtactctgtccttcactctcctttggatgtgtacggttagggtgacgatgtttgaaaatcaacacataactgaaatccaggatgaaacagtaagcagaactacttagaagtgaatacagaaatgatctatttcaagaggaaggttttccaaaattaagagtacttgagtagtctcaataggagtgtatttgtagacagcagtttccctatattatttggagtcaattcttacgtaatttgttgtttatttcttcagtgaacattgtctttttctggcagctgaaactgcacacaactgatacacatatttaatttgtattcctttgtagtaatacattttaaccatgatttatgtttgtgaatttactggatgttttctttctgaattaaagattgtcaagacc

SEQ ID NO: 1481 - DNA, 3733 bp, Homo sapiens
ggagcggaggcacgctggccgccgcaggcacaggcgcagagtccactgcgcgggggcgggaccggggagctagctgcagactccacgttttgcaaagatcggttttgcctcagagycaacaaactcttcagattggttccggtgtgtcctatgtttacaagtcagtggaaattaagcacaacacatataaattgaaaagtcaaataaggaaatgaattacctcccttgacggctctaattttacttggctaaagccaatttttaggttggcttgggcagaaaagtgaaaagagaatgctccactttaaccgatgtcatcatctgaaaaagataacacagaaatgtttttctagtatacatgttaaaacggataaacatgcacagcgatttctttcaagaacctttgcacttgcggaattgaggaagtcatggtattcaacccactctcttgttggagacaaaaatattatcctgatgggacctcctggtgctgggaaaacaacagtaggcagaataataggtcagaaactaggttgttgtgtcatagatgtggatgatgatatccttgaaaaaacctggaatatgagtgtgtctgaaaaattacaggatgttggtaatgagcaatttttagaagaggaaggaaaagctgtgttaaacttctctgcatctggaagtgtgmtttcccttactgggtccaatccaatgcatgatgctagcatgtggcatctgaagaaaaatggaataattgtataccyggatgtacctctactagatctaatttgtcgtctaaaattaatgaagacagataggattgtaggtcagaattctggracatctatgaaagacttacttaaatttagaagacagtattataagaagtggtatgatgctcgtgttttctgtgaaagtggggcttccccagaggaggtagctgacaaagtgctgaatgcaattaaaagataccaagatgtggactcggaaacattcatttcaacaagacacgtttggcctgaagactgtgaacagaaggtttcagmaaaattctttagtgaagctgtaattgaggggttggcttctgatggtggcctctttgttcctgcaaaggagtttccaaaattaagctgcggggagtggaaaagcctagtaggagcaacctacgtagaaagagcacagatactgttggaaagatgtatccatcctgcagacatacctgctgccaggttgggagaaatgattgaaactgcttatggggaaaactttgcctgctcaaaaattgctcctgtcaggcacctttcaggcaaccagttcatcctggagttgtttcatggaccaacaggatcatttaaagatttgtctttacagcttatgcctcatatttttgcacactgtatcccaccaagttgcaattatatgatacttgtagctacttcaggagacacagggagtgcagtcttaaatggttttagtcgtctaaataagaatgataagcaaaggatagctgtggttgcrttttttcctgagaatggagtaagtgattttcaaaaagcacaaataattggcagtcagagagaaaatggatgggcagtgggtgttgagtcagattttgatttttgccagacagctataaaaagaatttttaatgattctgattttactggctttcttactgtggaatatggaacaatcttaagttcggctaactccataaactggggccgactacttccgcaggtagtttatcatgcttccgcatatcttgatcttgttagtcaaggatttatttcttttggaagcccagtcgatgtctgtattcccacaggaaactttggtaacattttagcagcagtgtatgccaaaatgatgggaatcccgattcgaaaatttatctgtgcctctaatcagaaccatgttttgactgattttataaaaacaggacattatgatctaagggaaagaaaaytagcacaaaccttttcaccgtcaatagatattctcaaatcttcaaacctagaacgacatttacacttgatggctaataaagatggacagctaatgacagaattatttaatcgattagaaagtcagcatcatttccagatagaaaaggctctagttgagaaacttcagcaggattttgtagctgactggtgctctgagggagagtgcctagcagctattaactccacctataatacttcagggtatattttggatccacacactgctgttgcaaaagtggttgcagatagggtgcaagacaaaacttgccctgtgattatctcatctacagcccattactcaaagtttgcacctgctatcatgcaggctttaaagattaaagaaatcaatgagacttcatcaagtcagctctatttgctgggttcatacaatgcattacctccactgcatgaggctttattagagagaacaaaacagcaagagaagatggagtaccaggtctgtgcagctgatatgaatgtcttgaagagtcatgtggaacaacttgtccaaaatcaattcatatgaaagctttcagagtaaatttttttttctagctataagcatgcaataataaatctcaaacactgatttggagtacagtagcattttgtcttttatgtaaatatctctatatctgtttggaatttcaaaagtctgatctctagggctgacatgagamctccatgtcacctcctcagatctttaatctggaagtgacaaaaggtaacacagtgcacggacctttgagctatcatacttttgccttctgctcatgaggggtgtatcaatttccactcccacaccctcactgttatgtggaccaaaatgtctggtatactatttggcgattaaaatatttaagcccagttttcaggtactacatctgtaactagtgaatactctgttgattagaaagttaatttaccactcaaaatggctaacttgaatggaggaagtagtaaactcttctattaggatttgggccagtgttttttgtttgttttttggtgcagtttcagctcactgcaacctccgcctcccaggttcaagtgattctcctgcctcagcctcccaggtagctgggattacaggcatgcaacaccacacatggctaatttttttatttttaatagagatgaggtttcgccatgttttccaggctgatcttgaacctctgacctcaggtgatccatccacctcggcctcccaaagtgctaggattacaggcgtgagcctctgcacctggctagggccagtgtttttaaccctcctcaaattccattttggactacaactaatgtgtatctcacactgtccaaattaaagatgtactctgtccttcactctcctttggatgtgtacggttagggtgacgatgtttgaaaatcaacacataactgaaatccaggatgaaacagtaagcagaactacttagaagtgaatacagaaatgatctatttcaagaggaaggttttccaaaattaagagtacttgagtagtctcaataggagtgtatttgtagacagcagtttccctatattatttggagtcaattcttacgtaatttgttgtttatttcttcagtgaacattgtctttttctggcagctgaaactgcacacaactgatacacatatttaatttgtattcctttgtagtaatacattttaaccatgatttatgtttgtgaatttactggatgttttctttctgaattaaagattgtcaagacc

SEQ ID NO: 1482 - DNA, 3672 bp, Homo sapiens
cgtggacactgctcccccatttcctttcatttcccccgtcttctcagtgagatttccttgactccacgttttgcaaagatcggttttgcctcagagycaacaaactcttcagattggttccggtgtgtcctatgtttacaagtcagtggaaattaagcacaacacatataaattgaaaagtcaaataaggaaatgaattacctcccttgacggctctaattttacttaatgctccactttaaccgatgtcatcatctgaaaaagataacacagaaatgtttttctagtatacatgttaaaacggataaacatgcacagcgatttctttcaagaacctttgcacttgcggaattgaggaagtcatggtattcaacccactctcttgttggagacaaaaatattatcctgatgggacctcctggtgctgggaaaacaacagtaggcagaataataggtcagaaactaggttgttgtgtcatagatgtggatgatgatatccttgaaaaaacctggaatatgagtgtgtctgaaaaattacaggatgttggtaatgagcaatttttagaagaggaaggaaaagctgtgttaaacttctctgcatctggaagtgtgmtttcccttactgggtccaatccaatgcatgatgctagcatgtggcatctgaagaaaaatggaataattgtataccyggatgtacctctactagatctaatttgtcgtctaaaattaatgaagacagataggattgtaggtcagaattctggracatctatgaaagacttacttaaatttagaagacagtattataagaagtggtatgatgctcgtgttttctgtgaaagtggggcttccccagaggaggtagctgacaaagtgctgaatgcaattaaaagataccaagatgtggactcggaaacattcatttcaacaagacacgtttggcctgaagactgtgaacagaaggtttcagmaaaattctttagtgaagctgtaattgaggggttggcttctgatggtggcctctttgttcctgcaaaggagtttccaaaattaagctgcggggagtggaaaagcctagtaggagcaacctacgtagaaagagcacagatactgttggaaagatgtatccatcctgcagacatacctgctgccaggttgggagaaatgattgaaactgcttatggggaaaactttgcctgctcaaaaattgctcctgtcaggcacctttcaggcaaccagttcatcctggagttgtttcatggaccaacaggatcatttaaagatttgtctttacagcttatgcctcatatttttgcacactgtatcccaccaagttgcaattatatgatacttgtagctacttcaggagacacagggagtgcagtcttaaatggttttagtcgtctaaataagaatgataagcaaaggatagctgtggttgcrttttttcctgagaatggagtaagtgattttcaaaaagcacaaataattggcagtcagagagaaaatggatgggcagtgggtgttgagtcagattttgatttttgccagacagctataaaaagaatttttaatgattctgattttactggctttcttactgtggaatatggaacaatcttaagttcggctaactccataaactggggccgactacttccgcaggtagtttatcatgcttccgcatatcttgatcttgttagtcaaggatttatttcttttggaagcccagtcgatgtctgtattcccacaggaaactttggtaacattttagcagcagtgtatgccaaaatgatgggaatcccgattcgaaaatttatctgtgcctctaatcagaaccatgttttgactgattttataaaaacaggacattatgatctaagggaaagaaaaytagcacaaaccttttcaccgtcaatagatattctcaaatcttcaaacctagaacgacatttacacttgatggctaataaagatggacagctaatgacagaattatttaatcgattagaaagtcagcatcatttccagatagaaaaggctctagttgagaaacttcagcaggattttgtagctgactggtgctctgagggagagtgcctagcagctattaactccacctataatacttcagggtatattttggatccacacactgctgttgcaaaagtggttgcagatagggtgcaagacaaaacttgccctgtgattatctcatctacagcccattactcaaagtttgcacctgctatcatgcaggctttaaagattaaagaaatcaatgagacttcatcaagtcagctctatttgctgggttcatacaatgcattacctccactgcatgaggctttattagagagaacaaaacagcaagagaagatggagtaccaggtctgtgcagctgatatgaatgtcttgaagagtcatgtggaacaacttgtccaaaatcaattcatatgaaagctttcagagtaaatttttttttctagctataagcatgcaataataaatctcaaacactgatttggagtacagtagcattttgtcttttatgtaaatatctctatatctgtttggaatttcaaaagtctgatctctagggctgacatgagamctccatgtcacctcctcagatctttaatctggaagtgacaaaaggtaacacagtgcacggacctttgagctatcatacttttgccttctgctcatgaggggtgtatcaatttccactcccacaccctcactgttatgtggaccaaaatgtctggtatactatttggcgattaaaatatttaagcccagttttcaggtactacatctgtaactagtgaatactctgttgattagaaagttaatttaccactcaaaatggctaacttgaatggaggaagtagtaaactcttctattaggatttgggccagtgttttttgtttgttttttggtgcagtttcagctcactgcaacctccgcctcccaggttcaagtgattctcctgcctcagcctcccaggtagctgggattacaggcatgcaacaccacacatggctaatttttttatttttaatagagatgaggtttcgccatgttttccaggctgatcttgaacctctgacctcaggtgatccatccacctcggcctcccaaagtgctaggattacaggcgtgagcctctgcacctggctagggccagtgtttttaaccctcctcaaattccattttggactacaactaatgtgtatctcacactgtccaaattaaagatgtactctgtccttcactctcctttggatgtgtacggttagggtgacgatgtttgaaaatcaacacataactgaaatccaggatgaaacagtaagcagaactacttagaagtgaatacagaaatgatctatttcaagaggaaggttttccaaaattaagagtacttgagtagtctcaataggagtgtatttgtagacagcagtttccctatattatttggagtcaattcttacgtaatttgttgtttatttcttcagtgaacattgtctttttctggcagctgaaactgcacacaactgatacacatatttaatttgtattcctttgtagtaatacattttaaccatgatttatgtttgtgaatttactggatgttttctttctgaattaaagattgtcaagaccaatta

SEQ ID NO: 1483 - DNA, 1832 bp, Homo sapiens
cgacggcgccttcgcgaaacactatgctaatggcatggtgccgcggtcctgtcttgctgtgcctgcggcaggggctcggaaccaattcattcctgcacggcctggggcaggagcccttcgagggagctcggtcactgtgttgcaggtcctcgcctagagacctgcgagatggagaaagagagcacgaggcggcacaaaggaaagccccaggagcagagtcttgcccatctctccctctgagcatctcggacattgggactggatgtctttcgtcactggaaaacctcagactgccgacgctgcgggaagagtcatcmcctcgagagctcgaggactcgagcggagaccagggccggtgcggtcccacacaccagggatccgaggatccttcgatgctctcgcaggcccagtccgctaccgaggtcgaagagcgtcacgtctccccttcttgttcaacttccagagagagaccctttcaggctggggarctgattttagctgagactggggagggagaaacaaaatttaagaaattatttaggttgaacaacttcggactcttaaatagtaactggggggcagtcccgttcggcaagatcgtggggaagttccccggccagatactgaggagttccttcggtaagcagtacatgctgaggaggccagccttggaagactatgtagtattgatgaaaagagggactgccataacattcccaaaggatattaatatgattctctcaatgatggatatcaacccaggtgatactgttttggaagctggctcaggctctggtggaatgagcttatttttatccaaagcagttggatcacaaggacgagtcataagttttgaggtacgaaaagaccaccatgatctggctaagaagaattacaaacaytggcgtgattcatggaaattaagtcatgtagaagagtggccagacaatgtggattttattcataaggacatttcaggagcaaccgaagacataaaatctttaacatttgacgcagtagctttggatatgttaaatcctcatgttactttgcctgttttttacccacatcttaagcatggtggtgtatgtgctgtatatgtagtaaacatcacacaggttattgaacttttagatggaattcgcacctgtgaacttgctctttcatgtgaaaagataagcgaggtcattgtcagagattggttggtttgccttgcaaaacagaaaaatggaattttagctcaaaaagtagaatctaaaatcaacacagatgtacaactagattctcaagagaaaattggagttaaaggtgagctgtttcaagaggatgaccatgaagaatcgcattctgattttccrtatggatcatttccctatgttgctagaccagtacactggcaacctggtcatacagcttttcttgtcaagttgaggaaggtcaaaccacaacttaactgagtactccagatgacagtaactgactwgaagatggaaaaatatcaaaatagaactttatattgaaaatcactgcttccatagattggcatttttagctattactatgacttatataacttatacatataattttgaaaataacaactaaaagatgtataacatagcaaaactgcttaaacatcccattttgacacttgtcttgcagttagtttgacattttgtagttaatgattccaaattggtttagttgggccatctcattcttcacttcctgtaaaccactccatagatttgtctttcttcaagaaattagttttctttcctttatttgattgatggtcattgactactgaaataaaatatgcattttaagat

SEQ ID NO: 1484 - DNA, 1622 bp, Homo sapiens
atgctaatggcatggtgccgcggtcctgtcttgctgtgcctgcggcaggggctcggaaccaattcattcctgcacggcctggggcaggagcccttcgagggagctcggtcactgtgttgcaggtcctcgcctagagacctgcgagatggagaaagagagcacgaggcggcacaaaggaaagccccaggagcagagcccagtccgctaccgaggtcgaagagcgtcacgtctccccttcttgttcaacttccagagagagaccctttcaggctggggarctgattttagctgagactggggagggagaaacaaaatttaagaaattatttaggttgaacaacttcggactcttaaatagtaactggggggcagtcccgttcggcaagatcgtggggaagttccccggccagatactgaggagttccttcggtaagcagtacatgctgaggaggccagccttggaagactatgtagtattgatgaaaagagggactgccataacattcccaaaggatattaatatgattctctcaatgatggatatcaacccaggtgatactgttttggaagctggctcaggctctggtggaatgagcttatttttatccaaagcagttggatcacaaggacgagtcataagttttgaggtacgaaaagaccaccatgatctggctaagaagaattacaaacaytggcgtgattcatggaaattaagtcatgtagaagagtggccagacaatgtggattttattcataaggacatttcaggagcaaccgaagacataaaatctttaacatttgacgcagtagctttggatatgttaaatcctcatgttactttgcctgttttttacccacatcttaagcatggtggtgtatgtgctgtatatgtagtaaacatcacacaggttattgaacttttagatggaattcgcacctgtgaacttgctctttcatgtgaaaagataagcgaggtcattgtcagagattggttggtttgccttgcaaaacagaaaaatggaattttagctcaaaaagtagaatctaaaatcaacacagatgtacaactagattctcaagagaaaattggagttaaaggtgagctgtttcaagaggatgaccatgaagaatcgcattctgattttccrtatggatcatttccctatgttgctagaccagtacactggcaacctggtcatacagcttttcttgtcaagttgaggaaggtcaaaccacaacttaactgagtactccagatgacagtaactgactwgaagatggaaaaatatcaaaatagaactttatattgaaaatcactgcttccatagattggcatttttagctattactatgacttatataacttatacatataattttgaaaataacaactaaaagatgtataacatagcaaaactgcttaaacatcccattttgacacttgtcttgcagttagtttgacattttgtagttaatgattccaaattggtttagttgggccatctcattcttcacttcctgtaaaccactccatagatttgtctttcttcaagaaattagttttctttcctttatttgattgatggtcattgactactgaaataaaatatgcattttaagat

SEQ ID NO: 1485 - DNA, 2035 bp, Homo sapiens
ccctcagctgccttcgcggcgacgacacacgcgctccccgcagcgggctctgggctgagggacctggcgagggaggcagtggccgcgcagtccttccttcagaagggaaatttctgagggtcaggaaggggaatctgtacctcactccttgaacaccaaggaaggaatattgggaaaccaaaatgaggcacaatcagatgtgttgtgagacaccacctactgtcactgtttatgtaaaatcagggtcaaatagatcacatcagcctaaaaagcccattactctgaagcgtcctatttgtaaagataattggcaagcatttgaaaaaaatacacataataacaacaaatctaaacgccccaaaggaccttgtctggttatacagcgtcaggatatgactgctttctttaaattatttgatgacgatttaattcaagatttcttgtggatggactgctgctgtaaaattgcagacaagtatcttttggctatgacctttgtttatttcaagagggctaaatttactataagtgagcataccaggataaatttctttattgctctgtatctggctaatacagttgaagaagatgaagaagaaaccaagtacgaaatttttccatgggctttagggaaaaactggagaaaattgttccctaatttcttaaagttaagggaccagctctgggatagaattgactatagggctattgtaagcaggcgatgttgtgaggaggttatggccattgcaccaacccattatatctggcaaagagaacgttctgttcatcacagtggagctgtcagaaactacaacagagatgaagttcagctgccccggggacctagtgccacaccagtagattgttcactctgtggtaaaaaaagaagatatgttagactgggattgtcttcatcatcatctttatccagtcatacagcaggggtgacagaaaaacattctcaggactcatacaactcactgtcaatggacataataggtgatccttctcaagcttatactggttctgaagtagtcaatgaccatcaatcaaataaaggaaagaaaactaatttcttgaagaaagacaaatctatggagtggtttacaggaagtgaagaatgagatggcccaactaaaccaatttggaatcattaactacaaaatgtcaaactaactgcaagacaagtgtcaaaatgggatgtttaagcagttttgctatgttatacatcttttagttgttattttcaaaattatatgtataagttatataagtcatagtaatagctaaaaatgccaatctatggaagcagtgattttcaatataaagttctattttgatatttttccatcttcwagtcagttactgtcatctggagtactcagttaagttgtggtttgaccttcctcaacttgacaagaaaagctaatttaagagaagaaaaacataaagtcattatattaattaaaagaaaaaacaccatttaatatgttctgaaaacattactcacctgtatgaccaggttgccagtgtactggtctagcaacatagggaaatgatccatayggaaaatcagaatgcgattcttctgttgtaaaaaaatatatgtactataagctacataaaatattttctatytttttcacaaaactgttaaaatatgagttactctctttattgtaagttttttctttatttatttccttgcatatgttttagagctactctgccagttattatacagaaactatttgtcaatgattatgtaataaacatatgatttyataaccaaatggataagcctatatcataaatcaactgatacttgaaaacttgttcatggcctaaataatgtgtatatatgacaaagacctaaactcagttctttcaagaattccagcagcatcttagaagttgctttttggaatattagctatttgcctatcaggtcccattaataatcagtgatctaaatataaaacatccttaatacatttaaattatttcacaaaccaagctccttgtgacaagtaaa

SEQ ID NO: 1486 - DNA, 2639 bp, Homo sapiens
gtggcgggcatcccgagtgcaccgctcccgccccgccccgccttgccccaacccacgatggtctgggagctgcgcccagggcttggcgctggcggccccgcaacagcaccgagygtttcggtcggcgggcggcggtagcgccccctctcagagccccgctcactcccacctgggctcgctccgagtcggcctgtctgtcgggcccgccctccccgctcactccctccgccctcgtgctcctcccggggtgcttggcacagcctcggattcctccctctcgctgctcgagtcagtttccctatcggcggcagcgggcaaggcggcggcggcggcggcggcagccgcggtggcggcgtggggaacatctcggcagccaccgcgcttctcccgctggagcgggcgtccagcttggctgccctcggtccttccctgccacgtttcgggtcgccctgcaccccccacccaggctcgcttctcttcgaagcgggaagggcgccttgcaggatcctgccgcccctccaaccggatcctggktctagagctccccagagcgaggcgctcgccaggactcctgccccgccaaccctgaccgccggggggtgcccccgggacgtagcgccgcggagaggaagcggcaaaggggaccatgcggcgcctgactcgtcggctggttctgccagtcttcggggtgctctggatcacggtgctgctgttcttctgggtaaccaagaggaagttggaggtgccgacgggacctgaagtgcagacccctaagccttcggacgctgactgggacgacctgtgggaccagtttgatgagcggcggtatctgaatgccaaaaagtggcgcgttggtgacgacccctataagctgtatgctttcaaccagcgggagagtgagcggatctccagcaatcgggccatcccggacactcgccatctgagtgtattaaaccgcacccctacgcatctgatccgggaaatcatattagtggatgacttcagcaatgaccctgatgactgtaaacagctcatcaarttgcccaaggtgaaatgcttgcgcaataatgaacggcaaggtctggtccggtcccggattcggggcgctgacatcgcccagggcaccactctgactttcctcgacagccactgtgaggtgaacagggactggctccagcctctgttgcacagggtcaaagaggactacacgcgggtggtgtgccctgtgatcgatatcattaacctggacaccttcacctacatcgagtctgcctcggagctcagaggggggtttgactggagcctccacttccagtgggagcagctctccccagagcagaaggctcggcgcctggaccccacggagcccatcaggactcctatcatagctggagggctcttcgtgatcgacaaagcttggtttgattacctggggaaatatgatatggacatggacatctggggtggggagaactttgaaatctccttccgagtgtggatgtgcgggggcagcctagagatcgtcccctgcagccgagtggggcacgtsttccggaagaagcacccctacgttttccctgatggaaatgccaacacgtatataaagaacaccaagcggacagctgaagtgtggatggatgaatacaagcaatactattacgctgcccggccattcgccctggagaggcccttcggraatgttgagagcagattggacctgaggaagaatctgcgctgccagagcttcaagtggtacctggagaatatctaccctgaactcagcatccccaaggagtyctccatccagaagggcaatatccgacagagayagaagtgcctggaatctcaaaggcagaacaaccaagaaaccccaaacctaaagttgagcccctgtgccaaggtcaaaggcgaagatgcaaagtcccaggtatgggccttcacatacacccagmagatcctccaggaggagctgtgcctgtcagtcatcaccttgttccctggcgccccagtggttcttgtcctttgcaagaatggagatgacmgacagcaatggaccaaaactggttcccacatcgagcacatagcatcccacctctgcctcgatacagatatgttcggtgatggcaccgagaacggcaaggaaatcgtcgtcaacccatgtgagtcctcactcatgagccagcactgggacatggtgagctcttgaggacmcctgccagaagcagcaagggccatggggtggtgcttccctggaccagaacagactggaaactgggcagcaagcagcctgcaaccacctcagacatcctggactgggaggtggaggcagagccccccaggacaggagcaactgtctcagggaggacagaggaaaacatcacaagccaatggggctcaaagacaaatcccacatgttctcaaggccgttaagttccagtcctggccagtcattccctgattggtatctggagacagaaacctaatgggaagtgtttattgttccttttcctacaaaggaagcagtctctggaggccagaaagaaaagccttctttttcactaggccaggactacattgagagatgaagaatggaggttgtttccaaaagaaataaagagaaacttagaagttgtctctgg

SEQ ID NO: 1487 - DNA, 2753 bp, Homo sapiens
gtggcgggcatcccgagtgcaccgctcccgccccgccccgccttgccccaacccacgatggtctgggagctgcgcccagggcttggcgctggcggccccgcaacagcaccgagygtttcggtcggcgggcggcggtagcgccccctctcagagccccgctcactcccacctgggctcgctccgagtcggcctgtctgtcgggcccgccctccccgctcactccctccgccctcgtgctcctcccggggtgcttggcacagcctcggattcctccctctcgctgctcgagtcagtttccctatcggcggcagcgggcaaggcggcggcggcggcggcggcagccgcggtggcggcgtggggaacatctcggcagccaccgcgcttctcccgctggagcgggcgtccagcttggctgccctcggtccttccctgccacgtttcgggtcgccctgcaccccccacccaggctcgcttctcttcgaagcgggaagggcgccttgcaggatcctgccgcccctccaaccggatcctggktctagagctccccagagcgaggcgctcgccaggactcctgccccgccaaccctgaccgccggggggtgcccccgggacgtagcgccgcggagaggaagcggcaaaggggaccatgcggcgcctgactcgtcggctggttctgccagtcttcggggtgctctggatcacggtgctgctgttcttctgggtaaccaagaggaagttggaggtgccgacgggacctgaagtgcagacccctaaggtttggtccttgtttttcaaggtggctgggatgagcccttgggcgcctcaggtgcctgtatcacccactcctccctaccaaagagggcatcttcctacaggaggacaccttgctgtatgtcatttcccatgtctcttgcaagaagctcagttccatttgcagactcaggtctttcttcaagtcagatgcacactgctggtgtattgcacrgaccttccacccactagcatcatcatcaccttccacaacgaggcccgctccacgctgctcaggaccatccgcagtgtattaaaccgcacccctacgcatctgatccgggaaatcatattagtggatgacttcagcaatgaccctgatgactgtaaacagctcatcaarttgcccaaggtgaaatgcttgcgcaataatgaacggcaaggtctggtccggtcccggattcggggcgctgacatcgcccagggcaccactctgactttcctcgacagccactgtgaggtgaacagggactggctccagcctctgttgcacagggtcaaagaggactacacgcgggtggtgtgccctgtgatcgatatcattaacctggacaccttcacctacatcgagtctgcctcggagctcagaggggggtttgactggagcctccacttccagtgggagcagctctccccagagcagaaggctcggcgcctggaccccacggagcccatcaggactcctatcatagctggagggctcttcgtgatcgacaaagcttggtttgattacctggggaaatatgatatggacatggacatctggggtggggagaactttgaaatctccttccgagtgtggatgtgcgggggcagcctagagatcgtcccctgcagccgagtggggcacgtsttccggaagaagcacccctacgttttccctgatggaaatgccaacacgtatataaagaacaccaagcggacagctgaagtgtggatggatgaatacaagcaatactattacgctgcccggccattcgccctggagaggcccttcggraatgttgagagcagattggacctgaggaagaatctgcgctgccagagcttcaagtggtacctggagaatatctaccctgaactcagcatccccaaggagtyctccatccagaagggcaatatccgacagagayagaagtgcctggaatctcaaaggcagaacaaccaagaaaccccaaacctaaagttgagcccctgtgccaaggtcaaaggcgaagatgcaaagtcccaggtatgggccttcacatacacccagmagatcctccaggaggagctgtgcctgtcagtcatcaccttgttccctggcgccccagtggttcttgtcctttgcaagaatggagatgacmgacagcaatggaccaaaactggttcccacatcgagcacatagcatcccacctctgcctcgatacagatatgttcggtgatggcaccgagaacggcaaggaaatcgtcgtcaacccatgtgagtcctcactcatgagccagcactgggacatggtgagctcttgaggacmcctgccagaagcagcaagggccatggggtggtgcttccctggaccagaacagactggaaactgggcagcaagcagcctgcaaccacctcagacatcctggactgggaggtggaggcagagccccccaggacaggagcaactgtctcagggaggacagaggaaaacatcacaagccaatggggctcaaagacaaatcccacatgttctcaaggccgttaagttccagtcctggccagtcattccctgattggtatctggagacagaaacctaatgggaagtgtttattgttccttttcctacaaaggaagcagtctctggaggccagaaagaaaagccttctttttcactaggccaggactacattgagagatgaagaatggaggttgtttccaaaagaaataaagagaaacttagaagttgtctctgg

SEQ ID NO: 1488 - DNA, 2738 bp, Homo sapiens
gtggcgggcatcccgagtgcaccgctcccgccccgccccgccttgccccaacccacgatggtctgggagctgcgcccagggcttggcgctggcggccccgcaacagcaccgagygtttcggtcggcgggcggcggtagcgccccctctcagagccccgctcactcccacctgggctcgctccgagtcggcctgtctgtcgggcccgccctccccgctcactccctccgccctcgtgctcctcccggggtgcttggcacagcctcggattcctccctctcgctgctcgagtcagtttccctatcggcggcagcgggcaaggcggcggcggcggcggcggcagccgcggtggcggcgtggggaacatctcggcagccaccgcgcttctcccgctggagcgggcgtccagcttggctgccctcggtccttccctgccacgtttcgggtcgccctgcaccccccacccaggctcgcttctcttcgaagcgggaagggcgccttgcaggatcctgccgcccctccaaccggatcctggktctagagctccccagagcgaggcgctcgccaggactcctgccccgccaaccctgaccgccggggggtgcccccgggacgtagcgccgcggagaggaagcggcaaaggggaccatgcggcgcctgactcgtcggctggttctgccagtcttcggggtgctctggatcacggtgctgctgttcttctgggtaaccaagaggaagttggaggtgccgacgggacctgaagtgcagacccctaagccttcggacgctgactgggacgacctgtgggaccagtttgatgagcggcggtatctgaatgccaaaaagtggcgcgttggtgacgacccctataagctgtatgctttcaaccagcgggagagtgagcggatctccagcaatcgggccatcccggacactcgccatctgagatgcacactgctggtgtattgcacrgaccttccacccactagcatcatcatcaccttccacaacgaggcccgctccacgctgctcaggaccatccgcagtgtattaaaccgcacccctacgcatctgatccgggaaatcatattagtggatgacttcagcaatgaccctgatgactgtaaacagctcatcaarttgcccaaggtgaaatgcttgcgcaataatgaacggcaaggtctggtccggtcccggattcggggcgctgacatcgcccagggcaccactctgactttcctcgacagccactgtgaggtgaacagggactggctccagcctctgttgcacagggtcaaagaggactacacgcgggtggtgtgccctgtgatcgatatcattaacctggacaccttcacctacatcgagtctgcctcggagctcagaggggggtttgactggagcctccacttccagtgggagcagctctccccagagcagaaggctcggcgcctggaccccacggagcccatcaggactcctatcatagctggagggctcttcgtgatcgacaaagcttggtttgattacctggggaaatatgatatggacatggacatctggggtggggagaactttgaaatctccttccgagtgtggatgtgcgggggcagcctagagatcgtcccctgcagccgagtggggcacgtsttccggaagaagcacccctacgttttccctgatggaaatgccaacacgtatataaagaacaccaagcggacagctgaagtgtggatggatgaatacaagcaatactattacgctgcccggccattcgccctggagaggcccttcggraatgttgagagcagattggacctgaggaagaatctgcgctgccagagcttcaagtggtacctggagaatatctaccctgaactcagcatccccaaggagtyctccatccagaagggcaatatccgacagagayagaagtgcctggaatctcaaaggcagaacaaccaagaaaccccaaacctaaagttgagcccctgtgccaaggtcaaaggcgaagatgcaaagtcccaggtatgggccttcacatacacccagmagatcctccaggaggagctgtgcctgtcagtcatcaccttgttccctggcgccccagtggttcttgtcctttgcaagaatggagatgacmgacagcaatggaccaaaactggttcccacatcgagcacatagcatcccacctctgcctcgatacagatatgttcggtgatggcaccgagaacggcaaggaaatcgtcgtcaacccatgtgagtcctcactcatgagccagcactgggacatggtgagctcttgaggacmcctgccagaagcagcaagggccatggggtggtgcttccctggaccagaacagactggaaactgggcagcaagcagcctgcaaccacctcagacatcctggactgggaggtggaggcagagccccccaggacaggagcaactgtctcagggaggacagaggaaaacatcacaagccaatggggctcaaagacaaatcccacatgttctcaaggccgttaagttccagtcctggccagtcattccctgattggtatctggagacagaaacctaatgggaagtgtttattgttccttttcctacaaaggaagcagtctctggaggccagaaagaaaagccttctttttcactaggccaggactacattgagagatgaagaatggaggttgtttccaaaagaaataaagagaaacttagaagttgtctctgg

SEQ ID NO: 1489 - DNA, 2219 bp, Homo sapiens
  misc_feature (1)...(2219): n = A,T,C or G
tgtgtgcatacaggcacacgcacacatccgcgcacacatgcacgctcacacacgtgcatccttacacatgctcacactcacgctcacaatgtcacacgcatgtgcacacccgcacaagcacacgagcgcactcacgagcacacgcggactcgcacacgcgcacatgcgcactcacgcacgcacacacgcgcacactcacacgggcgcgcgcagcccctccggccgcgggcgcagcgggggcgctggtggagctgcgaagggccaggtccggcgggcggggcggcggctggcactggctccggactctgcccggccagggcggcggctccagccgggagggcgacgtggagcggccacgtggagcggcccgggggaggctggcggcgggaggcgaggcgcgggcggcgcagcagccaggagcgcccacggagctggacccccagagccgcgcggcgccgcagcagttccaggaaggatgttacctttgacgatgacagtgttaatcctgctgctgctccccacgggtcaggctgccccaaaggatggagtcacaaggccagactctgaagtgcagcatcagctcctgcccaaccccttccagccaggccaggagcagctcggacttctgcagagctacctaaagggactaggaaggacagaagtgcaactggagcatctgagccgggagcaggttctcctctacctctttgccctccatgactatgaccagagtggacagctggatggcctggagctgctgtccatgttgacagctgctctggcccctggagctgccaactctcctaccaccaacccggtgatnttgatagtrgacaaagtgctygagacscaggacctgaatggggatgggctcatgacccctgctgagctcatcaacttcccgrgagtagccctcaggcacgtggagcccggagagccccttgctccatctcctcaggagccacaagctgttggaaggcagtccctattagctaaaagcccattaagacaagaaacacaggaagcccctggtcccagagaagaagcaaagggccaggtagaggccagaagggagtctttggatcctgtccaggagcctgggggccaggcagaggctgatggagatgttccagggcccagaggggaagctgagggccaggcagaggctraaggagatgcccctgggcccagaggggaagctgrgggccaggcagaggctraaggagatgccccygggcccagaggggaagctgggggccaggcagaggccagggagaatggagaggaggccaaggaacttccaggggaaacactggagtctaagaacacccaaaatgactttgaggtgcacattgttcaagtggagaatgatgagatctagatcttgaagatacaggtaccccacgaagtctcagtgccagaacataagccctgaagtgggcaggggaaatgtacgctgggacaaggaccatctctgtgccccctgyctggtcccagtaggtatcaggtctttctrtgcagctcagggagaccctaagttaaggggcagattaccaataaagaactgaatgaattcatccccccggccacctctctacccgtccagcctgcccagaccctctcagaggaacggggttggggaccgaaaggacagggatgccgcctgcccagtgtttctgggcctcacggtgctccggcagcagagcgcatggtgctagccatggccggctgcagaggacccagtgaggaaagctcagtctatccctgggccccaaaccctcaccggttccccctcacctggtgttcagacaccccatgctctcctgcagctcagggcaggtgaccccatccccagtaatattaatcatcactagaactttttgagagccttgtacacatcaggcatcatgctgggcattttatatatgattttatcctcacaataattctgtagccaagcagaattggttccatttgacagatgaagaaattgaggcagattgcgttaagtgctgtaccctaaggtgatatgcagctaattaaatggcagatttkaatccaggtctgtctcactctaaagccctttacattatatgctctttacattataaggccttacccaccctatattggagttrgccccaattccaatatgtgttccagatcggacctccctgaggacagcaacactctgtatcctgggtcacatttgtggctga

SEQ ID NO: 1490 - DNA, 2319 bp, Homo sapiens
  misc_feature (1)...(2319): n = A,T,C or G
cgaggcgcgggcggcgcagcagccaggagcgcccacggagctggacccccagagccgcgcggcgccgcagcaggtctacagctttactcctgaagccagcgagatcacgaacccactgggagaaacgaacaactccagacgcactgccttaagagctgtaacactcactgcgaaggtccgcagctgcattcctgagccagcgagaccacaaacccaccagaaggaagaaacttcgaacgcatccgaacatcagaaggaacaaactccagacacgccgcctttaggaactgtaacactcaaccgcgagggtccgcggcttcattcttgaagtcagtgagaccaagaacccaccaattccggacacactgggattacagttccaggaaggatgttacctttgacgatgacagtgttaatcctgctgctgctccccacgggtcaggctgccccaaaggatggagtcacaaggccagactctgaagtgcagcatcagctcctgcccaaccccttccagccaggccaggagcagctcggacttctgcagagctacctaaagggactaggaaggacagaagtgcaactggagcatctgagccgggagcaggttctcctctacctctttgccctccatgactatgaccagagtggacagctggatggcctggagctgctgtccatgttgacagctgctctggcccctggagctgccaactctcctaccaccaacccggtgatnttgatagtrgacaaagtgctygagacscaggacctgaatggggatgggctcatgacccctgctgagctcatcaacttcccgrgagtagccctcaggcacgtggagcccggagagccccttgctccatctcctcaggagccacaagctgttggaaggcagtccctattagctaaaagcccattaagacaagaaacacaggaagcccctggtcccagagaagaagcaaagggccaggtagaggccagaagggagtctttggatcctgtccaggagcctgggggccaggcagaggctgatggagatgttccagggcccagaggggaagctgagggccaggcagaggctraaggagatgcccctgggcccagaggggaagctgrgggccaggcagaggctraaggagatgccccygggcccagaggggaagctgggggccaggcagaggccagggagaatggagaggaggccaaggaacttccaggggaaacactggagtctaagaacacccaaaatgactttgaggtgcacattgttcaagtggagaatgatgagatctagatcttgaagatacaggtaccccacgaagtctcagtgccagaacataagccctgaagtgggcaggggaaatgtacgctgggacaaggaccatctctgtgccccctgyctggtcccagtaggtatcaggtctttctrtgcagctcagggagaccctaagttaaggggcagattaccaataaagaactgaatgaattcatccccccggccacctctctacccgtccagcctgcccagaccctctcagaggaacggggttggggaccgaaaggacagggatgccgcctgcccagtgtttctgggcctcacggtgctccggcagcagagcgcatggtgctagccatggccggctgcagaggacccagtgaggaaagctcagtctatccctgggccccaaaccctcaccggttccccctcacctggtgttcagacaccccatgctctcctgcagctcagggcaggtgaccccatccccagtaatattaatcatcactagaactttttgagagccttgtacacatcaggcatcatgctgggcattttatatatgattttatcctcacaataattctgtagccaagcagaattggttccatttgacagatgaagaaattgaggcagattgcgttaagtgctgtaccctaaggtgatatgcagctaattaaatggcagatttkaatccaggtctgtctcactctaaagccctttacattatatgctctttacattataaggccttacccaccctatattggagttrgccccaattccaatatgtgttccagatcggacctccctgaggacagcaacactctgtatcctgggtcacatttgtggctgacggtgtggactcccagcttctgagctgtgggaatagagtctgcacaacgcagggccccgaagagctctcacggtttctttggcaggttcactgggtgtggggcaccgagtgtcctccccagccagggcagagctggtggcaagcccagggcacttctcgctgctctagcccaggcagcccctcctct

SEQ ID NO: 1491 - DNA, 1783 bp, Homo sapiens
cgctgtcttttcagtcgggcgctgagtggtttttcggatcatgtctggtggctccgcggattataacagagaacatggcggcccagagggaatggaccccgatggtgtcatcgagagcaactggaatgagattgttgataactttgatgatatgaatttaaaggagtctctccttcgtggcatctatgcttacggttttgagaagccttccgctattcagcagagagctattattccctgtattaaagggtatgatgtgattgctcaagctcagtcaggtactggcaagacagccacatttgctatttccatcctgcaacagttggagattgagttcaaggagacccaagcactagtattggcccccaccagagaactggctcaacagatccaaaaggtaattctggcacttggagactatatgggagccacttgtcatgcctgcattggtggaacaaatgttcgaaatgaaatgcaaaaactgcaggctgaagcaccacatattgttgttggtacacccgggagagtgtttgatatgttaaacagaagatacctttctccaaaatggatcaaaatgtttgttttggatgaagcagatgaaatgttgagccgtggttttaaggatcaaatctatgagattttccaaaaactaaacacaagtattcaggttgtgttgctttctgccacaatgccaactgatgtgttggaagtgaccaaaaaattcatgagagatccaattcgaattctggtgaaaaaggaagaattgacccttgaaggaatcaaacagttttatattaatgttgagagagaggaatggaagttggatacactttgtgacttgtacgagacactgaccattacacaggctgttatttttctcaawacgaggcgcaaggtggactggctgactgagaagatgcatgccagagacttcacagtttctgctctgcatggtgacatggaccagaaggagagagatgttatcatgagggaattccggtcagggtcaagtcgtgttctgatcactactgacttgttggctcgcgggattgatgtgcaacaagtgtctttggttataaattatgatctacctaccaatcgtgaaaactatattcacagaattggcagagggggtcgatttgggaggaaaggtgtggctataaactttgttactgaagaagacaagaggattcttcgtgacattgagactttctacaatactacagtggaggagatgcccatgaatgtggctgaccttatttaattcctgggatgagacttctttctttgggaatatttgaatcttgtctcaatgctcataacggatcagaaatacagattttgatagcaaagcgacgttagtcgtgagctcttgtgaggaaagtcattggctttatcctctttagagttagactgttggggtgggtataaaagatggggtctgtaaaatctttctttcttagaaatttatttcctagttctgtagaaatggttgtattagatgttctctatcatttaataatatacttgtggactaaaagatataagtgctgtataaaatcagccaattatgttaaactagcatatctaaagcatttgaatgcattttgtttggtattgtatttattcaataaagtatttaattagtgctaagtgtgaacwggaccctgttgytaagccccagcaagcaatcctaggtagggtttaatccccagtaaaattgccatattgcacatgtcttaatgaagtttgaatgttaaataaattgtatattcactttaaa

SEQ ID NO: 1492 - DNA, 1756 bp, Homo sapiens
cgctgtcttttcagtcgggcgctgagtggtttttcggatcatgtctggtggctccgcggattataacagcagagaacatggcggcccagagggaatggaccccgatggtgtcatcgagagcaactggaatgagattgttgataactttgatgatatgaatttaaaggagtctctccttcgtggcatctatgcttacggttttgagaagccttccgctattcagcagagagctattattccctgtattaaagatccaaaaggtaattctggcacttggagactatatgggagccacttgtcatgcctgcattggtggaacaaatgttcgaaatgaaatgcaaaaactgcaggctgaagcaccacatattgttgttggtacacccgggagagtgtttgatatgttaaacagaagatacctttctccaaaatggatcaaaatgtttgttttggatgaagcagatgaaatgttgagccgtggttttaaggatcaaatctatgagattttccaaaaactaaacacaagtattcaggttgtgttgctttctgccacaatgccaactgatgtgttggaagtgaccaaaaaattcatgagagatccaattcgaattctggtgaaaaaggaagaattgacccttgaaggaatcaaacagttttatattaatgttgagagagaggaatggaagttggatacactttgtgacttgtacgagacactgaccattacacaggctgttatttttctcaawacgaggcgcaaggtggactggctgactgagaagatgcatgccagagacttcacagtttctgctctgcatggtgacatggaccagaaggagagagatgttatcatgagggaattccggtcagggtcaagtcgtgttctgatcactactgacttgttggctcgcgggattgatgtgcaacaagtgtctttggttataaattatgatctacctaccaatcgtgaaaactatattcacagaattggcagagggggtcgatttgggaggaaaggtgtggctataaactttgttactgaagaagacaagaggattcttcgtgacattgagactttctacaatactacagtggaggagatgcccatgaatgtggctgaccttatttaattcctgggatgagagttttggatgcagtgctcgctgttgctgaataggcgatcacaacgtgcattgtgcttctttctttgggaatatttgaatcttgtctcaatgctcataacggatcagaaatacagattttgatagcaaagcgacgttagtcgtgagctcttgtgaggaaagtcattggctttatcctctttagagttagactgttggggtgggtataaaagatggggtctgtaaaatctttctttcttagaaatttatttcctagttctgtagaaatggttgtattagatgttctctatcatttaataatatacttgtggactaaaagatataagtgctgtataaaatcagccaattatgttaaactagcatatctgcctttattgtgtttgtcattagcctgagtagaaaggcctttaaaatttttttagaaagcatttgaatgcattttgtttggtattgtatttattcaataaagtatttaattagtgctaagtgtgaacwggaccctgttgytaagccccagcaagcaatcctaggtagggtttaatccccagtaaaattgccatattgcacatgtcttaatgaagtttgaatgttaaataaattgtatattcactttaaag

SEQ ID NO: 1493 - DNA, 1893 bp, Homo sapiens
cgctgtcttttcagtcgggcgctgagtggtttttcggatcatgtctggtggctccgcggattataacagagaacatggcggcccagagggaatggaccccgatggtgtcatcgagagcaactggaatgagattgttgataactttgatgatatgaatttaaaggagtctctccttcgtggcatctatgcttacggttttgagaagccttccgctattcagcagagagctattattccctgtattaaagggtatgatgtgattgctcaagctcagtcaggtactggcaagacagccacatttgctatttccatcctgcaacagttggagattgagttcaaggagacccaagcactagtattggcccccaccagagaactggctcaacagatccaaaaggtaattctggcacttggagactatatgggagccacttgtcatgcctgcattggtggaacaaatgttcgaaatgaaatgcaaaaactgcaggctgaagcaccacatattgttgttggtacacccgggagagtgtttgatatgttaaacagaagatacctttctccaaaatggatcaaaatgtttgttttggatgaagcagatgaaatgttgagccgtggttttaaggatcaaatctatgagattttccaaaaactaaacacaagtattcaggttgtgttgctttctgccacaatgccaactgatgtgttggaagtgaccaaaaaattcatgagagatccaattcgaattctggtgaaaaaggaagaattgacccttgaaggaatcaaacagttttatattaatgttgagagagaggaatggaagttggatacactttgtgacttgtacgagacactgaccattacacaggctgttatttttctcaawacgaggcgcaaggtggactggctgactgagaagatgcatgccagagacttcacagtttctgctctgcatggtgacatggaccagaaggagagagatgttatcatgagggaattccggtcagggtcaagtcgtgttctgatcactactgacttgttggctcgcgggattgatgtgcaacaagtgtctttggttataaattatgatctacctaccaatcgtgaaaactatattcacagaattggcagagggggtcgatttgggaggaaaggtgtggctataaactttgttactgaagaagacaagaggattcttcgtgacattgagactttctacaatactacagtggaggagatgcccatgaatgtggctgaccttatttaattcctgggatgagagttttggatgcagtgctcgctgttgctgaataggcgatcacaacgtgcattgtgcttctttctttgggaatatttgaatcttgtctcaatgctcataacggatcagaaatacagattttgatagcaaagcgacgttagtcgtgagctcttgtgaggaaagtcattggctttatcctctttagagttagactgttggggtgggtataaaagatggggtctgtaaaatctttctttcttagaaatttatttcctagttctgtagaaatggttgtattagatgttctctatcatttaataatatacttgtggactaaaagatataagtgctgtataaaatcagccaattatgttaaactagcatatctgcctttattgtgtttgtcattagcctgagtagaaaggcctttaaaatttttttagaaagcatttgaatgcattttgtttggtattgtatttattcaataaagtatttaattagtgctaagtgtgaacwggaccctgttgytaagccccagcaagcaatcctaggtagggtttaatccccagtaaaattgccatattgcacatgtcttaatgaagtttgaatgttaaataaattgtatattcactttaaag

SEQ ID NO: 1494 - DNA, 3102 bp, Homo sapiens
cgctgtcttttcagtcgggcgctgagtggtttttcggatcatgtctggtggctccgcggattataacagagaacatggcggcccagagggaatggaccccgatggtgtcatcgagagcaactggaatgagattgttgataactttgatgatatgaatttaaaggagtctctccttcgtggcatctatgcttacggttttgagaagccttccgctattcagcagagagctattattccctgtattaaagatccaaaaggtaattctggcacttggagactatatgggagccacttgtcatgcctgcattggtggaacaaatgttcgaaatgaaatgcaaaaactgcaggctgaagcaccacatattgttgttggtacacccgggagagtgtttgatatgttaaacagaagatacctttctccaaaatggatcaaaatgtttgttttggatgaagcagatgaaatgttgagccgtggttttaaggatcaaatctatgagattttccaaaaactaaacacaagtattcaggttgtgttgctttctgccacaatgccaactgatgtgttggaagtgaccaaaaaattcatgagagatccaattcgaattctggtgaaaaaggaagaattgacccttgaaggaatcaaacagttttatattaatgttgagagagaggaatggaagttggatacactttgtgacttgtacgagacactgaccattacacaggctgttatttttctcaawacgaggcgcaaggtggactggctgactgagaagatgcatgccagagacttcacagtttctgctctgcatggtgacatggaccagaaggagagagatgttatcatgagggaattccggtcagggtcaagtcgtgttctgatcactactgacttgttggtaagtctcttaatgctttttaaaaatctaccaaaagttagctttttggggggcaggtttttaagtaacctttgccaacttgggctatttggaagagtaaaagaccacactccacagtgggctataccacttagtatagttcgctactattttgtggcctacatgacaggtgtcaagtttttttgaatcaatttttaaaacatgccattgtgtttcaggctcgcgggattgatgtgcaacaagtgtctttggttataaattatgatctacctaccaatcgtgaaaactatattcacaggtgagaagccagcatcttggctgtattgaaaaaamttcatacgtttttctactgtgatttgtatgaaaggtaacatcaaatcaaggaatagattcagtaaagtcagtagtgttcagtaagatgatgtaattaaatttgtactagggaaggttgatgagaacaaagtgggaaaacttgtaaacattgcccagattgtggacatagggtttttttccacaattgttggtcktaccttatgcttgagcttttagtgatgttcttgtgtccatgtgtttttcttggtgattttttctatagttgggattttcttggtgtcgcctggtagcaatttgagtgaaccctggtttagttatagtggctttatccctaaataaattgaattgtactttgttatatgatgtaaaaaaagactttggcgttgacgtaatttaggacgtggaatcataagcgaaacagcacactgtttgaataaagagcgagtcggtatttatatttgtttttcttttgtcatgattatttgatttttaagttgctccagctaaggcatttttttgtattagtatttctattagggaacctttcttattaggtggtttgtattgtctggtttctaacatgcaggtagctgtttggcagttaaacacgtttagagtaatttgagttacaacgtgtgaaactgagcaaaaaagcagtgataagtttgggttaccataccaaatatttgttttcccactggaaaaaagtaagttttagaaaatagttaacctttgcagcatttgtttacagtttacagttccagaagtgcgtcgaaatggattacataactgctcttttattcctggtgttcacatctgtcccaggctgacacctgctcttggctggcccactttggtatgggctttaatttcactaccccaaacacgatactgtcatctgctttataataatgctcaagatgcctgataaaaatctcattttgcagccagacaagccttgaatccttttggcactaactgcaaaggaagatttttttctctagatatgcattagcagctagtgctccagttagaagcacgaactataaccttgataagtaaacagcagctggtggttaacaagtggatcgtcatgttcagtagtttatacattatgtgagaagtaacgttctgattctttttcttacacagaattggcagagggggtcgatttgggaggaaaggtgtggctataaactttgttactgaagaagacaagaggattcttcgtgacattgagactttctacaatactacagtggaggagatgcccatgaatgtggctgaccttatttaattcctgggatgagagttttggatgcagtgctcgctgttgctgaataggcgatcacaacgtgcattgtgcttctttctttgggaatatttgaatcttgtctcaatgctcataacggatcagaaatacagattttgatagcaaagcgacgttagtcgtgagctcttgtgaggaaagtcattggctttatcctctttagagttagactgttggggtgggtataaaagatggggtctgtaaaatctttctttcttagaaatttatttcctagttctgtagaaatggttgtattagatgttctctatcatttaataatatacttgtggactaaaagatataagtgctgtataaaatcagccaattatgttaaactagcatatctaaagcatttgaatgcattttgtttggtattgtatttattcaataaagtatttaattagtgctaagtgtgaacwggaccctgttgytaagccccagcaagcaatcctaggtagggtttaatccccagtaaaattgccatattgcacatgtcttaatgaagtttgaatgttaaataaattgtatattcactttaaa

SEQ ID NO: 1495 - DNA, 1643 bp, Homo sapiens
cgctgtcttttcagtcgggcgctgagtggtttttcggatcatgtctggtggctccgcggattataacagagaacatggcggcccagagggaatggaccccgatggtgtcatcgagagcaactggaatgagattgttgataactttgatgatatgaatttaaaggagtctctccttcgtggcatctatgcttacggttttgagaagccttccgctattcagcagagagctattattccctgtattaaagatccaaaaggtaattctggcacttggagactatatgggagccacttgtcatgcctgcattggtggaacaaatgttcgaaatgaaatgcaaaaactgcaggctgaagcaccacatattgttgttggtacacccgggagagtgtttgatatgttaaacagaagatacctttctccaaaatggatcaaaatgtttgttttggatgaagcagatgaaatgttgagccgtggttttaaggatcaaatctatgagattttccaaaaactaaacacaagtattcaggttgtgttgctttctgccacaatgccaactgatgtgttggaagtgaccaaaaaattcatgagagatccaattcgaattctggtgaaaaaggaagaattgacccttgaaggaatcaaacagttttatattaatgttgagagagaggaatggaagttggatacactttgtgacttgtacgagacactgaccattacacaggctgttatttttctcaawacgaggcgcaaggtggactggctgactgagaagatgcatgccagagacttcacagtttctgctctgcatggtgacatggaccagaaggagagagatgttatcatgagggaattccggtcagggtcaagtcgtgttctgatcactactgacttgttggctcgcgggattgatgtgcaacaagtgtctttggttataaattatgatctacctaccaatcgtgaaaactatattcacagaattggcagagggggtcgatttgggaggaaaggtgtggctataaactttgttactgaagaagacaagaggattcttcgtgacattgagactttctacaatactacagtggaggagatgcccatgaatgtggctgaccttatttaattcctgggatgagacttctttctttgggaatatttgaatcttgtctcaatgctcataacggatcagaaatacagattttgatagcaaagcgacgttagtcgtgagctcttgtgaggaaagtcattggctttatcctctttagagttagactgttggggtgggtataaaagatggggtctgtaaaatctttctttcttagaaatttatttcctagttctgtagaaatggttgtattagatgttctctatcatttaataatatacttgtggactaaaagatataagtgctgtataaaatcagccaattatgttaaactagcatatctaaagcatttgaatgcattttgtttggtattgtatttattcaataaagtatttaattagtgctaagtgtgaacwggaccctgttgytaagccccagcaagcaatcctaggtagggtttaatccccagtaaaattgccatattgcacatgtcttaatgaagtttgaatgttaaataaattgtatattcactttaaa

SEQ ID NO: 1496 - DNA, 1753 bp, Homo sapiens
cgctgtcttttcagtcgggcgctgagtggtttttcggatcatgtctggtggctccgcggattataacagagaacatggcggcccagagggaatggaccccgatggtgtcatcgagagcaactggaatgagattgttgataactttgatgatatgaatttaaaggagtctctccttcgtggcatctatgcttacggttttgagaagccttccgctattcagcagagagctattattccctgtattaaagatccaaaaggtaattctggcacttggagactatatgggagccacttgtcatgcctgcattggtggaacaaatgttcgaaatgaaatgcaaaaactgcaggctgaagcaccacatattgttgttggtacacccgggagagtgtttgatatgttaaacagaagatacctttctccaaaatggatcaaaatgtttgttttggatgaagcagatgaaatgttgagccgtggttttaaggatcaaatctatgagattttccaaaaactaaacacaagtattcaggttgtgttgctttctgccacaatgccaactgatgtgttggaagtgaccaaaaaattcatgagagatccaattcgaattctggtgaaaaaggaagaattgacccttgaaggaatcaaacagttttatattaatgttgagagagaggaatggaagttggatacactttgtgacttgtacgagacactgaccattacacaggctgttatttttctcaawacgaggcgcaaggtggactggctgactgagaagatgcatgccagagacttcacagtttctgctctgcatggtgacatggaccagaaggagagagatgttatcatgagggaattccggtcagggtcaagtcgtgttctgatcactactgacttgttggctcgcgggattgatgtgcaacaagtgtctttggttataaattatgatctacctaccaatcgtgaaaactatattcacagaattggcagagggggtcgatttgggaggaaaggtgtggctataaactttgttactgaagaagacaagaggattcttcgtgacattgagactttctacaatactacagtggaggagatgcccatgaatgtggctgaccttatttaattcctgggatgagagttttggatgcagtgctcgctgttgctgaataggcgatcacaacgtgcattgtgcttctttctttgggaatatttgaatcttgtctcaatgctcataacggatcagaaatacagattttgatagcaaagcgacgttagtcgtgagctcttgtgaggaaagtcattggctttatcctctttagagttagactgttggggtgggtataaaagatggggtctgtaaaatctttctttcttagaaatttatttcctagttctgtagaaatggttgtattagatgttctctatcatttaataatatacttgtggactaaaagatataagtgctgtataaaatcagccaattatgttaaactagcatatctgcctttattgtgtttgtcattagcctgagtagaaaggcctttaaaatttttttagaaagcatttgaatgcattttgtttggtattgtatttattcaataaagtatttaattagtgctaagtgtgaacwggaccctgttgytaagccccagcaagcaatcctaggtagggtttaatccccagtaaaattgccatattgcacatgtcttaatgaagtttgaatgttaaataaattgtatattcactttaaag

SEQ ID NO: 1497 - DNA, 1896 bp, Homo sapiens
cgctgtcttttcagtcgggcgctgagtggtttttcggatcatgtctggtggctccgcggattataacagcagagaacatggcggcccagagggaatggaccccgatggtgtcatcgagagcaactggaatgagattgttgataactttgatgatatgaatttaaaggagtctctccttcgtggcatctatgcttacggttttgagaagccttccgctattcagcagagagctattattccctgtattaaagggtatgatgtgattgctcaagctcagtcaggtactggcaagacagccacatttgctatttccatcctgcaacagttggagattgagttcaaggagacccaagcactagtattggcccccaccagagaactggctcaacagatccaaaaggtaattctggcacttggagactatatgggagccacttgtcatgcctgcattggtggaacaaatgttcgaaatgaaatgcaaaaactgcaggctgaagcaccacatattgttgttggtacacccgggagagtgtttgatatgttaaacagaagatacctttctccaaaatggatcaaaatgtttgttttggatgaagcagatgaaatgttgagccgtggttttaaggatcaaatctatgagattttccaaaaactaaacacaagtattcaggttgtgttgctttctgccacaatgccaactgatgtgttggaagtgaccaaaaaattcatgagagatccaattcgaattctggtgaaaaaggaagaattgacccttgaaggaatcaaacagttttatattaatgttgagagagaggaatggaagttggatacactttgtgacttgtacgagacactgaccattacacaggctgttatttttctcaawacgaggcgcaaggtggactggctgactgagaagatgcatgccagagacttcacagtttctgctctgcatggtgacatggaccagaaggagagagatgttatcatgagggaattccggtcagggtcaagtcgtgttctgatcactactgacttgttggctcgcgggattgatgtgcaacaagtgtctttggttataaattatgatctacctaccaatcgtgaaaactatattcacagaattggcagagggggtcgatttgggaggaaaggtgtggctataaactttgttactgaagaagacaagaggattcttcgtgacattgagactttctacaatactacagtggaggagatgcccatgaatgtggctgaccttatttaattcctgggatgagagttttggatgcagtgctcgctgttgctgaataggcgatcacaacgtgcattgtgcttctttctttgggaatatttgaatcttgtctcaatgctcataacggatcagaaatacagattttgatagcaaagcgacgttagtcgtgagctcttgtgaggaaagtcattggctttatcctctttagagttagactgttggggtgggtataaaagatggggtctgtaaaatctttctttcttagaaatttatttcctagttctgtagaaatggttgtattagatgttctctatcatttaataatatacttgtggactaaaagatataagtgctgtataaaatcagccaattatgttaaactagcatatctgcctttattgtgtttgtcattagcctgagtagaaaggcctttaaaatttttttagaaagcatttgaatgcattttgtttggtattgtatttattcaataaagtatttaattagtgctaagtgtgaacwggaccctgttgytaagccccagcaagcaatcctaggtagggtttaatccccagtaaaattgccatattgcacatgtcttaatgaagtttgaatgttaaataaattgtatattcactttaaag

SEQ ID NO: 1498 - DNA, 2961 bp, Homo sapiens
ctgcgtggaactccctccagggcagggcctggcactgtgtagtgaatgtcggcctcgtggtggacccgaaggaaccctacagtcagccccagagccgcgggagatccacgctgcggccggctccgccccgcccaaccctcaccctcacgctcacgctcacgctcacgctcacgctcacgctcacaggctcccggctccacattcctcgcagggctccaatccggacccgcccgccttgcccttcatcctcaaagactcattggtcccattcccctcgggccccgcccttcgcgtgcttgggccatgcccgtccgaccgcgctgcttccgccttgcagcaccccctcaaccccttctctcgtaggcccttctaccctccccgaagccgggctcccgggttccgcttccacagggccgccccctctcctccgagatccaacgcctcgcccctcggtaagaggcccaggactcagcccacggccccgccccccacttggctagtccgcccctggcgagacccctgctctcacccacccaggacttctcgctcccaggccgggtcctctcaccgtcaaggcccgccccctgccaacggtcctcacccattagccgaaggccccgcccctcacagattgccgcagggcaggggcggagacagcccgggccgtcccaggctccgcccccggaagcctcacttccgggcgcgagcacgccccgcctcgccccggcggcagagaggagactatggaacgtcaggtgctgctgagcgagcccgaggaggcggcggctctgtatcggggccttagccgccagcccgcgctgagcgccgcctgcctgggcccggaggtcaccacgcagtacggcggccaataccggayggtgcacactgactgctgagcagagagtctccttcaggcaccatgaaagctgtgctgcgcaaggctggaggcacgggccctggggaagagaagcagttcctggaggtctgggagaagaaccggaagctcaagagcttcaacctgtcagcgctggagaaacatgggcctgtttatgaggatggcattttgggcccctggagatgctggtgtggtgtttgtgggctggtggcatgagcccttccggttgggcatccgcttttgcaccaatcgcaggtcagccctgtattaygtggacctcatcggggggaagtgtgagctcctctcggatgactccctggctgtctcttctccccggctgagcccagaccaatgtcgcattgtctacctgcagtacccatctctgatcccccatcaccaatgcagccagctgtgcctgtatgactggtataccaaggttacctcagtggtggtagatgttgtgcctcggcagctgggagagaacttctctgggatctactgcagccttctgcctttgggatgctggtcagctgacagccagagagtggtctttgactcggctcagcgcagccggcaggacctgtttgctgtggacacccaagtgggcactgtgacctccctcacagctggagggtcaggtgggagctggaagttgctcacaattgaccaggacctcatggtggcacagttttccacacccagcctacctccaaccctgaaagttgggttcctgccttctgcagggaaggagcagtcagtgttgtgggtgtccctggaggaggccgagcccattcccgacatccactggggcatccgggtgctacagccacccccagagcaagagaatgtgcagtatggggggccccattcatcctttgtcactgcctggatgctgttcccagccatgctttgcaagatgggctttgcggtactactagtttgcagtggaacaggtgctccaggaggaacactttgatgcaagccatgtggcccttatgggtggwtcccatggtggcttcatttcctgccacttgattggtcagtacccagagacctacagggcctgcgtggcccggaaccccgtgatcaacatcgcctccatgttgggctccactgacatccctgactggtgcgtggtggaggctggctttcctttcagcagtgactgcctgccagacctcagcgtgtgggctgagatgctggacaaatcgcccatcagatacatccctcaggtgaagacaccactgttactgatgttgggccaggaggaccggcgtgtgcccttcaagcagggcatggagtattaccgtgccctcaagacccggaatgtgcctgttcggctcctgctctatcccaaaagcacccacgcattatcagaggtggaggtggagtcagacagyttcatgaatgctgtgctctggctacgcacacacttgggcagctgaagccctgccattctgcatgagctgatcagcctgtgccacacttcgctcttgaggagctcaacggtctggcagggcagcaggaggctttytgggctctggactccacggatgcrtgggcagaggaatgtgggctatgtagtcataataaattaggacacagagcctggttcctgctggtactttgtaccaaaccatccccaaccccacctcccactctggggtgcagagaccctaggttctgggtgtggcagccacaagggcttcatctgcctccagtgtgagaagggagggaacagtgagaggcttagcctctgcctgtcctggcaaccaggactctgtaccagcctagcttccctgctgcagccccttccattagcaactactctgtaccacccttcccaagagtatgtctggaggactagtgtgaggccctgtctttccacggcacccatgggcaaaagtagtcccagggacattgccttggttggggaagcccctaggctggacagatcacctagcccagggtgtgctgggctcaagccacccgagccctagcaaggagtcactgacacatttcctggaagcaaaggctaagaagcatctgtacaggcataaagagga

SEQ ID NO: 1499 - DNA, 3272 bp, Homo sapiens
ctgcgtggaactccctccagggcagggcctggcactgtgtagtgaatgtcggcctcgtggtggacccgaaggaaccctacagtcagccccagagccgcgggagatccacgctgcggccggctccgccccgcccaaccctcaccctcacgctcacgctcacgctcacgctcacgctcacgctcacaggctcccggctccacattcctcgcagggctccaatccggacccgcccgccttgcccttcatcctcaaagactcattggtcccattcccctcgggccccgcccttcgcgtgcttgggccatgcccgtccgaccgcgctgcttccgccttgcagcaccccctcaaccccttctctcgtaggcccttctaccctccccgaagccgggctcccgggttccgcttccacagggccgccccctctcctccgagatccaacgcctcgcccctcggtaagaggcccaggactcagcccacggccccgccccccacttggctagtccgcccctggcgagacccctgctctcacccacccaggacttctcgctcccaggccgggtcctctcaccgtcaaggcccgccccctgccaacggtcctcacccattagccgaaggccccgcccctcacagattgccgcagggcaggggcggagacagcccgggccgtcccaggctccgcccccggaagcctcacttccgggcgcgagcacgccccgcctcgccccggcggcagagaggagactatggaacgtcaggtgctgctgagcgagcccgaggaggcggcggctctgtatcggggccttagccgccagcccgcgctgagcgccgcctgcctgggcccggaggtcaccacgcagtacggcggccaataccggayggtgcacactgactgctgagcagagagtctccttcaggcaccatgaaagctgtgctgcgcaaggctggaggcacgggccctggggaagagaagcagttcctggaggtctgggagaagaaccggaagctcaagagcttcaacctgtcagcgctggagaaacatgggcctgtttatgaggatgggggatcagtttgtgttttatgaagactggggagaaaacatggtttccaaaagcatccctgtgctctgcgtgctggatgtcgagagtggcaacatctctgtgcttgagggggtccctgagaatgtgtcccctggacaggcattttgggcccctggagatgctggtgtggtgtttgtgggctggtggcatgagcccttccggttgggcatccgcttttgcaccaatcgcaggtcagccctgtattaygtggacctcatcggggggaagtgtgagctcctctcggatgactccctggctgtctcttctccccggctgagcccagaccaatgtcgcattgtctacctgcagtacccatctctgatcccccatcaccaatgcagccagctgtgcctgtatgactggtataccaaggttacctcagtggtggtagatgttgtgcctcggcagctgggagagaacttctctgggatctactgcagccttctgcctttgggatgctggtcagctgacagccagagagtggtctttgactcggctcagcgcagccggcaggacctgtttgctgtggacacccaagtgggcactgtgacctccctcacagctggagggtcaggtgggagctggaagttgctcacaattgaccaggacctcatggtggcacagttttccacacccagcctacctccaaccctgaaagttgggttcctgccttctgcagggaaggagcagtcagtgttgtgggtgtccctggaggaggccgagcccattcccgacatccactggggcatccgggtgctacagccacccccagagcaagagaatgtgcagtatgctggccttgactttgaagcaatcctgctgcagcctggcagccctccagataagacccaagtgcccatggtggtcatgccccacggggggccccattcatcctttgtcactgcctggatgctgttcccagccatgctttgcaagatgggctttgcggtactactagtgaactatcgtggctccaygggctttggccaggacagcatcctctccctcccaggcaatgtgggccaccaggatgtgaaggatgtccagtttgcagtggaacaggtgctccaggaggaacactttgatgcaagccatgtggcccttatgggtggwtcccatggtggcttcatttcctgccacttgattggtcagtacccagagacctacagggcctgcgtggcccggaaccccgtgatcaacatcgcctccatgttgggctccactgacatccctgactggtgcgtggtggaggctggctttcctttcagcagtgactgcctgccagacctcagcgtgtgggctgagatgctggacaaatcgcccatcagatacatccctcaggtgaagacaccactgttactgatgttgggccaggaggaccggcgtgtgcccttcaagcagggcatggagtattaccgtgccctcaagacccggaatgtgcctgttcggctcctgctctatcccaaaagcacccacgcattatcagaggtggaggtggagtcagacagyttcatgaatgctgtgctctggctacgcacacacttgggcagctgaagccctgccattctgcatgagctgatcagcctgtgccacacttcgctcttgaggagctcaacggtctggcagggcagcaggaggctttytgggctctggactccacggatgcrtgggcagaggaatgtgggctatgtagtcataataaattaggacacagagcctggttcctgctggtactttgtaccaaaccatccccaaccccacctcccactctggggtgcagagaccctaggttctgggtgtggcagccacaagggcttcatctgcctccagtgtgagaagggagggaacagtgagaggcttagcctctgcctgtcctggcaaccaggactctgtaccagcctagcttccctgctgcagccccttccattagcaactactctgtaccacccttcccaagagtatgtctggaggactagtgtgaggccctgtctttccacggcacccatgggcaaaagtagtcccagggacattgccttggttggggaagcccctaggctggacagatcacctagcccagggtgtgctgggctcaagccacccgagccctagcaaggagtcactgacacatttcctggaagcaaaggctaagaagcatctgtacaggcataaagagga

SEQ ID NO: 1500 - DNA, 3563 bp, Homo sapiens
ctgcgtggaactccctccagggcagggcctggcactgtgtagtgaatgtcggcctcgtggtggacccgaaggaaccctacagtcagccccagagccgcgggagatccacgctgcggccggctccgccccgcccaaccctcaccctcacgctcacgctcacgctcacgctcacgctcacgctcacaggctcccggctccacattcctcgcagggctccaatccggacccgcccgccttgcccttcatcctcaaagactcattggtcccattcccctcgggccccgcccttcgcgtgcttgggccatgcccgtccgaccgcgctgcttccgccttgcagcaccccctcaaccccttctctcgtaggcccttctaccctccccgaagccgggctcccgggttccgcttccacagggccgccccctctcctccgagatccaacgcctcgcccctcggtaagaggcccaggactcagcccacggccccgccccccacttggctagtccgcccctggcgagacccctgctctcacccacccaggacttctcgctcccaggccgggtcctctcaccgtcaaggcccgccccctgccaacggtcctcacccattagccgaaggccccgcccctcacagattgccgcagggcaggggcggagacagcccgggccgtcccaggctccgcccccggaagcctcacttccgggcgcgagcacgccccgcctcgccccggcggcagagaggagactatggaacgtcaggtgctgctgagcgagcccgaggaggcggcggctctgtatcggggccttagccgccagcccgcgctgagcgccgcctgcctgggcccggaggtcaccacgcagtacggcggccaataccggayggtgcacactgagtggacccagagggacctggaacgcatggagaacattcgattctgccgccaatacctggtgttccatgacggggactcagtggtgtttgcaggacctgcaggcaacagtgtggagacccggggggaactgctgagcagagagtctccttcaggcaccatgaaagctgtgctgcgcaaggctggaggcacgggccctggggaagagaagcagttcctggaggtctgggagaagaaccggaagctcaagagcttcaacctgtcagcgctggagaaacatgggcctgtttatgaggatgactgctttggctgcctgtcctggtcgcactcggagacacacttgttgtatgtggcagagaagaagcgccccaaggccgagtccttctttcagaccaaagccttggacgtcagtgccagcgatgatgagatagccaggctgaagaagccagaccaagccatcaagggggatcagtttgtgttttatgaagactggggagaaaacatggtttccaaaagcatccctgtgctctgcgtgctggatgtcgagagtggcaacatctctgtgcttgagggggtccctgagaatgtgtcccctggacaggcattttgggcccctggagatgctggtgtggtgtttgtgggctggtggcatgagcccttccggttgggcatccgcttttgcaccaatcgcaggtcagccctgtattaygtggacctcatcggggggaagtgtgagctcctctcggatgactccctggctgtctcttctccccggctgagcccagaccaatgtcgcattgtctacctgcagtacccatctctgatcccccatcaccaatgcagccagctgtgcctgtatgactggtataccaaggttacctcagtggtggtagatgttgtgcctcggcagctgggagagaacttctctgggatctactgcagccttctgcctttgggatgctggtcagctgacagccagagagtggtctttgactcggctcagcgcagccggcaggacctgtttgctgtggacacccaagtgggcactgtgacctccctcacagctggagggtcaggtgggagctggaagttgctcacaattgaccaggacctcatggtggcacagttttccacacccagcctacctccaaccctgaaagttgggttcctgccttctgcagggaaggagcagtcagtgttgtgggtgtccctggaggaggccgagcccattcccgacatccactggggcatccgggtgctacagccacccccagagcaagagaatgtgcagtatgctggccttgactttgaagcaatcctgctgcagcctggcagccctccagataagacccaagtgcccatggtggtcatgccccacggggggccccattcatcctttgtcactgcctggatgctgttcccagccatgctttgcaagatgggctttgcggtactactagtgaactatcgtggctccaygggctttggccaggacagcatcctctccctcccaggcaatgtgggccaccaggatgtgaaggatgtccagtttgcagtggaacaggtgctccaggaggaacactttgatgcaagccatgtggcccttatgggtggwtcccatggtggcttcatttcctgccacttgattggtcagtacccagagacctacagggcctgcgtggcccggaaccccgtgatcaacatcgcctccatgttgggctccactgacatccctgactggtgcgtggtggaggctggctttcctttcagcagtgactgcctgccagacctcagcgtgtgggctgagatgctggacaaatcgcccatcagatacatccctcaggtgaagacaccactgttactgatgttgggccaggaggaccggcgtgtgcccttcaagcagggcatggagtattaccgtgccctcaagacccggaatgtgcctgttcggctcctgctctatcccaaaagcacccacgcattatcagaggtggaggtggagtcagacagyttcatgaatgctgtgctctggctacgcacacacttgggcagctgaagccctgccattctgcatgagctgatcagcctgtgccacacttcgctcttgaggagctcaacggtctggcagggcagcaggaggctttytgggctctggactccacggatgcrtgggcagaggaatgtgggctatgtagtcataataaattaggacacagagcctggttcctgctggtactttgtaccaaaccatccccaaccccacctcccactctggggtgcagagaccctaggttctgggtgtggcagccacaagggcttcatctgcctccagtgtgagaagggagggaacagtgagaggcttagcctctgcctgtcctggcaaccaggactctgtaccagcctagcttccctgctgcagccccttccattagcaactactctgtaccacccttcccaagagtatgtctggaggactagtgtgaggccctgtctttccacggcacccatgggcaaaagtagtcccagggacattgccttggttggggaagcccctaggctggacagatcacctagcccagggtgtgctgggctcaagccacccgagccctagcaaggagtcactgacacatttcctggaagcaaaggctaagaagcatctgtacaggcataaagagga

SEQ ID NO: 1501 - DNA, 1941 bp, Homo sapiens
gtcccaggctccgcccccggaagcctcacttccgggcgcgacccgaggaggcggcggctctgtatcggggccttatggtgtttgcaggacctgcaggcaacagtgtggagacccggggggaactgctgagcagagagtctccttcaggcaccatgaaagctgtgctgcgcaaggctggaggcacgggccctggggaagagaagcagttcctggaggtctgggagaagaaccggaagctcaagagcttcaacctgtcagcgctggagaaacatgggcctgtttatgaggatggcattttgggcccctggagatgctggtgtggtgtttgtgggctggtggcatgagcccttccggttgggcatccgcttttgcaccaatcgcaggtcagccctgtattaygtggacctcatcggggggaagtgtgagctcctctcggatgactccctggctgtctcttctccccggctgagcccagaccaatgtcgcattgtctacctgcagtacccatctctgatcccccatcaccaatgcagccagctgtgcctgtatgactggtataccaaggttacctcagtggtggtagatgttgtgcctcggcagctgggagagaacttctctgggatctactgcagccttctgcctttgggatgctggtcagctgacagccagagagtggtctttgactcggctcagcgcagccggcaggacctgtttgctgtggacacccaagtgggcactgtgacctccctcacagctggagggtcaggtgggagctggaagttgctcacaattgaccaggacctcatggtggcacagttttccacacccagcctacctccaaccctgaaagttgggttcctgccttctgcagggaaggagcagtcagtgttgtgggtgtccctggaggaggccgagcccattcccgacatccactggggcatccgggtgctacagccacccccagagcaagagaatgtgcagtatgctggccttgactttgaagcaatcctgctgcagcctggcagccctccagataagacccaagtgcccatggtggtcatgccccacggggggccccattcatcctttgtcactgcctggatgctgttcccagccatgctttgcaagatgggctttgcggtactactagtgaactatcgtggctccaygggctttggccaggacagcatcctctccctcccaggcaatgtgggccaccaggatgtgaaggatgtccagtttgcagtggaacaggtgctccaggaggaacactttgatgcaagccatgtggcccttatgggtggwtcccatggtggcttcatttcctgccacttgattggtcagtacccagagacctacagggcctgcgtggcccggaaccccgtgatcaacatcgcctccatgttgggctccactgacatccctgactggtgcgtggtggaggctggctttcctttcagcagtgactgcctgccagacctcagcgtgtgggctgagatgctggacaaatcgcccatcagatacatccctcaggtgaagacaccactgttactgatgttgggccaggaggaccggcgtgtgcccttcaagcagggcatggagtattaccgtgccctcaagacccggaatgtgcctgttcggcatatggcrtcaaggctgggcctaacccagtctcatgaccttgtgaatccagtccacaaacacagagacamgygtgaagacagctggccagcrggaccttgyrcatactcrgttggggattmtaattccttycaggacccagcagttgtgggtaaagcaggcaagtrggcccccgtagtcacyctggcaggsccccacaggggccaacagtccctcagtgcacatctcactctcmcgcacacgtcctcggtgcttgatgttacactcctggttggagatgacrttcagcaaggccacatt

SEQ ID NO: 1502 - DNA, 3141 bp, Homo sapiens
caccccctcaaccccttctctcgtaggcccttctaccctccccgaagccgggctcccgggttccgcttccacagggccgccccctctcctccgagatccaacgcctcgcccctcggacttctcgctcccaggccgggtcctctcaccgtcaaggcccgccccctgccaacggtcctcacccattagccgaaggccccgcccctcacagattgccgcagggcaggggcggagacagcccgggccgtcccaggctccgcccccggaagcctcacttccgggcgcgagcacgccccgcctcgccccggcggcagagaggagactatggaacgtcaggtgctgctgagcgagcccgaggaggcggcggctctgtatcggggccttagccgccagcccgcgctgagcgccgcctgcctgggcccggaggtcaccacgcagtacggcggccaataccggayggtgcacactgagtggacccagagggacctggaacgcatggagaacattcgattctgccgccaatacctggtgttccatgacggggactcagtggtgtttgcaggacctgcaggcaacagtgtggagacccggggggaactgctgagcagagagtctccttcaggcaccatgaaagctgtgctgcgcaaggctggaggcacgggccctggggaagagaagcagttcctggaggtctgggagaagaaccggaagctcaagagcttcaacctgtcagcgctggagaaacatgggcctgtttatgaggatgactgctttggctgcctgtcctggtcgcactcggagacacacttgttgtatgtggcagagaagaagcgccccaaggccgagtccttctttcagaccaaagccttggacgtcagtgccagcgatgatgagatagccaggctgaagaagccagaccaagccatcaagggggatcagtttgtgttttatgaagactggggagaaaacatggtttccaaaagcatccctgtgctctgcgtgctggatgtcgagagtggcaacatctctgtgcttgagggggtccctgagaatgtgtcccctggacaggcattttgggcccctggagatgctggtgtggtgtttgtgggctggtggcatgagcccttccggttgggcatccgcttttgcaccaatcgcaggtcagccctgtattaygtggacctcatcggggggaagtgtgagctcctctcggatgactccctggctgtctcttctccccggctgagcccagaccaatgtcgcattgtctacctgcagtacccatctctgatcccccatcaccaatgcagccagctgtgcctgtatgactggtataccaaggttacctcagtggtggtagatgttgtgcctcggcagctgggagagaacttctctgggatctactgcagccttctgcctttgggatgctggtcagctgacagccagagagtggtctttgactcggctcagcgcagccggcaggacctgtttgctgtggacacccaagtgggcactgtgacctccctcacagctggagggtcaggtgggagctggaagttgctcacaattgaccaggacctcatggtggcacagttttccacacccagcctacctccaaccctgaaagttgggttcctgccttctgcagggaaggagcagtcagtgttgtgggtgtccctggaggaggccgagcccattcccgacatccactggggcatccgggtgctacagccacccccagagcaagagaatgtgcagtatgctggccttgactttgaagcaatcctgctgcagcctggcagccctccagataagacccaagtgcccatggtggtcatgccccacggggggccccattcatcctttgtcactgcctggatgctgttcccagccatgctttgcaagatgggctttgcggtactactagtgaactatcgtggctccaygggctttggccaggacagcatcctctccctcccaggcaatgtgggccaccaggatgtgaaggatgtccagtttgcagtggaacaggtgctccaggaggaacactttgatgcaagccatgtggcccttatgggtggwtcccatggtggcttcatttcctgccacttgattggtcagtacccagagacctacagggcctgcgtggcccggaaccccgtgatcaacatcgcctccatgttgggctccactgacatccctgactggtgcgtggtggaggctggctttcctttcagcagtgactgcctgccagacctcagcgtgtgggctgagatgctggacaaatcgcccatcagatacatccctcaggtgaagacaccactgttactgatgttgggccaggaggaccggcgtgtgcccttcaagcagggcatggagtattaccgtgccctcaagacccggaatgtgcctgttcggctcctgctctatcccaaaagcacccacgcattatcagaggtggaggtggagtcagacagyttcatgaatgctgtgctctggctacgcacacacttgggcagctgaagccctgccattctgcatgagctgatcagcctgtgccacacttcgctcttgaggagctcaacggtctggcagggcagcaggaggctttytgggctctggactccacggatgcrtgggcagaggaatgtgggctatgtagtcataataaattaggacacagagcctggttcctgctggtactttgtaccaaaccatccccaaccccacctcccactctggggtgcagagaccctaggttctgggtgtggcagccacaagggcttcatctgcctccagtgtgagaagggagggaacagtgagaggcttagcctctgcctgtcctggcaaccaggactctgtaccagcctagcttccctgctgcagccccttccattagcaactactctgtaccacccttcccaagagtatgtctggaggactagtgtgaggccctgtctttccacggcacccatgggcaaaagtagtcccagggacattgccttggttggggaagcccctaggctggacagatcacctagcccagggtgtgctgggctcaagccacccgagccctagcaaggagtcactgacacatttcctggaagcaaaggctaagaagcatctgtacaggcataaagagga

SEQ ID NO: 1503 - DNA, 3322 bp, Homo sapiens
acttttcttttctccagaggagccaggaagagagctgtgaccagcagcgtcccttattcgcttggccttggttcctgtttgcactggctacagcagggcactggcccctactgtcacygccacctacacaaagaccctatctctgagcgctgcagcctactgttcagccccaggtttgaggatggatgccctggacgcttcgaagctactggatgaggagctgtattcaagacagctgtatgtgctgggctcacctgccatgcagaggattcagggagccagggtcctggtgtcaggcctgcagggcctggggrccgaggtggccaagaacttggttctgatgggtgtgggcagcctcactctgcatgatccccaccccacctgctggtccgacctggctgcccagtttctcctctcagagcaggacttggaaaggagcagagccgaggcctctcaagagctcttggctcagctcaacagagctgtccaggtcgtcgtgcacacgggtgacatcactgaggacctgytgttggacttccaggtggtggtgctgactgctgcaaagctggaggagcagctgaaggtgggcaccttgtgtcataagcatggagtttgctttctggcggctgacacccggggcctcgtggggcagttgttctgtgactttggtgaggacttcactgtgcaggaccccacagaggcagaacccctgacagctgccatccagcacatctcccagggctcccctggcattctcactctgaggaaaggggccaatacccactacttccgtgatggagacttggtgactttctcgggaattgagggaatggttgagctcaacgactgtgatccccggtctatccacgtgcgggaggatgggtccctggagattggagacacaacaactttctctcggtacttgcgtggtggggctatcactgaagtcaagagacccaagactgtgagacataagtccctggacacagccctgctccagccccatgtggtggcccagagctcccaggaagttcaccatgcccactgcctgcatcaggccttctgtgcactgcacaagttccagcacctccatggccggccascccagccctgggatcctgttgatgcagagactgtggtgggcctggcccgggacctggaaccactgaagcggacagaggaagagccactggaagagccactggatgaggccctagtgcggacagtcgccctaagcagtgcaggtgtcttgagccctatggtggccatgctgggtgcagtagctgcccaggaagtgctgaaggcaatctccaggaagttcatgcctctggaccagtggctttactttgatgccctcgattgtcttccrgaagatggggagctccttcccagtcctgaggactgtgccctgagaggcagccgctatgatgggcaaattgcagtgtttggggctggttttcaggagaaactgagacgccagcactacctcctggtgggcgctggtgccattggttgtgagctgctcaaagtctttgccctagtgggactgggggccgggaacagcgggggcttgactgttgttgacatggaccacatagagcgctccaatctcagccgtcagttcctcttcaggtcccaggacgttggtagacccaaggcagaggtggctgcagcagctgcccggggcctgaacccagacttacaggtgatcccgctcacctacccactggatcccaccacagagcacatctatggggataactttttctcccrtgtggatggtgtggctgctgccctggacagtttccaggcccggcgctatgtggctgctcgttgcacccactatctgaagccactgctggaggcaggcacatcgggcacctggggcagtgctacagtattcatgccacatgtgactgaggcctacagagcccctgcctcagctgcagcttctgaggatgccccctaccctgtctgtaccgtgcggtacttccctagcacagccgagcacaccctgcagtgggcccggcatgagtttgaagaactcttccgactgtctgcagagaccatcaaccaccaccaacaggcacacacttccctggcagacatggatgagccacagacactcaccttactgaagccagtgcttggggtcctgagagtgcgtccacagaactggcaagactgtgtggcgtgggctcttggccactggaaactctgctttcattatggcatcaaacagctgctgaggcacttcccacctaataaagtgcttgaggatggaactcccttctggtcaggtcccaaacagtgtccccagcccttggagtttgacaccaaccaagacacacacctcctctacgtactggcagctgccaacctgtatgcccagatgcatgggctgcctggctcacaggactggactgcactcagggagctgctgaagctgctgccacagcctgacccccaacagatggcccccatctttgctagtaatctagagctggcttcggcttctgctgagtttggccctgagcagcagaaggaactgaacaaagccctggaagtctggagtgtgggccctcccstgaagcctctgatgtttgagaaggatgatgacagcaacttccrtgtggactttgtggtagcggcagctagcctgagatgtcagaactacgggattccaccggtcaaccgtgcccagagcaagcgaattgtgggccagattatcccagccattgccaccactacagcagctgtggcaggcctgttgggcctggagctgtataaggtggtgagtgggccacggcctcgtagtgcctttcgccacagctacctacatctggctgaaaactacctcatccgctatatgccttttgccccagccatccagacgttccatcacctgaagtggacctcttgggaccgtctgaaggtaccagctgggcagcctgagaggaccctggagtcgctgctggctcatcttcaggagcagcacgggttgagggtgaggatcctgctgcacggctcagccctgctctatgcggccggatggtcacctgaaaagcaggcccagcacctgcccctcagggtgacagaactggttcagcagctgacaggccaggcacctgctcctgggcagcgggtgttggtgctagagctgagctgtgagggtgaygacgaggacactgccttcccacctytgcactatgagctgtgacaaggcagccaccctgtcacctagctcaatggagccccggatcccaagccctgcattgtaagcccacagtaggcactcaataaatgcttgttaaaggaaggc

SEQ ID NO: 1504 - DNA, 3327 bp, Homo sapiens
acttttcttttctccagaggagccaggaagagagctgtgaccagcagcgtcccttattcgcttggccttggttcctgtttgcactggctacagcagggcactggcccctactgtcacygccacctacacaaagaccctatctctgagcgctgcagcctactgttcagccccaggtttgaggatggatgccctggacgcttcgaagctactggatgaggagctgtattcaagacagctgtatgtgctgggctcacctgccatgcagaggattcagggagccagggtcctggtgtcaggcctgcagggcctggggrccgaggtggccaagaacttggttctgatgggtgtgggcagcctcactctgcatgatccccaccccacctgctggtccgacctggctgcccagtttctcctctcagagcaggacttggaaaggagcagagccgaggcctctcaagagctcttggctcagctcaacagagctgtccaggtcgtcgtgcacacgggtgacatcactgaggacctgytgttggacttccaggtggtggtgctgactgctgcaaagctggaggagcagctgaaggtgggcaccttgtgtcataagcatggagtttgctttctggcggctgacacccggggcctcgtggggcagttgttctgtgactttggtgaggacttcactgtgcaggaccccacagaggcagaacccctgacagctgccatccagcacatctcccagggctcccctggcattctcactctgaggaaaggggccaatacccactacttccgtgatggagacttggtgactttctcgggaattgagggaatggttgagctcaacgactgtgatccccggtctatccacgtgcgggaggatgggtccctggagattggagacacaacaactttctctcggtacttgcgtggtggggctatcactgaagtcaagagacccaagactgtgagacataagtccctggacacagccctgctccagccccatgtggtggcccagagctcccaggaagttcaccatgcccactgcctgcatcaggccttctgtgcactgcacaagttccagcacctccatggccggccascccagccctgggatcctgttgatgcagagactgtggtgggcctggcccgggacctggaaccactgaagcggacagaggaagagccactggaagagccactggatgaggccctagtgcggacagtcgccctaagcagtgcaggtgtcttgagccctatggtggccatgctgggtgcagtagctgcccaggaagtgctgaaggtgggcagaggcataggaagttcatgcctctggaccagtggctttactttgatgccctcgattgtcttccrgaagatggggagctccttcccagtcctgaggactgtgccctgagaggcagccgctatgatgggcaaattgcagtgtttggggctggttttcaggagaaactgagacgccagcactacctcctggtgggcgctggtgccattggttgtgagctgctcaaagtctttgccctagtgggactgggggccgggaacagcgggggcttgactgttgttgacatggaccacatagagcgctccaatctcagccgtcagttcctcttcaggtcccaggacgttggtagacccaaggcagaggtggctgcagcagctgcccggggcctgaacccagacttacaggtgatcccgctcacctacccactggatcccaccacagagcacatctatggggataactttttctcccrtgtggatggtgtggctgctgccctggacagtttccaggcccggcgctatgtggctgctcgttgcacccactatctgaagccactgctggaggcaggcacatcgggcacctggggcagtgctacagtattcatgccacatgtgactgaggcctacagagcccctgcctcagctgcagcttctgaggatgccccctaccctgtctgtaccgtgcggtacttccctagcacagccgagcacaccctgcagtgggcccggcatgagtttgaagaactcttccgactgtctgcagagaccatcaaccaccaccaacaggcacacacttccctggcagacatggatgagccacagacactcaccttactgaagccagtgcttggggtcctgagagtgcgtccacagaactggcaagactgtgtggcgtgggctcttggccactggaaactctgctttcattatggcatcaaacagctgctgaggcacttcccacctaataaagtgcttgaggatggaactcccttctggtcaggtcccaaacagtgtccccagcccttggagtttgacaccaaccaagacacacacctcctctacgtactggcagctgccaacctgtatgcccagatgcatgggctgcctggctcacaggactggactgcactcagggagctgctgaagctgctgccacagcctgacccccaacagatggcccccatctttgctagtaatctagagctggcttcggcttctgctgagtttggccctgagcagcagaaggaactgaacaaagccctggaagtctggagtgtgggccctcccstgaagcctctgatgtttgagaaggatgatgacagcaacttccrtgtggactttgtggtagcggcagctagcctgagatgtcagaactacgggattccaccggtcaaccgtgcccagagcaagcgaattgtgggccagattatcccagccattgccaccactacagcagctgtggcaggcctgttgggcctggagctgtataaggtggtgagtgggccacggcctcgtagtgcctttcgccacagctacctacatctggctgaaaactacctcatccgctatatgccttttgccccagccatccagacgttccatcacctgaagtggacctcttgggaccgtctgaaggtaccagctgggcagcctgagaggaccctggagtcgctgctggctcatcttcaggagcagcacgggttgagggtgaggatcctgctgcacggctcagccctgctctatgcggccggatggtcacctgaaaagcaggcccagcacctgcccctcagggtgacagaactggttcagcagctgacaggccaggcacctgctcctgggcagcgggtgttggtgctagagctgagctgtgagggtgaygacgaggacactgccttcccacctytgcactatgagctgtgacaaggcagccaccctgtcacctagctcaatggagccccggatcccaagccctgcattgtaagcccacagtaggcactcaataaatgcttgttaaaggaaggc

SEQ ID NO: 1505 - DNA, 2267 bp, Homo sapiens
gccgcagccccagccgggccggacgcgggagggtcagggccagggtgagcgcccgactccgagctgtccccgctcccggcgcggcgctccgctctcagccacctcacggctgccaggagtgcgcgggagtttgccccggagcgcggggaagtttcctccgaagctgcgctcctggaacagcagcacctgcaagcgcccggcagcggcccgcgaggttactttatggaattgggctcttagagaayaagaaaagactgaagttttacgggaaaacaaatcatgtggtcttcagattctgaaataaggagaaatgcagccatctgaaatggtcatgaaccccaaacaagtcttcctctctgtgctgatatttggagtagctgggctactcctcttcatgtatttgcaagtctggattgaagaacaacatacagggagagtggagaagagaagagaacamaaagtaacttcaggatggggaccagtgaagtacttgcggcctgtacccagaatcatgagtacagaaaaaatccaggaacatatcaccaaccagaaccccaagtttcacatgcctgaggatgtacgagaaaaaaaggaaaatcttctactcaattctgagagatctactaggctcttaacaaagmccagtcattcacaaggaggggatcaagctttaartaagtccacagggtcaccaacagagaagttgattgaaaaacgtcaaggagctaagactgtttttaacaagttcagcaacatgaattggccagtggacattcaccctttaaacaaaagtttagtcaaagataataaatggaagaaaactgaggagacccaagagaaacgaaggtctttccttcaggagttttgcaagaaatacggtggggtgagtcatcatcagtcacatctttttcatacagtatccagaatctatgtagaagataaacacamaatcttatattgtgaggtacctaaggctggctgttccaattggaaaagaattctgatggtactaaatggattggcttcctctgcatacaacatctcccacaatgctgtccactacgggaagcatttgaagaagctagatagctttgacctaaaagggatatatacccgcttaaatacttacaccaaagctgtgtttgttcgtgatcccatggaaagattagtatcagcctttagggacaaatttgaacaccccaatagttattaccatccagtattcggaaaggcaattatcaagaaatatcgaccaaatgcctgtgaagaagcattaattaatggatctggagtcaagttcaaagagtttatccactacttgctggattcccaccgtccagtaggaatggacattcactgggaaaaggtcagcaaactctgctatccgtgtttgatcaactatgattttgtagggaaatttgagactttggaagaagatgccaattactttttacagatgatcggtgctccaaaggagctgaaatttcccaactttaaggataggcactcttccgatgaaagaaccaatgctcaagtcgtgagacagtatttaaaggatctgactagaactgagagacaattaatctatgacttttattacttggactatttaatgtttaattatacaactccatttttgtagtttgcattcattttctaaaaccctgtatatacttaatgatgataagttcaaatcagctgtaatttttctataattctctgtatgacagaaatttaaccaagtgcagttgtcttgatttaatgtagatttttaccaaatagtatgacaccaattggcacaaagttataggaaaatcacctacaggagatgtaaacaacttgagttgctctaaaatgtttggaaaagagctgcttttgcattatgaattatattgttgaagcaataacctagccagctgttgcattagctaaagcagcctcttgcaatggtaggaaaaaaggatctcaaatagcatgagtgtatgtctatatcctgaaatttattgtctaaaatgcatgaatatatttttagcagtctgtggcatattaatcaaactgttgaattgttttcttacaccctggaaatctttctatcaactataatgataaatccattttgaagtgatattttggacttaggcattttactttagattggaaggcattatgtgatttacaatatgagaatatagcagaaaaaccagatgaggctgtggctttttatattcaacagccaataaaaaatgcacaacatgctaagatcaaag

SEQ ID NO: 1506 - DNA, 1723 bp, Homo sapiens
aacagaaccccaagtttcacatgcctgaggatgtacgagaaaaaaaggaaaatcttctactcaattctgagagatctactaggctcttaacaaagmccagtcattcacaaggaggggatcaagctttaartaagtccacagggtcaccaacagagaagttgattgaaaaacgtcaaggagctaagactgtttttaacaagttcagcaacatgaattggccagtggacattcaccctttaaacaaaagtttagtcaaagataataaatggaagaaaactgaggagacccaagagaaacgaaggtctttccttcaggagttttgcaagaaatacggtggggtgagtcatcatcagtcacatctttttcatacagtatccagaatctatgtagaagataaacacamaatcttatattgtgaggtacctaaggctggctgttccaattggaaaagaattctgatggtactaaatggattggcttcctctgcatacaacatctcccacaatgctgtccactacgggaagcatttgaagaagctagatagctttgacctaaaagggatatatacccgcttaaatacttacaccaaagctgtgtttgttcgtgatcccatggaaagattagtatcagcctttagggacaaatttgaacaccccaatagttattaccatccagtattcggaaaggcaattatcaagaaatatcgaccaaatgcctgtgaagaagcattaattaatggatctggagtcaagttcaaagagtttatccactacttgctggattcccaccgtccagtaggaatggacattcactgggaaaaggtcagcaaactctgctatccgtgtttgatcaactatgattttgtagggaaatttgagactttggaagaagatgccaattactttttacagatgatcggtgctccaaaggagctgaaatttcccaactttaaggataggcactcttccgatgaaagaaccaatgctcaagtcgtgagacagtatttaaaggatctgactagaactgagagacaattaatctatgacttttattacttggactatttaatgtttaattatacaactccatttttgtagtttgcattcattttctaaaaccctgtatatacttaatgatgataagttcaaatcagctgtaatttttctataattctctgtatgacagaaatttaaccaagtgcagttgtcttgatttaatgtagatttttaccaaatagtatgacaccaattggcacaaagttataggaaaatcacctacaggagatgtaaacaacttgagttgctctaaaatgtttggaaaagagctgcttttgcattatgaattatattgttgaagcaataacctagccagctgttgcattagctaaagcagcctcttgcaatggtaggaaaaaaggatctcaaatagcatgagtgtatgtctatatcctgaaatttattgtctaaaatgcatgaatatatttttagcagtctgtggcatattaatcaaactgttgaattgttttcttacaccctggaaatctttctatcaactataatgataaatccattttgaagtgatattttggacttaggcattttactttagattggaaggcattatgtgatttacaatatgagaatatagcagaaaaaccagatgaggctgtggctttttatattcaacagccaataaaaaatgcacaacatgctaagatcaaagc

SEQ ID NO: 1507 - DNA, 4483 bp, Homo sapiens
ggcggcgacggcggcgacggcgacgcggcccgcgcgctcccccggcccctgccccggctgcgcgggcccccgccgggcccatggacggcgcggccgagcgggcgccctgagcgcggcgcgggtccccggagcgcccccgaggcgagcgcgagcgaggtccagcaccatgtgctaggtcactcccagcgcgaggccacacctgggccgtcggagcagcccctcctcacttcaggggtcaccctccccagcacccattgccccaccatggctggggaccggctcccgaggaaggtgatggatgccaagaagctggccagcctgctgcggggcgggcctggggggccgctggtcatcgayagccgctccttcgtggagtacaacagctggcatgtgctcagctccgtcaacatctgctgctccaagctggtgaagcggcggctgcagcagggcaaggtgaccattgcggagctcatccagccggctgcacgcagccaggtggaggctacggagccacaggacgtggtggtctatgaccagagcacgcgggacgccagcgtgctggccgcagacagcttcctctccatcctgctgagcaagctggacggctgcttcgacagcgtggccatcctcactgcttctcccacccctttccaacccgccctcccgcccctccaggatctgatgacgcaaaatggaataagctacgtcctcaacgccagcaactcctgccccaagcctgacttcatctgcgagagccgcttcatgcgggtccccatcaacgacaactactgtgaaaaactgctgccctggctggacaagtccatcgagttcatcgataaagccaagctctccagctgccaagtcatcgtccactgtctggctggcatctcccgctctgccaccatcgccatcgcctacatcatgaagaccatgggcatgtcctccgacgacgcctacaggttcgtgaaggacaggcgcccgtccatctcgcccaacttcaacttcctgggccagctgctggagtacgagcgcagcctgaagctgctggccgccctgcagggcgacccgggcaccccctcagggacgccggagcctccgcccagtcctgccgccggggccccgctgccacggctgccaccacctacctcagagagcgctgccacagggaatgcggctgccagggagggcggcctgagcgcgggcggggagccccccgcgccccccacgcccccggcgaccagcgcactgcagcagggcctgcgcggcctgcacctctcctcggaccgcctgcaggacactaaccgcctcaagcgctccttctccctggacatcaagtctgcctacgcccctagcatgcggcccgacggccccgggccccccgaccccggcgaggccccgaagctctgcaagctggacagcccgtcgggggccgcgctgggcctgtcctcgcccatcccggacagcccggacgccgcgcctgatgcgcgcccacggccccgccggcggccccggccccccgccggctcccccgcgcgctcccccgcgcacagcctcggcctgaacttcggcgatgcggcccggcagactccgcggcacggcctctcggccctgtcggcgcccgggctgcccggccctggccagccggccggccccggggcctgggcaccgccgctcgactccccaggcacgccgtcgcccgacgggccctggtgcttcagccccgagggcgcacagggggcgggcggggtgctgtttgcgcccttcggccgggcgggcgccccgggaccaggcggcggcagcgacctgcggcggcgggaggcagcgagggctgagccccgggacgcgcggaccggctggcccgaggagccggccccggagacgcagttcaagcgccgcagctgccagatggagttcgargagggcatggtggaggggcgcgcgcgcrgcgaggagctggccgccctgggcaagcaggcgagcttctcgggcagcgtggaggtcatcgaggtgtcctgacccctccgctgccctcggccccgccgcccgcagccaggcccgttataaatgtatattatatataatgcaaagaaaggtaaatggttttactgggatttttatcgagaagtaaatatttcgattttttatttatttaagctgttcattctggcaatgatttggcaacagtgcgggtggtcctcgagctctatttttactgtctggtatttaaactgaaacatrcgtttctaagcaatacgaggccaccttcagtcgcaagctgggtgccaggcctggggcccctcccagttcccccgccccaggaaacactgctgacctttgcaaaggctgccgagctttcgtgcactttttacataacaaaaaggtgaaaaaaaggaaaaaaaaacttctttgccacaaactgagccgcagaaccccccttctccccccacccacctcccctgctccctcccttctctgcgccggcctagggctctgcaccaaagccataggatggaggagcaggagctggtgtgccccggagaggtgcggccagccctccatcagctccaggcaccaaatcttggtggcaaggagggcaccccgctgcccgttgccccagagctgttctctggcaggggaggacaggcattgggcttcatggtgccagggtgttcagaggggctgagaaatagaacagtgtgtgtaggggcttcgggcagggggttctggaacgtcagatgaggtrcagcccaggggaggacagaggtgttagtgcccccaactcctgccagagccccagtccagccacagagtggctcagaaaggccattcctagagggctgcggccctcccttctcccttgcccatgcccccagagctgcctgccgggcagggtggcaccactgcaggagaggagcttggcctccgggggtcaggcaggaggcgcctggctagccagtgctggctccactgggcaggaagccctggacccccaggtatgaggagggggtggtcttagggttctgttccaggtctgccccgcccccctcccagccatgccccaggcagaacttggaattcaggtgtgcacctgcaggctgaggggctctgtgagcaggtgctgctcacacagggagttcaggcgccagccaagcccctgtgctgctgggataggcctgcttcacttagggagcactgcctcaagacaggtaaagccccctcgtttgcccccacccccatggggccgctcaggagagaaactcccattcacccctttcccagggtgctctctctctaggtggcatgccagcccccaaacacaagtggcttttgggcccaggtgggtcagcctgctgcccctgccccatacccsctcgggccattgggacccctgcccttcagatgtcctagggtctaggagtggggccagtcactgtgggaagaggccaggggcttggccggagaggcagcccagggcaggacycagtcctgagtcctggagcagggccagggaggcgcccatcccgccccrgccagccgccctctctgctgtttcttctatttgttcttcttttcacccacagctctgtgttcctgtcatccctcctttcagcaaaagtcctgttcccrttccctctgtccccacccactcctgttcccccaagaaaataagctatcgttgtatttrcaatctatggattagaggtttaagtatttattattattggttaattattattaattatgtaaatttgcctcccatatgtctgttgcgttgggtttctgaggagaccctgggtgaggaggatgcactggcttcccgcttctcgccccccacccctgtgctgtccgggagacagtggtctggggccactggttgggcccccttctcccttcccccttccccttgtcccttctgcaggccgttgaggggggctgtctgtctcagtctgtctctgctcccactcttgaggcactggttaccgcaaagtgagcagccagcaggggggcgaaggtcctgtgttggccactgcctcctccagtgctgcaggaggcgggctgaggccccacctggtggctttcacctgacccagccmtgagtcctctccaagcctctctccggcccctcccacctggccactgcctcctccagtgctgcgggaggcgggccagggccccacctggtggctttcacctgacccagccctgagtcctctccaagcctctctccggcccctcccacctggccactgcctggcattgggatcgccccaaaatggacccggcccctcctgttatttgctgggaagtccagcggaggagagggtgcaggtcccccgctgagcctccagtctctgtagactgggctgccggcccttcagccccccttggagcccctcccgccacagccgcaccttctgctcccggcccctccctttgtatttggagacaatgtgttgtaataaagcttaaagtggatgttttc

SEQ ID NO: 1508 - DNA, 4609 bp, Homo sapiens
ggcggcgacggcggcgacggcgacgcggcccgcgcgctcccccggcccctgccccggctgcgcgggcccccgccgggcccatggacggcgcggccgagcgggcgccctgagcgcggcgcgggtccccggagcgcccccgaggcgagcgcgagcgaggtccagcaccatgtgctaggtcactcccagcgcgaggccacacctgggccgtcggagcagcccctcctcacttcaggggtcaccctccccagcacccattgccccaccatggctggggaccggctcccgaggaaggtgatggatgccaagaagctggccagcctgctgcggggcgggcctggggggccgctggtcatcgayagccgctccttcgtggagtacaacagctggcatgtgctcagctccgtcaacatctgctgctccaagctggtgaagcggcggctgcagcagggcaaggtgaccattgcggagctcatccagccggctgcacgcagccaggtggaggctacggagccacaggacgtggtggtctatgaccagagcacgcgggacgccagcgtgctggccgcagacagcttcctctccatcctgctgagcaagctggacggctgcttcgacagcgtggccatcctcactgggggcttcgccaccttctcctcctgcttccccggcctctgcgagggcaagcctgctgccctgctacccatgagcctctcccagccctgcctgcctgtgcccagcgtgggcctgacccgcatcctgcctcacctctacctgggctcgcagaaggacgtcctaaacaaggatctgatgacgcaaaatggaataagctacgtcctcaacgccagcaactcctgccccaagcctgacttcatctgcgagagccgcttcatgcgggtccccatcaacgacaactactgtgaaaaactgctgccctggctggacaagtccatcgagttcatcgataaagccaagctctccagctgccaagtcatcgtccactgtctggctggcatctcccgctctgccaccatcgccatcgcctacatcatgaagaccatgggcatgtcctccgacgacgcctacaggttcgtgaaggacaggcgcccgtccatctcgcccaacttcaacttcctgggccagctgctggagtacgagcgcagcctgaagctgctggccgccctgcagggcgacccgggcaccccctcagggacgccggagcctccgcccagtcctgccgccggggccccgctgccacggctgccaccacctacctcagagagcgctgccacagggaatgcggctgccagggagggcggcctgagcgcgggcggggagccccccgcgccccccacgcccccggcgaccagcgcactgcagcagggcctgcgcggcctgcacctctcctcggaccgcctgcaggacactaaccgcctcaagcgctccttctccctggacatcaagtctgcctacgcccctagcatgcggcccgacggccccgggccccccgaccccggcgaggccccgaagctctgcaagctggacagcccgtcgggggccgcgctgggcctgtcctcgcccatcccggacagcccggacgccgcgcctgatgcgcgcccacggccccgccggcggccccggccccccgccggctcccccgcgcgctcccccgcgcacagcctcggcctgaacttcggcgatgcggcccggcagactccgcggcacggcctctcggccctgtcggcgcccgggctgcccggccctggccagccggccggccccggggcctgggcaccgccgctcgactccccaggcacgccgtcgcccgacgggccctggtgcttcagccccgagggcgcacagggggcgggcggggtgctgtttgcgcccttcggccgggcgggcgccccgggaccaggcggcggcagcgacctgcggcggcgggaggcagcgagggctgagccccgggacgcgcggaccggctggcccgaggagccggccccggagacgcagttcaagcgccgcagctgccagatggagttcgargagggcatggtggaggggcgcgcgcgcrgcgaggagctggccgccctgggcaagcaggcgagcttctcgggcagcgtggaggtcatcgaggtgtcctgacccctccgctgccctcggccccgccgcccgcagccaggcccgttataaatgtatattatatataatgcaaagaaaggtaaatggttttactgggatttttatcgagaagtaaatatttcgattttttatttatttaagctgttcattctggcaatgatttggcaacagtgcgggtggtcctcgagctctatttttactgtctggtatttaaactgaaacatrcgtttctaagcaatacgaggccaccttcagtcgcaagctgggtgccaggcctggggcccctcccagttcccccgccccaggaaacactgctgacctttgcaaaggctgccgagctttcgtgcactttttacataacaaaaaggtgaaaaaaaggaaaaaaaaacttctttgccacaaactgagccgcagaaccccccttctccccccacccacctcccctgctccctcccttctctgcgccggcctagggctctgcaccaaagccataggatggaggagcaggagctggtgtgccccggagaggtgcggccagccctccatcagctccaggcaccaaatcttggtggcaaggagggcaccccgctgcccgttgccccagagctgttctctggcaggggaggacaggcattgggcttcatggtgccagggtgttcagaggggctgagaaatagaacagtgtgtgtaggggcttcgggcagggggttctggaacgtcagatgaggtrcagcccaggggaggacagaggtgttagtgcccccaactcctgccagagccccagtccagccacagagtggctcagaaaggccattcctagagggctgcggccctcccttctcccttgcccatgcccccagagctgcctgccgggcagggtggcaccactgcaggagaggagcttggcctccgggggtcaggcaggaggcgcctggctagccagtgctggctccactgggcaggaagccctggacccccaggtatgaggagggggtggtcttagggttctgttccaggtctgccccgcccccctcccagccatgccccaggcagaacttggaattcaggtgtgcacctgcaggctgaggggctctgtgagcaggtgctgctcacacagggagttcaggcgccagccaagcccctgtgctgctgggataggcctgcttcacttagggagcactgcctcaagacaggtaaagccccctcgtttgcccccacccccatggggccgctcaggagagaaactcccattcacccctttcccagggtgctctctctctaggtggcatgccagcccccaaacacaagtggcttttgggcccaggtgggtcagcctgctgcccctgccccatacccsctcgggccattgggacccctgcccttcagatgtcctagggtctaggagtggggccagtcactgtgggaagaggccaggggcttggccggagaggcagcccagggcaggacycagtcctgagtcctggagcagggccagggaggcgcccatcccgccccrgccagccgccctctctgctgtttcttctatttgttcttcttttcacccacagctctgtgttcctgtcatccctcctttcagcaaaagtcctgttcccrttccctctgtccccacccactcctgttcccccaagaaaataagctatcgttgtatttrcaatctatggattagaggtttaagtatttattattattggttaattattattaattatgtaaatttgcctcccatatgtctgttgcgttgggtttctgaggagaccctgggtgaggaggatgcactggcttcccgcttctcgccccccacccctgtgctgtccgggagacagtggtctggggccactggttgggcccccttctcccttcccccttccccttgtcccttctgcaggccgttgaggggggctgtctgtctcagtctgtctctgctcccactcttgaggcactggttaccgcaaagtgagcagccagcaggggggcgaaggtcctgtgttggccactgcctcctccagtgctgcaggaggcgggctgaggccccacctggtggctttcacctgacccagccmtgagtcctctccaagcctctctccggcccctcccacctggccactgcctcctccagtgctgcgggaggcgggccagggccccacctggtggctttcacctgacccagccctgagtcctctccaagcctctctccggcccctcccacctggccactgcctggcattgggatcgccccaaaatggacccggcccctcctgttatttgctgggaagtccagcggaggagagggtgcaggtcccccgctgagcctccagtctctgtagactgggctgccggcccttcagccccccttggagcccctcccgccacagccgcaccttctgctcccggcccctccctttgtatttggagacaatgtgttgtaataaagcttaaagtggatgttttc

SEQ ID NO: 1509 - DNA, 4453 bp, Homo sapiens
gtccagcaccatgtgctaggtcactcccagcgcgaggccacacctgggccgtcggagcagcccctcctcacttcaggggtcaccctccccagcacccattgccccaccatggctggggaccggctcccgaggaaggtgatggatgccaagaagctggccagcctgctgcggggcgggcctggggggccgctggtcatcgayagccgctccttcgtggagtacaacagctggcatgtgctcagctccgtcaacatctgctgctccaagctggtgaagcggcggctgcagcagggcaaggtgaccattgcggagctcatccagccggctgcacgcagccaggtggaggctacggagccacaggacgtggtggtctatgaccagagcacgcgggacgccagcgtgctggccgcagacagcttcctctccatcctgctgagcaagctggacggctgcttcgacagcgtggccatcctcactgggggcttcgccaccttctcctcctgcttccccggcctctgcgagggcaagcctgctgccctgctacccatgagcctctcccagccctgcctgcctgtgcccagcgtgggcctgacccgcatcctgcctcacctctacctgggctcgcagaaggacgtcctaaacaaggatctgatgacgcaaaatggaataagctacgtcctcaacgccagcaactcctgccccaagcctgacttcatctgcgagagccgcttcatgcgggtccccatcaacgacaactactgtgaaaaactgctgccctggctggacaagtccatcgagttcatcgataaagccaagctctccagctgccaagtcatcgtccactgtctggctggcatctcccgctctgccaccatcgccatcgcctacatcatgaagaccatgggcatgtcctccgacgacgcctacaggttcgtgaaggacaggcgcccgtccatctcgcccaacttcaacttcctgggccagctgctggagtacgagcgcagcctgaagctgctggccgccctgcagggcgacccgggcaccccctcagggacgccggagcctccgcccagtcctgccgccggggccccgctgccacggctgccaccacctacctcagagagcgctgccacagggaatgcggctgccagggagggcggcctgagcgcgggcggggagccccccgcgccccccacgcccccggcgaccagcgcactgcagcagggcctgcgcggcctgcacctctcctcggaccgcctgcaggacactaaccgcctcaagcgctccttctccctggacatcaagtctgcctacgcccctagcatgcggcccgacggccccgggccccccgaccccggcgaggccccgaagctctgcaagctggacagcccgtcgggggccgcgctgggcctgtcctcgcccatcccggacagcccggacgccgcgcctgatgcgcgcccacggccccgccggcggccccggccccccgccggctcccccgcgcgctcccccgcgcacagcctcggcctgaacttcggcgatgcggcccggcagactccgcggcacggcctctcggccctgtcggcgcccgggctgcccggccctggccagccggccggccccggggcctgggcaccgccgctcgactccccaggcacgccgtcgcccgacgggccctggtgcttcagccccgagggcgcacagggggcgggcggggtgctgtttgcgcccttcggccgggcgggcgccccgggaccaggcggcggcagcgacctgcggcggcgggaggcagcgagggctgagccccgggacgcgcggaccggctggcccgaggagccggccccggagacgcagttcaagcgccgcagctgccagatggagttcgargagggcatggtggaggggcgcgcgcgcrgcgaggagctggccgccctgggcaagcaggcgagcttctcgggcagcgtggaggtcatcgaggtgtcctgacccctccgctgccctcggccccgccgcccgcagccaggcccgttataaatgtatattatatataatgcaaagaaaggtaaatggttttactgggatttttatcgagaagtaaatatttcgattttttatttatttaagctgttcattctggcaatgatttggcaacagtgcgggtggtcctcgagctctatttttactgtctggtatttaaactgaaacatrcgtttctaagcaatacgaggccaccttcagtcgcaagctgggtgccaggcctggggcccctcccagttcccccgccccaggaaacactgctgacctttgcaaaggctgccgagctttcgtgcactttttacataacaaaaaggtgaaaaaaaggaaaaaaaaacttctttgccacaaactgagccgcagaaccccccttctccccccacccacctcccctgctccctcccttctctgcgccggcctagggctctgcaccaaagccataggatggaggagcaggagctggtgtgccccggagaggtgcggccagccctccatcagctccaggcaccaaatcttggtggcaaggagggcaccccgctgcccgttgccccagagctgttctctggcaggggaggacaggcattgggcttcatggtgccagggtgttcagaggggctgagaaatagaacagtgtgtgtaggggcttcgggcagggggttctggaacgtcagatgaggtrcagcccaggggaggacagaggtgttagtgcccccaactcctgccagagccccagtccagccacagagtggctcagaaaggccattcctagagggctgcggccctcccttctcccttgcccatgcccccagagctgcctgccgggcagggtggcaccactgcaggagaggagcttggcctccgggggtcaggcaggaggcgcctggctagccagtgctggctccactgggcaggaagccctggacccccaggtatgaggagggggtggtcttagggttctgttccaggtctgccccgcccccctcccagccatgccccaggcagaacttggaattcaggtgtgcacctgcaggctgaggggctctgtgagcaggtgctgctcacacagggagttcaggcgccagccaagcccctgtgctgctgggataggcctgcttcacttagggagcactgcctcaagacaggtaaagccccctcgtttgcccccacccccatggggccgctcaggagagaaactcccattcacccctttcccagggtgctctctctctaggtggcatgccagcccccaaacacaagtggcttttgggcccaggtgggtcagcctgctgcccctgccccatacccsctcgggccattgggacccctgcccttcagatgtcctagggtctaggagtggggccagtcactgtgggaagaggccaggggcttggccggagaggcagcccagggcaggacycagtcctgagtcctggagcagggccagggaggcgcccatcccgccccrgccagccgccctctctgctgtttcttctatttgttcttcttttcacccacagctctgtgttcctgtcatccctcctttcagcaaaagtcctgttcccrttccctctgtccccacccactcctgttcccccaagaaaataagctatcgttgtatttrcaatctatggattagaggtttaagtatttattattattggttaattattattaattatgtaaatttgcctcccatatgtctgttgcgttgggtttctgaggagaccctgggtgaggaggatgcactggcttcccgcttctcgccccccacccctgtgctgtccgggagacagtggtctggggccactggttgggcccccttctcccttcccccttccccttgtcccttctgcaggccgttgaggggggctgtctgtctcagtctgtctctgctcccactcttgaggcactggttaccgcaaagtgagcagccagcaggggggcgaaggtcctgtgttggccactgcctcctccagtgctgcaggaggcgggctgaggccccacctggtggctttcacctgacccagccmtgagtcctctccaagcctctctccggcccctcccacctggccactgcctcctccagtgctgcgggaggcgggccagggccccacctggtggctttcacctgacccagccctgagtcctctccaagcctctctccggcccctcccacctggccactgcctggcattgggatcgccccaaaatggacccggcccctcctgttatttgctgggaagtccagcggaggagagggtgcaggtcccccgctgagcctccagtctctgtagactgggctgccggcccttcagccccccttggagcccctcccgccacagccgcaccttctgctcccggcccctccctttgtatttggagacaatgtgttgtaataaagcttaaagtggatgttttc

SEQ ID NO: 1510 - DNA, 2348 bp, Homo sapiens
gaccccaagtggtgggaagcctcgcgagcggcgtcccccgaccggaagtcgaggggaggagtctagtgccgcgggctccggagtgacggaagttgtgctcttggtgaatggggttcttccttttttatttaccggtggctgtgcttccaatttaggaagaccccggcgacctgttcctcacccccgcttcgccctcacactttcgggatgtctgcgattcctgctgaggagagcgaccagctgctgatccgaccccttggagctgggcaagaagtaggaagatcatgtattattctcgagttcaaaggaagaaaaataatgctcgactgtgggatccaccctggcctagaaggaatggatgctcttccttatattgatttaattgacccagctgagattgatctcctattaattagtcatttccatttggatcactgtggagctctgccctggtttctacagaagacaagtttcaaaggaagaacatttatgactcatgccacaaaagctatttatagatggcttctttctgattatgtcaaagttagtaacatatcagcagacgacatgctgtataccgagacagatttggaagaaagcatggacaaaattgaaactatcaactttcatgaagttaaggaagttgcgggaatcaagttttggtgttaccatgcaggtcacgtcctaggagccgccatgttcatgattgagatcgcaggcgtgaagcttttgtacactggtgatttctcaagacaagaagataggcacttaatggcagctgaaattcctaatattaagcctgatattcttatcattgaatctacttatgggacccatatccatgagaaacgtgaagagcgagaagcaagattctgtaacactgtccacgatattgtaaacagaggaggcaggggtctcattcctgtctttgctcttggaagggctcaggagctgctcttgattctagatgagtactggcagaatcacccagaactacatgacattccaatatactatgcatcatctttggccaagaagtgtatggcagtgtaccagacatatgtaaatgccatgaatgacaaaatccgcaaacagatcaacatcaataatccctttgttttcaaacacattagtaacctcaagagcatggatcattttgatgacattggtcccagtgttgtaatggcctccccaggcatgatgcaaagtggcttatccagagaattatttgaaagctggtgtactgataagaggaatggtgtcattatagcgggatactgtgtagaagggacacttgccaagcacatcatgtctgaacctgaagaaatcactactatgtctggacagaagttaccactgaaaatgtctgttgattacatttctttctcagctcacacggattaccagcaaaccagtgaatttattcgtgctttgaaaccgcctcatgtgattttagtccayggagaacagaatgaaatggccagattgaaagcagcactgattcgagaatatgaagataacgatgaagttcacatagaggttcataatcctcggaatacagaagcagtgaccttaaacttcagaggagaaaaactagccaaggttatgggatttttagcagacaaaaaaccagaacaaggccagcgggtctcaggaatacttgttaaaagaaactttaattatcacatactttctccttgcgacctgtccaattatactgacctggccatgagcacggtgaagcagacccaagccattccatatactggtccctttaatttgctctgttaccagctgcagaaattgacaggtgatgtggaagaattagaaattcaagaaaaacctgctctgaaagtgttcaaaaatattactgtaatacaagaaccaggcatggtggtattagaatggctggcaaacccttctaatgatatgtatgcagatacagtaacaactgtgatattggaagttcagtcaaatcccaaaataagaaaaggtgcagtacagaaggtttctaaaaaattagaaatgcacgtttacagcaagaggttggagatcatgctccaggacatatttggagaagactgtgtaagtgtaaaggatgactctattcttagcgtcacagtggacgggaaaactgccaaccttaacttggagacacggactgtagaatgtgaagagggaagtgaagacgatgaatccctccgagaaatggtggagctggctgcacagagactgtacgaggccctgacgccagttcactgagactgtgcctgtatatgaactttgaaaaaatacttgactctacttttgttacctaaaataaaatgcattcgtttctctgggggagc

SEQ ID NO: 1511 - DNA, 1045 bp, Homo sapiens
atgaccatctcagcaagctcccacttaaacagaggcgtcaagcaggtgtacatgtccctacctcagggtgagaaagtccaggccatgtatatctgaatcgatggtactcaagcaagactgcgctgcaagtgaacccaagcgtgtggaagagttacctgagtagaatttyggtggctctagtactttgaaggttccaacagtgacatgtatctcatgcctgctgccatgttttgggaccccttccacaaggacctccacaagctggtgttctgtgaagttttcaagtgcaatcgaaagcctgcagagaccaatttgaggcacacctgtaaacggataagggacatggtgagcaaccagcacccctggtttggcatggagcaggaatatataatctcatggggacagacgggcacccctttggttggccttccagtggattccctgagccccagggtccatcttaactgtagtatgtgagcagacaaaacctatggcagggacattgtggaggctcattaccgggcctgcttgtattctggagtcaagattgcagggactaatgctgaggtcatgcctgcccagtggaaattccaaatcggaccctgtgaaggaatcagcatggaagatcatctctgggtgacctgtttcatcttacatcgtgtatgtgaagacttcggagtgatagcaacctttgatcctaagcccattcctgggaactggaatggtgcaggctgccataccaacattagcaccaaggccatgcgggagaatggtctgaaatacattgaggaggccatcaagaaactaagcaagcaacagcagtaccacatccrcattcccatgaaacttctaacatcaacgacttttctgctcttatagcccatcatagtgccagcatacacattccccagactgttggccaggagaagaagggttactttgaagatcattgcctctctgccgactgtgacccattttcggtgacagaagccctcatctgcccgtgtcttctcaaaccggagttgagcccttccagtacaaaaac

SEQ ID NO: 1512 - DNA, 1811 bp, Homo sapiens
aagcggctgtgtgcgggtggtcgcggtgagtgtgcaaggccgcggtggccgcgtgacaagcctgcgctaccagtgcgcccgccggccaggagaacggagcttgtgatagatcctttcgtaacaccaagtattgtaccaggacctgcggctccgccccagaggccgccatcttcctgaccacccgaaaggccggacctactccccggtgcatcttgggatcagggcggggccctgagcgccgccatgcttttgtacggcaggatcgcaaagcacgccgggaccggttggtttggttttgaagacgtggatggcgggaattctcgcttctggcctgggtgttttagctcacttggaaaggctagagacccaagtgagcagatcccgtaaacrgtctgaagagctgcagagcgtgcaggcccaggaaggtgctcttggaaccaagattcataaactaaggcgtctgcgagatgagctgagggctgtggtgcggcaccggcgagccagcgtgaaagcatgtattgccaatgtagaacccaaccaaacagtggagatcartgagcaagaagcattggaagagaaattggaaaatgtgaaagccattctgcaggcatatcattttacaggcctcagtggtaaactgaccagccgaggagtttgtgtctgcatcagtactgcttttgaggggaacctattggattcctattttgtggaccttgtcatacagaaaccactccggatwcatcaccattcagtcccagtcttcattcccctggaagagatagctgcaaaatatttacagaccaacatccagcacttcctgttcagtctctgcgagtacctgaatgcttactctgggaggaagtaccaggcagaccggcttcagagtgactttgcagccctcctgactgggcccttgcagagaaacccactgtgtaacttgctgtcatttacttacaaactggatccagggggtcagtccttcccrttctgtgctagattgctgtataaggacctcacagcaactcttcccactgacgtcaccgtgacatgtcaaggagtggaagtattatccacttcatgggaggagcaacgagcatctcatgaaactctgttctgtacgaagcccttgcatcaagtgtttgcctcatttacaagaaaaggagaaaagttggwtatgagtctggtctcctaatagattgttttcactgcactgggagcacatcagagaaataaatcccccctcccctgccaggtgaaaggaaatattgcactttctgttctcatgactaaggggacaggagttccagaagaacctttcaagatgatcaggaacaccaggacgagggccgtctcacctcactcggaccacatggagacctcccttcaaaatgggagccatgtcctgccccaccaagcsctgtctgaagtggagcttccccgcctgtgctccctccacagtcccggaaagcccagcggcaaaggcagctttgtcccagctctgccaccctcctgctcacagtggtcagggcccctcaggggcaaggacggcagggattggaacgagggctctggaaggactgttcagccctatgcctaagacccctatgctggggacactacaggcacrcasaggaatagcagggccaccctcagagctcacacatccacgaacaaatgaaggctgaggaggtttctaaacctaaagtccatgagtgtgcacttcaatccaggaaggtcgggacttccttcagtttcaaaaaataaattctcccttccggtttggactgttgcaggctcgaggccattcagga

SEQ ID NO: 1513 - DNA, 1947 bp, Homo sapiens
atgcgccccagctcttggaggtaagcggctgtgtgcgggtggtcgcggtgagtgtgcaaggccgcggtggccgcgtgacaagcctgcgctaccagtgcgcccgccggccaggagaacggagcttgtgatagatcctttcgtaacaccaagtattgtaccaggacctgcggctccgccccagaggccgccatcttcctgaccacccgaaaggccggacctactccccggtgcatcttgggatcagggcggggccctgagcgccgccatgcttttgtacggcaggatcgcaaagcacgccgggaccggttggtttggttttgaagacgtggatggcgggaattctcgcttctggcctggcaaggacattggagtccctatcaccggttgcctagacaacttcatgggaaggcccttgggaatctgagatggagcaggcgaaccctttacgtccagatggcgagtccaaaggaggtgttttagctcacttggaaaggctagagacccaagtgagcagatcccgtaaacrgtctgaagagctgcagagcgtgcaggcccaggaaggtgctcttggaaccaagattcataaactaaggcgtctgcgagatgagctgagggctgtggtgcggcaccggcgagccagcgtgaaagcatgtattgccaatgtagaacccaaccaaacagtggagatcartgagcaagaagcattggaagagaaattggaaaatgtgaaagccattctgcaggcatatcattttacaggcctcagtggtaaactgaccagccgaggagtttgtgtctgcatcagtactgcttttgaggggaacctattggattcctattttgtggaccttgtcatacagaaaccactccggatwcatcaccattcagtcccagtcttcattcccctggaagagatagctgcaaaatatttacagaccaacatccagcacttcctgttcagtctctgcgagtacctgaatgcttactctgggaggaagtaccaggcagaccggcttcagagtgactttgcagccctcctgactgggcccttgcagagaaacccactgtgtaacttgctgtcatttacttacaaactggatccagggggtcagtccttcccrttctgtgctagattgctgtataaggacctcacagcaactcttcccactgacgtcaccgtgacatgtcaaggagtggaagtattatccacttcatgggaggagcaacgagcatctcatgaaactctgttctgtacgaagcccttgcatcaagtgtttgcctcatttacaagaaaaggagaaaagttggwtatgagtctggtctcctaatagattgttttcactgcactgggagcacatcagagaaataaatcccccctcccctgccaggtgaaaggaaatattgcactttctgttctcatgactaaggggacaggagttccagaagaacctttcaagatgatcaggaacaccaggacgagggccgtctcacctcactcggaccacatggagacctcccttcaaaatgggagccatgtcctgccccaccaagcsctgtctgaagtggagcttccccgcctgtgctccctccacagtcccggaaagcccagcggcaaaggcagctttgtcccagctctgccaccctcctgctcacagtggtcagggcccctcaggggcaaggacggcagggattggaacgagggctctggaaggactgttcagccctatgcctaagacccctatgctggggacactacaggcacrcasaggaatagcagggccaccctcagagctcacacatccacgaacaaatgaaggctgaggaggtttctaaacctaaagtccatgagtgtgcacttcaatccaggaaggtcgggacttccttcagtttcaaaaaataaattctcccttccggtttggactgttgcaggctcgaggccattcagga

SEQ ID NO: 1514 - DNA, 1709 bp, Homo sapiens
gcgccgccatgcttttgtacggcaggatcgcaaagcacgccgggaccggttggtttggttttgaagacgtggatggcgggaattctcgcttctggcctgggtgagctagaagggagaagcaaggacattggagtccctatcaccggttgcctagacaacttcatgggaaggcccttgggaatctgagatggagcaggcgaaccctttacgtccagatggcgagtccaaaggaggtgttttagctcacttggaaaggctagagacccaagtgagcagatcccgtaaacrgtctgaagagctgcagagcgtgcaggcccaggaaggtgctcttggaaccaagattcataaactaaggcgtctgcgagatgagctgagggctgtggtgcggcaccggcgagccagcgtgaaagcatgtattgccaatgtagaacccaaccaaacagtggagatcartgagcaagaagcattggaagagaaattggaaaatgtgaaagccattctgcaggcatatcattttacaggcctcagtggtaaactgaccagccgaggagtttgtgtctgcatcagtactgcttttgaggggaacctattggattcctattttgtggaccttgtcatacagaaaccactccggatwcatcaccattcagtcccagtcttcattcccctggaagagatagctgcaaaatatttacagaccaacatccagcacttcctgttcagtctctgcgagtacctgaatgcttactctgggaggaagtaccaggcagaccggcttcagagtgactttgcagccctcctgactgggcccttgcagagaaacccactgtgtaacttgctgtcatttacttacaaactggatccagggggtcagtccttcccrttctgtgctagattgctgtataaggacctcacagcaactcttcccactgacgtcaccgtgacatgtcaaggagtggaagtattatccacttcatgggaggagcaacgagcatctcatgaaactctgttctgtacgaagcccttgcatcaagtgtttgcctcatttacaagaaaaggagaaaagttggwtatgagtctggtctcctaatagattgttttcactgcactgggagcacatcagagaaataaatcccccctcccctgccaggtgaaaggaaatattgcactttctgttctcatgactaaggggacaggagttccagaagaacctttcaagatgatcaggaacaccaggacgagggccgtctcacctcactcggaccacatggagacctcccttcaaaatgggagccatgtcctgccccaccaagcsctgtctgaagtggagcttccccgcctgtgctccctccacagtcccggaaagcccagcggcaaaggcagctttgtcccagctctgccaccctcctgctcacagtggtcagggcccctcaggggcaaggacggcagggattggaacgagggctctggaaggactgttcagccctatgcctaagacccctatgctggggacactacaggcacrcasaggaatagcagggccaccctcagagctcacacatccacgaacaaatgaaggctgaggaggtttctaaacctaaagtccatgagtgtgcacttcaatccaggaaggtcgggacttccttcagtttcaaaaaataaattctcccttccggtttggactgttgcaggctcgaggccattcagga

SEQ ID NO: 1515 - DNA, 1405 bp, Homo sapiens
ccgatcatgtgatcttcaacatggcgacgctcttggttccctacagaaaggggcggagcctggactggggggcaggctcagattcaggttaaattgtggattgagctcgcagttacagacagctgaccatggaagcgaatgggttgggacctcagggttttccggagctgaagaatgacacattcctgcgagcagcytgggragaggaaacagactacactcccgtttggtgcatgcgccrggcaggccgttacttaccagagtttagggaaacccgggctgcccaggactttttcagcacgtgtcgctctcctgaggcctgctgtgaactgactctgcagccactgcgtcgcttccctctggatgctgccatcattttctccgacatccttgttgtaccccaggcactgggcatggaggtgaccatggtacctggcaaaggacccagcttcccagagccattaagagaagagcaggacctagaacgcctacgggatccagaagtggtagcctctgagctaggctatgtgttccaagccatcacccttaccyracaacsactggctggacgtgtgccrctgattggctttgctgrtgccccatrgacccwgatgacatacakggttgagggtggtggctcaagcaccatggctcaggccaagcgctggctctatcagagacctcaggctagtcaccagctgcttcscatcytcactgatgctctggtcccrtatctggtaggayaagtggtggctggtgcccaggcattgcagcwgtttragtyccatgcagggcatcttggcccacagctcttmaacaagyttgcactgycttacatccgtgatgtggccaagcaagtgaaggccaggttgcgggaggcaggccwggcaccagtgcccatgatcayctttgctaaggatgggcatttwgccctggaggagctggcccaagctggctatgaggtggttgggcttgactggacagtggccccaaagaaagccsgggagtgtgtggggaagacggtgacattgcagggcaacctggacccctgtgccttgtrtgcatctgaggaggagatcrggcagttggtgaagcagatgctggatgactttggaccacatcrctacaytgccaacytgggccatgggctttatcctgacatggacccagaacatgtgggsgcctttgtggatgctgtgcataaacactcacgtctgcttcgacagaactgasygtatmcctttaccctcaagtaccactaacacagatgattgatcktttccaggacaataaaagtttcgragttgaactattgtgtagttttgtttgtgaaagattgtgcccatatcctcagttcttcttagcctctgctccttccctgggaaccctctctatatcctcttca

SEQ ID NO: 1516 - DNA, 1070 bp, Homo sapiens
tgtctcccgcgggaagtagaattcaaggttcaagtaccggagcacctggggccgctgctgtttgggaaactgcgcaaacggcatctccttctggacgcctcctggttctgcaactggatctccgtgcagggccccggatccggtgaggaagtgaagttcccttgttacctctgggtggagggcaacggcgtcctgagcgtaccggaaggcactggctgcactgtggccgaggactctcaaggcctgttcaagaaacacagggaagcacccgtgtctgatttcattcttccccactggtggggaaactggaaggatgggttaattctgaatgtggctggggccaaactatgtgatctcctgtgcatgagcgatttctggaagacaagagagttgactttgaggctttgctggccaatggcctggccgacctcgctatcaaagactctaaatgttctgacttgttggaacaatctggatgacttcaaccggattttctaatcccacaacttgctcaacaactgccttccccagagaatgtgtgggacttctgaaaggaggatgccttatttgggtaccagtttcttaatggtgccaaccccatggggctgaggctctccattcaccttcctacccacctcgtgttccctccagggatggaggaactgcaggcccagctggagaaggagctggaggggagcacactgtttgaagctgacttctccttgctagatgggatcaaggccaacatcattctgtgtagccagcagcatctggctgcccctctagtcatgctgaagctgcagtctgttgggaaactcttgcccatggtcatccaggtgagaggacttgagatttctgctcccagatcccagccacttccscttttcttgcccatggatcctgcaatggtctggcttctggccaaatgctgggtccatagctctgacttccagctccgtgagctgcagcctcatcctctgaggggacacttgatggctgaggtcacttttgtggccaccatgaggtgccttataattccccacctgcaatacaccatggaaattaacatc

SEQ ID NO: 1517 - DNA, 1589 bp, Homo sapiens
tcacacctgccaagcatcacacctgccaagcatcacacctgccaagcatcacacctgcgatgcctgcacgagctgggtgcggtccgcgcagctgcagtaagggggcgacccggcgtctgttagtcggcggttcatctccttcgtgcctcgatgagctttaacgccattttcctccattctctttcttcacctcttgagtttccaagatggcaactatcaagagtgaacttattaagaatttcgcggaagaggaggccattcatcacaataagatctccattgtaggaactggatcggttggtgtggcttgtgctatcagcatcttattaaaaggtttgagtgatgaacttgtccttgtggatgttgatgaaggcaaactgaagggtgagacaatggatcttcaacatggcagcccttttatgaaaatgccaaatattgtctccagcaaagattacctggtcactgcaaactccaatctagtgattatcacagcaggtgcacgccagaaaaaaggagaaacacgccttgatttagtccagcgaaatgtatccatctttaaattaatgattccsaatattacccagtacagtcctcactgcaaactgcttattgttactaatccagtggatatcttaacttatgtagcctggaagttgagtggatttcccaaaaaccgtgttattggaagtggttgtaatctggactctgctcgttttcgttactttattgggcaaaggcttggcatccactctgaaagctgtcatgggctgatccttggagagcatggcgactcaagtgttcctgtgtggagtggtgtgaacattgctggcgtccctctgaaggatctgaacccagatataggaactgataaagatcctgagcagtgggaaaatgtccacaaaaaagtgatttccagtggctatgagatggtcaaaatgaaaggttatacttcttggggcattagcctatctgtagctgatttaacagaaagtattttgaagaatcttaggagagtgcatccagtttctaccctaagtaagggcctctatggaataaatgaagacatattccttagtgtcccatgtatcctgggagagaatggtatcacagacctcataaaagtaaaactgactcttgaagaggaggcctgcttgcaaaagagtgcagaaacactttgggaaattcagaaggagctcaagctttaaagttgcttaaagctaattctgtagattgaagatgaaatagtagttatggaattgtatatgtcaaacttttgaataaatttgaatttctaaaagttggaaaaatagaggaaagagtgacctatttagtatagccttccagcttttttttttttcttttttgggagggtctcattctgtcacccaggctggagtgcagtggcacaatcatggctcactgcaaccttgacctcccgagctcaggtgagcctcccacttcagcctccagagtaggtgggaccacatgcgtgtgcctccatgcctgcctaatttttgtatctttttgtagagatggggttttgccatgtcatccaagctggttttgaactcccaaagtgctgagattac

SEQ ID NO: 1518 - DNA, 2368 bp, Homo sapiens
agggacttcggaaccgccccgtcctcaagatcgaaaagcccagagccccgcggcggctccaagcacggtgttgggggtgggggtctcagggagcgcccaggcccaaggccgccctggtccggcgtggaccccgcggggctcaaggcaggttccccgcgtgacccgcccagcccctctatgcgaactcgaacgacaggcaccacagcccgccacgtgcgcgagactcgcgctgtgccccaacccaggtgggcggcccgcggagccgcgaggcctgagcccgccctgcaggtgacccgcggcccttcctcctccaggtacccctctcctgcggccccgtcccctataggtaacctttacctcccgcggctccttcccctccaagcgacccgcagccccgccccctccaggtgactcccccccgccaacccccgccaccacacacacacaccccctcgccttccgcggccctactccctccaggtgaccccacccccgcagctcctcctcctccggacaacctgcagccccgcccctgcaggtgaacggcggcccagtccctgcaggtgacccgcggaccctccccgcccgtcctactaccgtcataggaccgcctccgcaggcgcactggagccgattgcgcaggcgtggctctcacacgcgctgccctgttggcgttggtgcgggactgcgcaggmgcgcggggcaagaggstggcagtgcgcctgcgccgcgtcggcgtgcggaacgccgcggtgtctcggcgyctctgcgcgcgggaagatggcggaacaggctaccaaktccgtgctgtttgtgtgtctgggtaacatttgtcgatcacccattgcagaagcagttttcaggaaacttgtaaccgatcaaaacatctcagagaattgggtcattgayagcggtgctgtttctgactggaacgtgggccggtccccagacccaagagctgtgagctgcctaagaaatcatggcattcacacagcccataaagcaagacagattaccaaagaagattttgccacatttgattatatactatgtatggatgaaagcaatctgagagatttgaatagaaaaagtaatcragttaaaacctgcaaagctaaaattgaactacttgggagctatgatccacaaaaacaacttattattgaagatccctattatggraatgactytgactttgagacggtgtaccagcagtgtgtcaggtgctgcagagcgttcttggagaaggcccactgaggcaggttcrtgccctgctgcrgccagcctgactagaccccaccctgaggtcctgcatttctcagtcggtgtgtaatcacgttccagggcccaaagcccagctctttgttcagttgacttactgtttcttaccttaaaaagtaattgtagatggaaatcagttgtgtttggcaggagaatcaataaaaatstttgattcagacagcttatggggtattttaagcattcttagactagttgaacatctcactttgccccagttacaaaaatagtagaacaagcaacataaaacaatgaaggaaaacctcacttgaaggcccaggtcaacatctaagcctgttgagacttagataatcgagtctacctcttcagtaggtttgtgtggatggcctggagggcaggtgccctctgctccccagtgctacctctctcttccctagggccttttgtggattgacagtagtcccctccgtaggagctcacagtctagattagaagtgttttaatttctacacacccatagtgcacacttgtatattgaaaagatagggaagagagaaacatttatggaatcagtcgttggcaccttcaatacttcatgatttttgtcgagtttacttcatgaggaggtcagcccattggctccmatctgaaccactttgcctctgaaacttaattacatccagaaagraggamacttgtatgctagtctatggtcagttgaggaatatgactgtttttatatgcacatgtaacccaaatgtccaatataaattggcttattttttaaaataattttaaaagttgggaaaagtgttattatttggcatgcttaaatattgaataagtattcttcatcagcatttaataaatgtataggcagatgtaaggtaatttctgtgtattttgagataatgtcaaaatcatgaatatttcaaaataaactggggagttataaaaatacaactagagatataaatctggtgtctgcctgtttttttattgacaggtaaggaagcatttgaaaacattgtattgtcctttttacatgatctgtgatgttaggtgtgcatattttatcttcaggataaggaagtaaaatgatgaaaat

SEQ ID NO: 1519 - DNA, 2368 bp, Homo sapiens
agggacttcggaaccgccccgtcctcaagatcgaaaagcccagagccccgcggcggctccaagcacggtgttgggggtgggggtctcagggagcgcccaggcccaaggccgccctggtccggcgtggaccccgcggggctcaaggcaggttccccgcgtgacccgcccagcccctctatgcgaactcgaacgacaggcaccacagcccgccacgtgcgcgagactcgcgctgtgccccaacccaggtgggcggcccgcggagccgcgaggcctgagcccgccctgcaggtgacccgcggcccttcctcctccaggtacccctctcctgcggccccgtcccctataggtaacctttacctcccgcggctccttcccctccaagcgacccgcagccccgccccctccaggtgactcccccccgccaacccccgccaccacacacacacaccccctcgccttccgcggccctactccctccaggtgaccccacccccgcagctcctcctcctccggacaacctgcagccccgcccctgcaggtgaacggcggcccagtccctgcaggtgacccgcggaccctccccgcccgtcctactaccgtcataggaccgcctccgcaggcgcactggagccgattgcgcaggcgtggctctcacacgcgctgccctgttggcgttggtgcgggactgcgcaggmgcgcggggcaagaggstggcagtgcgcctgcgccgcgtcggcgtgcggaacgccgcggtgtctcggcgyctctgcgcgcgggaagatggcggaacaggctaccaaktccgtgctgtttgtgtgtctgggtaacatttgtcgatcacccattgcagaagcagttttcaggaaacttgtaaccgatcaaaacatctcagagaattggagggtagacagygcggcaacttccgggtatgagatagggaaccccccwgactaccragrgcwgagctgcmtgaagaggcacggcattcccatgagccacgttgcccggcagattaccaaagaagattttgccacatttgattatatactatgtatggatgaaagcaatctgagagatttgaatagaaaaagtaatcragttaaaacctgcaaagctaaaattgaactacttgggagctatgatccacaaaaacaacttattattgaagatccctattatggraatgactytgactttgagacggtgtaccagcagtgtgtcaggtgctgcagagcgttcttggagaaggcccactgaggcaggttcrtgccctgctgcrgccagcctgactagaccccaccctgaggtcctgcatttctcagtcggtgtgtaatcacgttccagggcccaaagcccagctctttgttcagttgacttactgtttcttaccttaaaaagtaattgtagatggaaatcagttgtgtttggcaggagaatcaataaaaatstttgattcagacagcttatggggtattttaagcattcttagactagttgaacatctcactttgccccagttacaaaaatagtagaacaagcaacataaaacaatgaaggaaaacctcacttgaaggcccaggtcaacatctaagcctgttgagacttagataatcgagtctacctcttcagtaggtttgtgtggatggcctggagggcaggtgccctctgctccccagtgctacctctctcttccctagggccttttgtggattgacagtagtcccctccgtaggagctcacagtctagattagaagtgttttaatttctacacacccatagtgcacacttgtatattgaaaagatagggaagagagaaacatttatggaatcagtcgttggcaccttcaatacttcatgatttttgtcgagtttacttcatgaggaggtcagcccattggctccmatctgaaccactttgcctctgaaacttaattacatccagaaagraggamacttgtatgctagtctatggtcagttgaggaatatgactgtttttatatgcacatgtaacccaaatgtccaatataaattggcttattttttaaaataattttaaaagttgggaaaagtgttattatttggcatgcttaaatattgaataagtattcttcatcagcatttaataaatgtataggcagatgtaaggtaatttctgtgtattttgagataatgtcaaaatcatgaatatttcaaaataaactggggagttataaaaatacaactagagatataaatctggtgtctgcctgtttttttattgacaggtaaggaagcatttgaaaacattgtattgtcctttttacatgatctgtgatgttaggtgtgcatattttatcttcaggataaggaagtaaaatgatgaaaat

SEQ ID NO: 1520 - DNA, 2306 bp, Homo sapiens
agggacttcggaaccgccccgtcctcaagatcgaaaagcccagagccccgcggcggctccaagcacggtgttgggggtgggggtctcagggagcgcccaggcccaaggccgccctggtccggcgtggaccccgcggggctcaaggcaggttccccgcgtgacccgcccagcccctctatgcgaactcgaacgacaggcaccacagcccgccacgtgcgcgagactcgcgctgtgccccaacccaggtgggcggcccgcggagccgcgaggcctgagcccgccctgcaggtgacccgcggcccttcctcctccaggtacccctctcctgcggccccgtcccctataggtaacctttacctcccgcggctccttcccctccaagcgacccgcagccccgccccctccaggtgactcccccccgccaacccccgccaccacacacacacaccccctcgccttccgcggccctactccctccaggtgaccccacccccgcagctcctcctcctccggacaacctgcagccccgcccctgcaggtgaacggcggcccagtccctgcaggtgacccgcggaccctccccgcccgtcctactaccgtcataggaccgcctccgcaggcgcactggagccgattgcgcaggcgtggctctcacacgcgctgccctgttggcgttggtgcgggactgcgcaggmgcgcggggcaagaggstggcagtgcgcctgcgccgcgtcggcgtgcggaacgccgcggtgtctcggcgyctctgcgcgcgggaagatggcggaacaggctaccaaktccgtgctgtttgtgtgtctgggtaacatttgtcgatcacccattgcagaagcagttttcaggaaacttgtaaccgatcaaaacatctcagagaattgggtcattgayagcggtgctgtttctgactggaacgtgggccggtccccagacccaagagctgtgagctgcctaagaaatcatggcattcacacagcccataaagcaagacagagatttgaatagaaaaagtaatcragttaaaacctgcaaagctaaaattgaactacttgggagctatgatccacaaaaacaacttattattgaagatccctattatggraatgactytgactttgagacggtgtaccagcagtgtgtcaggtgctgcagagcgttcttggagaaggcccactgaggcaggttcrtgccctgctgcrgccagcctgactagaccccaccctgaggtcctgcatttctcagtcggtgtgtaatcacgttccagggcccaaagcccagctctttgttcagttgacttactgtttcttaccttaaaaagtaattgtagatggaaatcagttgtgtttggcaggagaatcaataaaaatstttgattcagacagcttatggggtattttaagcattcttagactagttgaacatctcactttgccccagttacaaaaatagtagaacaagcaacataaaacaatgaaggaaaacctcacttgaaggcccaggtcaacatctaagcctgttgagacttagataatcgagtctacctcttcagtaggtttgtgtggatggcctggagggcaggtgccctctgctccccagtgctacctctctcttccctagggccttttgtggattgacagtagtcccctccgtaggagctcacagtctagattagaagtgttttaatttctacacacccatagtgcacacttgtatattgaaaagatagggaagagagaaacatttatggaatcagtcgttggcaccttcaatacttcatgatttttgtcgagtttacttcatgaggaggtcagcccattggctccmatctgaaccactttgcctctgaaacttaattacatccagaaagraggamacttgtatgctagtctatggtcagttgaggaatatgactgtttttatatgcacatgtaacccaaatgtccaatataaattggcttattttttaaaataattttaaaagttgggaaaagtgttattatttggcatgcttaaatattgaataagtattcttcatcagcatttaataaatgtataggcagatgtaaggtaatttctgtgtattttgagataatgtcaaaatcatgaatatttcaaaataaactggggagttataaaaatacaactagagatataaatctggtgtctgcctgtttttttattgacaggtaaggaagcatttgaaaacattgtattgtcctttttacatgatctgtgatgttaggtgtgcatattttatcttcaggataaggaagtaaaatgatgaaaat

SEQ ID NO: 1521 - DNA, 2306 bp, Homo sapiens
agggacttcggaaccgccccgtcctcaagatcgaaaagcccagagccccgcggcggctccaagcacggtgttgggggtgggggtctcagggagcgcccaggcccaaggccgccctggtccggcgtggaccccgcggggctcaaggcaggttccccgcgtgacccgcccagcccctctatgcgaactcgaacgacaggcaccacagcccgccacgtgcgcgagactcgcgctgtgccccaacccaggtgggcggcccgcggagccgcgaggcctgagcccgccctgcaggtgacccgcggcccttcctcctccaggtacccctctcctgcggccccgtcccctataggtaacctttacctcccgcggctccttcccctccaagcgacccgcagccccgccccctccaggtgactcccccccgccaacccccgccaccacacacacacaccccctcgccttccgcggccctactccctccaggtgaccccacccccgcagctcctcctcctccggacaacctgcagccccgcccctgcaggtgaacggcggcccagtccctgcaggtgacccgcggaccctccccgcccgtcctactaccgtcataggaccgcctccgcaggcgcactggagccgattgcgcaggcgtggctctcacacgcgctgccctgttggcgttggtgcgggactgcgcaggmgcgcggggcaagaggstggcagtgcgcctgcgccgcgtcggcgtgcggaacgccgcggtgtctcggcgyctctgcgcgcgggaagatggcggaacaggctaccaaktccgtgctgtttgtgtgtctgggtaacatttgtcgatcacccattgcagaagcagttttcaggaaacttgtaaccgatcaaaacatctcagagaattggagggtagacagygcggcaacttccgggtatgagatagggaaccccccwgactaccragrgcwgagctgcmtgaagaggcacggcattcccatgagccacgttgcccggcagagatttgaatagaaaaagtaatcragttaaaacctgcaaagctaaaattgaactacttgggagctatgatccacaaaaacaacttattattgaagatccctattatggraatgactytgactttgagacggtgtaccagcagtgtgtcaggtgctgcagagcgttcttggagaaggcccactgaggcaggttcrtgccctgctgcrgccagcctgactagaccccaccctgaggtcctgcatttctcagtcggtgtgtaatcacgttccagggcccaaagcccagctctttgttcagttgacttactgtttcttaccttaaaaagtaattgtagatggaaatcagttgtgtttggcaggagaatcaataaaaatstttgattcagacagcttatggggtattttaagcattcttagactagttgaacatctcactttgccccagttacaaaaatagtagaacaagcaacataaaacaatgaaggaaaacctcacttgaaggcccaggtcaacatctaagcctgttgagacttagataatcgagtctacctcttcagtaggtttgtgtggatggcctggagggcaggtgccctctgctccccagtgctacctctctcttccctagggccttttgtggattgacagtagtcccctccgtaggagctcacagtctagattagaagtgttttaatttctacacacccatagtgcacacttgtatattgaaaagatagggaagagagaaacatttatggaatcagtcgttggcaccttcaatacttcatgatttttgtcgagtttacttcatgaggaggtcagcccattggctccmatctgaaccactttgcctctgaaacttaattacatccagaaagraggamacttgtatgctagtctatggtcagttgaggaatatgactgtttttatatgcacatgtaacccaaatgtccaatataaattggcttattttttaaaataattttaaaagttgggaaaagtgttattatttggcatgcttaaatattgaataagtattcttcatcagcatttaataaatgtataggcagatgtaaggtaatttctgtgtattttgagataatgtcaaaatcatgaatatttcaaaataaactggggagttataaaaatacaactagagatataaatctggtgtctgcctgtttttttattgacaggtaaggaagcatttgaaaacattgtattgtcctttttacatgatctgtgatgttaggtgtgcatattttatcttcaggataaggaagtaaaatgatgaaaat

SEQ ID NO: 1522 - DNA, 2397 bp, Homo sapiens
agggacttcggaaccgccccgtcctcaagatcgaaaagcccagagccccgcggcggctccaagcacggtgttgggggtgggggtctcagggagcgcccaggcccaaggccgccctggtccggcgtggaccccgcggggctcaaggcaggttccccgcgtgacccgcccagcccctctatgcgaactcgaacgacaggcaccacagcccgccacgtgcgcgagactcgcgctgtgccccaacccaggtgggcggcccgcggagccgcgaggcctgagcccgccctgcaggtgacccgcggcccttcctcctccaggtacccctctcctgcggccccgtcccctataggtaacctttacctcccgcggctccttcccctccaagcgacccgcagccccgccccctccaggtgactcccccccgccaacccccgccaccacacacacacaccccctcgccttccgcggccctactccctccaggtgaccccacccccgcagctcctcctcctccggacaacctgcagccccgcccctgcaggtgaacggcggcccagtccctgcaggtgacccgcggaccctccccgcccgtcctactaccgtcataggaccgcctccgcaggcgcactggagccgattgcgcaggcgtggctctcacacgcgctgccctgttggcgttggtgcgggactgcgcaggmgcgcggggcaagaggstggcagtgcgcctgcgccgcgtcggcgtgcggaacgccgcggtgtctcggcgyctctgcgcgcgggaagatggcggaacaggctaccaaktccgtgctgtttgtgtgtctgggtaacatttgtcgatcacccattgcagaagcagttttcaggaaacttgtaaccgatcaaaacatctcagagaattggagggtagacagygcggcaacttccggtgggtcattgayagcggtgctgtttctgactggaacgtgggccggtccccagacccaagagctgtgagctgcctaagaaatcatggcattcacacagcccataaagcaagacagattaccaaagaagattttgccacatttgattatatactatgtatggatgaaagcaatctgagagatttgaatagaaaaagtaatcragttaaaacctgcaaagctaaaattgaactacttgggagctatgatccacaaaaacaacttattattgaagatccctattatggraatgactytgactttgagacggtgtaccagcagtgtgtcaggtgctgcagagcgttcttggagaaggcccactgaggcaggttcrtgccctgctgcrgccagcctgactagaccccaccctgaggtcctgcatttctcagtcggtgtgtaatcacgttccagggcccaaagcccagctctttgttcagttgacttactgtttcttaccttaaaaagtaattgtagatggaaatcagttgtgtttggcaggagaatcaataaaaatstttgattcagacagcttatggggtattttaagcattcttagactagttgaacatctcactttgccccagttacaaaaatagtagaacaagcaacataaaacaatgaaggaaaacctcacttgaaggcccaggtcaacatctaagcctgttgagacttagataatcgagtctacctcttcagtaggtttgtgtggatggcctggagggcaggtgccctctgctccccagtgctacctctctcttccctagggccttttgtggattgacagtagtcccctccgtaggagctcacagtctagattagaagtgttttaatttctacacacccatagtgcacacttgtatattgaaaagatagggaagagagaaacatttatggaatcagtcgttggcaccttcaatacttcatgatttttgtcgagtttacttcatgaggaggtcagcccattggctccmatctgaaccactttgcctctgaaacttaattacatccagaaagraggamacttgtatgctagtctatggtcagttgaggaatatgactgtttttatatgcacatgtaacccaaatgtccaatataaattggcttattttttaaaataattttaaaagttgggaaaagtgttattatttggcatgcttaaatattgaataagtattcttcatcagcatttaataaatgtataggcagatgtaaggtaatttctgtgtattttgagataatgtcaaaatcatgaatatttcaaaataaactggggagttataaaaatacaactagagatataaatctggtgtctgcctgtttttttattgacaggtaaggaagcatttgaaaacattgtattgtcctttttacatgatctgtgatgttaggtgtgcatattttatcttcaggataaggaagtaaaatgatgaaaat

SEQ ID NO: 1523 - DNA, 2056 bp, Homo sapiens
gggacagagccccaggagaggcagagagtgagggaaagggcctggccggcatgcacagataggatcackgtcctgggagaattcctgctcttatagtctaacctaccatggcttctcttttctcaaggctccctcatgctgccctttggccctagtggctggtttccagggctgaggggactgagtgagctgcctgagaaaagagggtagggaacagaaaagccagccaggagctgtgggaggaaacgccctcagtaaagatgaccgcggtcactgttatctaaacgcaagtgaagccgagtcacaggacccggatgttgtcagttcgacggtaaacgaccctgccagcttccaagagggcggcttcactgtgcgaataggtgagaagccaagaaggaggcgcgctggagttacttccgcccggttctccttcccgcagtctgcagccggagtaagatggcggcgctgagggctttgtgcggcttccggggcgtcgcggcccaggtgctgcggcctggggctggagtccgattgccgattcagcccagcagaggtgttcggcagtggcagccagatgtggaatgggcacagcagtttgggggagctgttatgtacccaagcaaagaaacagcccactggaagcctccaccttggaatgatgtggaccctccaaaggacacaattgtgaagaacattaccctgaactttgggccccaacacccagcagcgcatggtgtcctgcgactagtgatggaattgagtggggagatggtgcggaagtgtgatcctcacatcgggctcctgcaccgaggcactgagaagctcattgaatacaagacctatcttcaggcccttccatactttgaccggctagactatgtgtccatgatgtgtaacgaacaggcctattctctagctgtggagaagttgctaaacatccggcctcctcctcgggcacagtggatccgagtgctgtttggagaaatcacacgtttgttgaaccacatcatggctgtgaccacacatgccctggaccttggggccatgacccctttcttctggctgtttgaagaaagggagaagatgtttgagttctacgagcgagtgtctggagcccgaatgcatgctgcttatatccrgcmaggaggagtgcaccaggacctaccccttgggcttatggatgacatttatcagttttctaagaacttctctcttcggcttgatgagttggaggagttgctgaccaacaataggatctggcgaaatcggacaattgacattggggttgtaacagcagaagaagcacttaactatggttttagtggagtgatgcttcggggctcaggcatccagtgggacctgcggaagacccagccctatgatgtttacgaccaggttgagtttgatgttcctgttggttctcraggggactgctatgataggtacctgtgccgggtggaggagatgcgccagtccctgagaattatcgcacagtgtctaaacaagatgsctcctggggagatcaaggttgatgatgccaaagtgtctccacctaagcgagcagagatgaagacttccatggagtcactgattcatcactttaagttgtatactgagggctaccaagttcctccaggagccacatatactgccattgaggctcccaagggagagtttggggtgtacctggtgtctgatggcagcagccgcccttatcgatgcaagatcaaggctcctggttttgcycatctggctggtttggacaagatgtctaagggacacatgttggcagatgtcgttgccatcataggtacccaagatattgtatttggagaagtagatcggtgagcaggggagcagcgtttgatcccccctgcctatcagctyyttctgtggagcctgttcctcactggaaattggcctctgtgtgtgtgtgtgtgtgtgtgtgtgtgtgkatgttcatgtacacttggctgtcaggctttctgtgcatgtactaaaaaaggagaaattataataaattagccgtcttgcggcccctaggcctaaacttctg

SEQ ID NO: 1524 - DNA, 1892 bp, Homo sapiens
aagaaggggaggagaaggggacgccacatcccagggctgcgggagccccagagaaaagccagccaggagctgtgggaggaaacgccctcagtaaagatgaccgcggtcactgttatctaaacgcaagtgaagccgagtcacaggacccggatgttgtcagttcgacggtaaacgaccctgccagcttccaagagggcggcttcactgtgcgaataggtgagaagccaagaaggaggcgcgctggagttacttccgcccggttctccttcccgcagtctgcagccggagtaagatggcggcgctgagggctttgtgcggcttccggggcgtcgcggcccaggtgctgcggcctggggctggagtccgattgccgattcagcccagcagaggtgttcggcagtggcagccagatgtggaatgggcacagcagtttgggggagctgttatgtacccaagcaaagaaacagcccactggaagcctccaccttggaatgatgtggaccctccaaaggacacaattgtgaagaacattaccctgaactttgggccccaacacccagcagcgcatggtgtcctgcgactagtgatggaattgagtggggagatggtgcggaagtgtgatcctcacatcgggctcctgcaccgaggcactgagaagctcattgaatacaagacctatcttcaggcccttccatactttgaccggctagactatgtgtccatgatgtgtaacgaacaggcctattctctagctgtggagaagttgctaaacatccggcctcctcctcgggcacagtggatccgagtgctgtttggagaaatcacacgtttgttgaaccacatcatggctgtgaccacacatgccctggaccttggggccatgacccctttcttctggctgtttgaagaaagggagaagatgtttgagttctacgagcgagtgtctggagcccgaatgcatgctgcttatatccrgcmaggaggagtgcaccaggacctaccccttgggcttatggatgacatttatcagttttctaagaacttctctcttcggcttgatgagttggaggagttgctgaccaacaataggatctggcgaaatcggacaattgacattggggttgtaacagcagaagaagcacttaactatggttttagtggagtgatgcttcggggctcaggcatccagtgggacctgcggaagacccagccctatgatgtttacgaccaggttgagtttgatgttcctgttggttctcraggggactgctatgataggtacctgtgccgggtggaggagatgcgccagtccctgagaattatcgcacagtgtctaaacaagatgsctcctggggagatcaaggttgatgatgccaaagtgtctccacctaagcgagcagagatgaagacttccatggagtcactgattcatcactttaagttgtatactgagggctaccaagttcctccaggagccacatatactgccattgaggctcccaagggagagtttggggtgtacctggtgtctgatggcagcagccgcccttatcgatgcaagatcaaggctcctggttttgcycatctggctggtttggacaagatgtctaagggacacatgttggcagatgtcgttgccatcataggtacccaagatattgtatttggagaagtagatcggtgagcaggggagcagcgtttgatcccccctgcctatcagctyyttctgtggagcctgttcctcactggaaattggcctctgtgtgtgtgtgtgtgtgtgtgtgtgtgtgkatgttcatgtacacttggctgtcaggctttctgtgcatgtactaaaaaaggagaaattataataaattagccgtcttgcggcccctaggcctaaacttctg

SEQ ID NO: 1525 - DNA, 1407 bp, Homo sapiens
ggggacgccggacgccgtccggacattcggcgcgcttgccacgatcttggacgggtctcgggcctcgacctttgaattccccgctccggctccaagatgtcagcaacgctgatcctggagcccccaggccgctgctgctggaacgagccgaagggcgcgctcttccgggcccacgcgcgctactgcgccgacgccygcggcgagctggacctggagcgcgcacccgcgctgggcggcagcttcgcgggactcgagcccatggggctgctctgggccctggaacccgagaagcctttttggcgcttcctgaagcgggacgtacagattccttttgtcgtggagttggaggtgctggacggccacgaccccgagcctggacggctgctgtgccaggcgcagcacgagcgccacttcctcccgccaggggtgcggcgccagtcggtgcgagcgggccgggtgcgcgccacgctcttcctgccgccaggacctggacccttcccagggatcattgacatctttggtattggagggggcctcttggaatatcgagccagcctccttgctggccatggctttgccacgttggmtctagcttattataactttgaagatctccccaataacatggacaacatatccctggagtacttygaagaagccgtatgctacatgcttcaacatccccaggtaaaaggcccaggcattgggcttttgggcatttctctaggagctgatatttgtctctcaatggcctcattcttgaagaatgtctcagccacagtttccatcaatggatctgggatcagtgggaacacagccatcaactataagcacagtagcattccaccattgggctatgacctgaggagaatcaaggtagctttctcaggcctcgtggacatygtggatataaggaatgctctcgtaggagggtacaagaaccccagcatgattccaatagagaaggcccaggggcccatcctgctcattgttggtcaggatgaccataactggagaagtgagttgtatgcccaaacagtytctgaacggttacaggcccatggaaaggaaaaaccccagatcatctgttaccctgggactgggcattacatcgagcctccttacttccccctgtgcccagcttcccttcacagattactgaacaaacatgttatatggggtggggagcccagggctcattctaaggcccaggaagatgcctggaagcaaattctagccttcttctgcaaacacctgggaggtacccagaaaacagctgtccctaaattgtaatgcatttgtctgttgttgacatgagagattcaagatcagattctagtgttcartaaccctatgtgaatcagatgtctcctggataacattaaagccatgtctttgtcattaatg

SEQ ID NO: 1526 - DNA, 870 bp, Homo sapiens
agctgcggggcgcgggctcggccggggcaccggtgagtcgccggcgctgcagagggaggcggcactggtctcgacgtggggcggccagcgatgaagccgcccagttcaatacaaacaagtgagtttgactcatcagatgaagagcctattgaagatgaacagactccaattcatatatcatggctatctttgtcacgagtgaattgttctcagtttctcggtttatgtgctcttccaggttgtaaatttaaagatgttagaagaaatgtccaaaaagatacagaagaactaaagagctgtggtatacaagacatatttgttttctgcaccagaggggaactgtcaaaatatagagtcccaaaccttctggatctctaccagcaatgtggaattatcacccatcatcatccaatcgcagatggagggactcctgacatagccagctgctgtgaaataatggaagagcttacaacctgccttaaaaattaccgaaaaaccttaatacactgctatggaggacttgggagatcttgtcttgtagctgcttgtctcctactatacctgtytgacacaatatcaccagagcaagccatagacagcctgcgagacctaagaggatccggggcaatacagaccatcaagcaatacaattatcttcatgagtttcgggacaaattagctgcacatctatcatcaagagattcacaatcaagatctgtatcaagataaaggaattcaaatagcatatatatgaccatgtctgaaatgtcagttctctagcataatttgtattgaaatgaaaccaccagtgttatcaacttgaatgtaaatgtacatgtgcagatattcctaaagttttattgacaaaac

SEQ ID NO: 1527 - DNA, 1135 bp, Homo sapiens
atgggaccatctttagacaagcaaagatggaagagcataatgcctgggggtggggtaattagttgcgatacgagctacgcagcatgcaaggttgrcgtattgaaatggaggatgcacatacggctgtgattgctttgccaagtggacttgaaaggtggtcattctttgctgtgtataacgggcatcctggttctcaggttgccaaatactgctgtgagcatttgttagatcacatcgccgataaccaggatttacagggtctgcaggagcaccttctttggaaaatgtaaagaatggaatcagaacaggtttcctggagattgatgaacacgagagttatgtcagagaagaaacatggtgcagatakaagtgggtcaacagatgtaagcgtcttactttctccccaacataattatttcattaactatgaagactctagacgtttactttgtagraacaggaaagttcatttcttcacaaattgcaaatccgctagaaaaagaatgaattcagaatgcaggtggctctgtaatgctttagcatgtgaaagcctctctggctgtatccaaagcccttggggattttgattacaaatgtatccatgggaaaggtcctactgggcagcttgtctcaccagagcctgaagtccatgacactgaaagatctgaagaagatgatcacttcattatccttgcatgtgatagtatytgggatgttatgggaaatgaagagctctgtgattttgtaagatccaggcttgaagtcactgatgaccctgagaaagtttacaatgaaatagtcgacacctgtttgcataagggaagtcaagacaacatgtgtgtgattttttctctggtttccaaatgcacccaaagtatcaccagaagcagcgaagaaggaggcagagttgggcaagtacctggaatgcagagtagaagaaatcataaagaagcagggggaaggtgtccctgacttagtccatgtggtgtacacattagccaatgagaacatccccagactgccacctggaggtgaattggcaaacaagcaaaatgttattgaagccatttataaaagacggaatctttataaaaatgatgacagtgactccacatcaactgatgctatgtgctaa

SEQ ID NO: 1528 - DNA, 2118 bp, Homo sapiens
ccttttctgacgakgcgaacaacatggcggcggaaartggtagcgattttcagcagagacgtagaaggcgccgggacccggaggaaccggaaaaaacagaactcagcgaaagagagctggcagtagcagtggcggtgtcccaggagaacgatgaggagaacgaagagcgctgggttggacctttacctgtggaggcaacactggccaagaagaggaaagtcttagagtttgaaagagtctatcttgataatctccccagtgcatccatgtatgagcgcagttacatgcatagagatgttatcacccatgtggtatgcaccaaaacagattttattattactgccagtcatgatggacatgtcaagttctggaaaaaaatagaagagggaattgaatttgttaaacattttcgtagtcacctgggagttattgagagtattgcagttagctctgagggagcattgttctgttctgtgggtgatgataaagcaatgaaggtgtttgatgtagtgaactttgacatgatcaacatgctgaaacttggctattttcctggacagtgtgagtggatctattgcccaggggatgcaatttcttcagttgctgcttccgaaaagagtacaggaaaaattttcatttatgatggccgaggagataaccagccacttcatatttttgacaaactccatacatcacctcttactcagatacggctaaacccagtttacaaagcagtagtgtcttctgacaaatctgggatgattgaatactggactgggcctcctcatgaatataaattccccaaaaatgtgaactgggaatataaaactgacactgatttatatgaatttgccaagtgtaaggcttatccaaccagcgtatgtttttcaccagatgggaagaaaatagctactattggttctgatagaaaagttagaattttcagatttgtaactggaaaactcatgagagtctttgatgaatcactaagcatgtttactgaactgcaacagatgaggcaacagttaccagacatggaatttggccgacgaatggctgtagaacgtgagttggagaaggttgatgctgtaagattaattaatatagtttttgatgaaactggacacttcgtgctgtatggaacaatgctgggcattaaagttataaatgtagagacaaaccggtgtgtgcggattttaggcaaacaagaaaatattagagtgatgcaattggctttgttccaggggatagccaaaaagcatcgtgctgcaactactatagaaatgaaagcttctgaaaatcctgttcttcagaatattcaagctgacccaacaatagtctgtacatcattcaaaaagaatagattttatatgtttaccaaacgagaaccagaagatacgaaaagtgcagattctgatcgagatgtttttaatgagaaaccttctaaagaagaagtcatggcagctactcaagctgaaggacctaaacgagtttcggacagtgccattatccacaccagcatgggagacattcacaccaaactttttcctgttgagtgccctaagacagtggaaaacttctgtgttcacagcagaaatggttattataatgggcatacatttcaccgtataattaagggctttatgattcagactggagatccaacaggtactggtatgggaggagaaagcatatggggaggagaatttgaagatgaatttcattcaacattacgacatgacaggccrtacacactcagcatggctaacgcgggatcaaatactaatggatcccagtttttcataacggtagtaccaacgccttggcttgataataagcatacagtatttggacgagtgactaaaggaatggaagttgtacagaggatctccaacgtcaaagtcaatcccaaaacagataagccctatgaggatgtcagcatcataaatattactgtcaagtaaaataagatttgttttaatgtacttgcamataaaaatacaatattaaacagattattttacattaggaagcttaggacttgctgaatatacagatcatgtttcaaagatacagtatttttgtattttttattaaaggctattttttaaaaattac

SEQ ID NO: 1529 - DNA, 2447 bp, Homo sapiens
atctgcggaagtggagtgcggggagtgcgccggaasaggggtacggaagtgcgccggaagtggggtgcggaggtgtgcagcgcgctgtcagactggctcgcaggcggcgcggccggcggacccgttcgagacagcgcgggcggctcgggtcccctggggctccgcagcaggaggacgccatggacgacaaggagttaattgaatactttaagtctcagatgaaagaagatcctgacatggcctcagcagtggctgccatccggacgttgctggagttcttgaagagagataaaggggagacaatccagggtctgagggcgaatctcaccagtgccatagaaaccctgtgtggtgtggactcctctgtggcagtgtcctctggcggggagctcttcctccgcttcatcagtcttgcctccctggaatactccgattactccaaatgtaaaaagatcatgattgagmggggagaactttttctcaggagaatatcactgtcaagaaacaaaattgcagatctgtgccatactttcatcaaagatggagcgacaatattgactcacgcctactccagagtggtcctgagagtcctggaagcagccgtggcggccaagaagcgatttagtgtatacgtcacagagtcacagcctgatttgtcaggtaagaaaatggccaaagccctctgccacctcaacgtccctgtcactgtggtgctagatgctgctgtcggctacatcatggagaaagcagatcttgtcatagttggtgctgaaggagttgttgaaaacggaggaattattwacaagattggaaccaaccagatggctgtgtgtgccaaagcacagaacaaacctttctatgtggttgcagaaagtttcaagtttgtccggctctttccactaaaccagcaagacgtcccagataagtttaagtataaggcagacactctcaaggtcgcgcagactggacaagacctcaaagaggagcatccgtgggtcgactacactgccccttccttaatcactctgctgtttacagacctgggcgtgctgacaccctcagcagtcagcgatgagctcatcaagctctatctgtaacctgtgagccctttcctgccaaggtgcagcttacgtagttgaggcagggtgagtagctgcttgacaccccagtgagtcaggccaaaactgagatgtgtttaatgaagatttatggagtaaggacttaaaatcatacatcttggagaacctttcttactcatttcagtcccatctaaaaatgtgtcagctattctaaatcccaacttaaattgttcttacggtttctagaaactttccttttcagtttccagaaatacaagttagataattggctacttaactgatgaaagatgagcccaagtccacctgtcttcatcctcccctgcactccagactgatctrcctaaagcacgcragatgcaggcgaaaagcagccayacccctctgccacaaaygaccaacagctggtcaggacgttacacgcggtgccttgtaagaggcaagaaacacttgccgaatctgcrtctggcttccagtggtaagcacattcctcagcaggatcaagccaaacagtaaaaactaccaagagaacacgaggaaggcagaaacgatgtttagcaacagtattctgcatggttcactgcttaagaaaatgccttctggaatatttgtaaactgaaattctgtatgtgtaagagatgtttaaatatgtttgggtcctaaayagctttttaaaattatacttgggaataaattcagcatcttttcaaataaactctatgaaagacgctgatgtggtgttgcatcaatactgcaagctgaccaggccatctaggggaaaacactgtccagctacatttacacacttaagacccaggcaatcaggacaccatttattcaacaggaggcataaaaactataattctctttcccggaatatgacttaatccctctgtttttcagctattcaccaataaaacaatactgtgactattaacacagaaaaaccccagcacattagccacccctgcaggrcatcaaaggataactgaagcccagggccaagcacattcaggaggtcaaatgcctgaagatactgaggaatggttttgaaaatcagaagtcaagaagacttcwgtatctttatgtttaaaaataactataaaatagcctcagaaaaaagagcttatatatatatatatatatatatatatatatatatatatatatatataatatgtacatatgtctatatgtgacccatcatgataaatactgacatctattatttacactcaaataattttacattttcttctgttagactactccaagactggaattgttttgttttgttgtttttaatgagagggtctcgctgtgttcccaggctggtcttgaactcctggg

SEQ ID NO: 1530 - DNA, 2889 bp, Homo sapiens
atctgcggaagtggagtgcggggagtgcgccggaasaggggtacggaagtgcgccggaagtggggtgcggaggtgtgcagcgcgctgtcagactggctcgcaggcggcgcggccggcggacccgttcgagacagcgcgggcggctcgggtcccctggggctccgcagcaggaggacgccatggacgacaaggagttaattgaatactttaagtctcagatgaaagaagatcctgacatggcctcagcagtggctgccatccggacgttgctggagttcttgaagagagataaaggggagacaatccagggtctgagggcgaatctcaccagtgccatagaaaccctgtgtggtgtggactcctctgtggcagtgtcctctggcggggagctcttcctccgcttcatcagtcttgcctccctggaatactccgattactccaaatgtaaaaagatcatgattgagmggggagaactttttctcaggagaatatcactgtcaagaaacaaaattgcagatctgtgccatactttcatcaaagatggagcgacaatattgactcacgcctactccagagtggtcctgagagtcctggaagcagccgtggcggccaagaagcgatttagtgtatacgtcacagagtcacagcctgatttgtcagggcaaaaaatggccaaagccctctgccacctcaacgtccctgtcactgtggtgctagatgctgctgtcggctacatcatggagaaagcagatcttgtcatagttggtgctgaaggagttgttgaaaacggaggaattattwacaagattggaaccaaccagatggctgtgtgtgccaaagcacagaacaaacctttctatgtggttgcagaaagtttcaagtttgtccggctctttccactaaaccagcaagacgtcccagataagtttaaggcaagagcagacactctcaaggtcgcgcagactggacaagacctcaaagaggagcatccgtgggtcgactacactgccccttccttaatcactctgctgtttacagacctgggcgtgctgacaccctcagcagtcagcgatgagctcatcaagctctatctgtaacctgtgagccctttcctgccaaggtgcagcttacgtagttgaggcagggtgagtagctgcttgacaccccagtgagtcaggccaaaactgagatgtgtttaatgaagatttatggagtaaggacttaaaatcatacatcttggagaacctttcttactcatttcagtcccatctaaaaatgtgtcagctattctaaatcccaacttaaattgttcttacggtttctagaaactttccttttcagtttccagaaatacaagttagataattggctacttaactgatgaaagatgagcccaagtccacctgtcttcatcctcccctgcactccagactgatctrcctaaagcacgcragatgcaggcgaaaagcagccayacccctctgccacaaaygaccaacagctggtcaggacgttacacgcggtgccttgtaagaggcaagaaacacttgccgaatctgcrtctggcttccagtggtaagcacattcctcagcaggatcaagccaaacagtaaaaactaccaagagaacacgaggaaggcagaaacgatgtttagcaacagtattctgcatggttcactgcttaagaaaatgccttctggaatatttgtaaactgaaattctgtatgtgtaagagatgtttaaatatgtttgggtcctaaayagctttttaaaattatacttgggaataaattcagcatcttttcaaataaactctatgaaagacgctgatgtggtgttgcatcaatactgcaagctgaccaggccatctaggggaaaacactgtccagctacatttacacacttaagacccaggcaatcaggacaccatttattcaacaggaggcataaaaactataattctctttcccggaatatgacttaatccctctgtttttcagctattcaccaataaaacaatactgtgactattaacacagaaaaaccccagcacattagccacccctgcaggrcatcaaaggataactgaagcccagggccaagcacattcaggaggtcaaatgcctgaagatactgaggaatggttttgaaaatcagaagtcaagaagacttcwgtatctttatgtttaaaaataactataaaatagcctcagaaaaaagagcttatatatatatatatatatatatatatatatatatatatatatatataatatgtacatatgtctatatgtgacccatcatgataaatactgacatctattatttacactcaaataattttacattttcttctgttagactactccaagactggaattgttttgttttgttgtttttaatgagagggtctcgctgtgttcccaggctggtcttgaactcctgggctcaagtgatcctcctgcctcagcctcccaaagtgctgggattataggcaggagccaccgcacccggccaagactggaatgtttttagtaaaatattctgaagtgtgaaatccttcatttctccctcatctgaaaggacagctttcagagacatcattcttttcagatgtctcctgaagttgtgattttcgttaaaagcaaactggagccatccaccaagttagggaacagctatgtccttgtgggttcatctgtggcactggaatyagcagtcatcttccaaatctgagatccctaaatccactgtcttgattgttcttttgccagttgtcaacaagcccttctcaaattcttcttcagttattttgcctttcttaagttttttcaagagtcttgtgtcattaagaagttcttccatgtcctcatcttcaatatcagaacc

SEQ ID NO: 1531 - DNA, 2255 bp, Homo sapiens
agttaattgaatactttaagtctcagatgaaagaagatcctgacatggcctcagcagtggctgccatccggacgttgctggagttcttgaagagagataaaggggagacaatccagggtctgagggcgaatctcaccagtgccatagaaaccctgtgtggtgtggactcctctgtggcagtgtcctctggcggggagctcttcctccgcttcatcagtcttgcctccctggaatactccgattactccaaatgtaaaaagatcatgattgagmggggagaactttttctcaggagaatatcactgtcaagaaacaaaattgcagatctgtgccatactttcatcaaagatggagcgacaatattgactcacgcctactccagagtggtcctgagagtcctggaagcagccgtggcggccaagaagcgatttagtgtatacgtcacagagtcacagcctgatttgtcaggtaagaaaatggccaaagccctctgccacctcaacgtccctgtcactgtggtgctagatgctgctgtcggctacatcatggagaaagcagatcttgtcatagttggtgctgaaggagttgttgaaaacggaggaattattwacaagattggaaccaaccagatggctgtgtgtgccaaagcacagaacaaacctttctatgtggttgcagaaagtttcaagtttgtccggctctttccactaaaccagcaagacgtcccagataagtttaagtataaggcagacactctcaaggtcgcgcagactggacaagacctcaaagaggagcatccgtgggtcgactacactgccccttccttaatcactctgctgtttacagacctgggcgtgctgacaccctcagcagtcagcgatgagctcatcaagctctatctgtaacctgtgagccctttcctgccaaggtgcagcttacgtagttgaggcagggtgagtagctgcttgacaccccagtgagtcaggccaaaactgagatgtgtttaatgaagatttatggagtaaggacttaaaatcatacatcttggagaacctttcttactcatttcagtcccatctaaaaatgtgtcagctattctaaatcccaacttaaattgttcttacggtttctagaaactttccttttcagtttccagaaatacaagttagataattggctacttaactgatgaaagatgagcccaagtccacctgtcttcatcctcccctgcactccagactgatctrcctaaagcacgcragatgcaggcgaaaagcagccayacccctctgccacaaaygaccaacagctggtcaggacgttacacgcggtgccttgtaagaggcaagaaacacttgccgaatctgcrtctggcttccagtggtaagcacattcctcagcaggatcaagccaaacagtaaaaactaccaagagaacacgaggaaggcagaaacgatgtttagcaacagtattctgcatggttcactgcttaagaaaatgccttctggaatatttgtaaactgaaattctgtatgtgtaagagatgtttaaatatgtttgggtcctaaayagctttttaaaattatacttgggaataaattcagcatcttttcaaataaactctatgaaagacgctgatgtggtgttgcatcaatactgcaagctgaccaggccatctaggggaaaacactgtccagctacatttacacacttaagacccaggcaatcaggacaccatttattcaacaggaggcataaaaactataattctctttcccggaatatgacttaatccctctgtttttcagctattcaccaataaaacaatactgtgactattaacacagaaaaaccccagcacattagccacccctgcaggrcatcaaaggataactgaagcccagggccaagcacattcaggaggtcaaatgcctgaagatactgaggaatggttttgaaaatcagaagtcaagaagacttcwgtatctttatgtttaaaaataactataaaatagcctcagaaaaaagagcttatatatatatatatatatatatatatatatatatatatatatatataatatgtacatatgtctatatgtgacccatcatgataaatactgacatctattatttacactcaaataattttacattttcttctgttagactactccaagactggaattgttttgttttgttgtttttaatgagagggtctcgctgtgttcccaggctggtcttgaactcctggg

SEQ ID NO: 1532 - DNA, 1327 bp, Homo sapiens
gacctcgcggactgctgtggcggcagctggagcggcggccgcggtggcagaaccgggggcggccgctgcagtctggagccccatagtgcggggccgcggccaggccacaggaagagctcgaggcccgggccgcaccggctgagtgtgcgggcccgcgcggctcggagccgccgccgcccatcgagcccctccgggcgygggtcggcccgccatggggtccctgttccggagcgagaccatgtgcctggcgcagctcttcctgcagtcgggcacggcctacgagtgcctcagcgccctgggcgagaaaggcctggtccagttccgagacctcaaccagaacgtaagttctttccaaagaaaatttgttggtgaggtgaagaggtgtgaagagctagagcgaatattggtgtatttggtacaggaaattaatagagctgatattccccttcctgaaggagaggccagccctcctgcgccacccctgaaacaggttctagaaatgcaggagcagttgcagaagctcgaggttgaactgagagaagtcactaagaacaaggagaaactgaggaaaaacttgctggaactgatagagtacactcacatgctgagagtgacaaagacctttgtgaaacgcaatgttgagtttgaacccacttatgaagaattcccttccttagagagygattctttgttggattacagctgtatgcagaggctgggagcaaaactgggatttgtgtctggcctaattaaccaaggaaaagtggaagcatttgaaaaaatgttgtggagagtctgcaaagggtacaccatcgtgtcctatgcagaactggatgaatcccttgaagaccctgaaacaggggaagtcataaaatggtatgtctttttaatatccttttggggagagcagattggccacaaggttaagaagatatgtgattgctaccactgccacgtgtacccctatccaaacacagccgaggagcggagggagatccaggaggggctgaacacccgcatccaggatctctacactgtactgcacaaaaccgaggactatttgaggcaagtgctatgtaaagccgccgagtctgtctacagccgtgtgatccaggtgaagaaaatgaaggccatctatcacatgctgaacatgtgcagctttgacgtgaccaacaagtgcctcattgctgaggtctggtgtcccgaggcggatctgcaggacctgcgccgggcactggaggagggctcggtaaggctgccttcctctcctctgccaggaacagaagagagactgatggaactgataaattcagagaaaaaaaggaag

SEQ ID NO: 1533 - DNA, 3453 bp, Homo sapiens
gacctcgcggactgctgtggcggcagctggagcggcggccgcggtggcagaaccgggggcggccgctgcagtctggagccccatagtgcggggccgcggccaggccacaggaagagctcgaggcccgggccgcaccggctgagtgtgcgggcccgcgcggctcggagccgccgccgcccatcgagcccctccgggcgygggtcggcccgccatggggtccctgttccggagcgagaccatgtgcctggcgcagctcttcctgcagtcgggcacggcctacgagtgcctcagcgccctgggcgagaaaggcctggtccagttccgagacctcaaccagaacgtaagttctttccaaagaaaatttgttggtgaggtgaagaggtgtgaagagctagagcgaatattggtgtatttggtacaggaaattaatagagctgatattccccttcctgaaggagaggccagccctcctgcgccacccctgaaacaggttctagaaatgcaggagcagttgcagaagctcgaggttgaactgagagaagtcactaagaacaaggagaaactgaggaaaaacttgctggaactgatagagtacactcacatgctgagagtgacaaagacctttgtgaaacgcaatgttgagtttgaacccacttatgaagaattcccttccttagagagygattctttgttggattacagctgtatgcagaggctgggagcaaaactgggatttgtgtctggcctaattaaccaaggaaaagtggaagcatttgaaaaaatgttgtggagagtctgcaaagggtacaccatcgtgtcctatgcagaactggatgaatcccttgaagaccctgaaacaggggaagtcataaaatggtatgtctttttaatatccttttggggagagcagattggccacaaggttaagaagatatgtgattgctaccactgccacgtgtacccctatccaaacacagccgaggagcggagggagatccaggaggggctgaacacccgcatccaggatctctacactgtactgcacaaaaccgaggactatttgaggcaagtgctatgtaaagccgccgagtctgtctacagccgtgtgatccaggtgaagaaaatgaaggccatctatcacatgctgaacatgtgcagctttgacgtgaccaacaagtgcctcattgctgaggtctggtgtcccgaggcggatctgcaggacctgcgccgggcactggaggagggctcgagagagagtggtgctacaatcccctcattcatgaatataatccccacaaaagaaacaccccccactcggatccgcaccaacaaattcaccgagggatttcagaacatcgtggatgcttatggagtcggaagctacagagaagtcaatccagctctctttaccatcatcaccttcccgtttttatttgctgtgatgtttggagacttcggacatggctttgtgatgtttttatttgccctcttgttggtgttaaatgaaaatcatcccagactaaatcagtcacaagagatcatgaggatgttttttaatggccggtacatcctcctgctgatggggctgttctcagtgtacactggcctcatctacaacgactgcttttcaaagtcagtcaacctgttcggctctgggtggaacgtgtcggccatgtacagctccagccacccacccgcagagcataagaagatggtgctttggaaygacagcgtcgttagacacaacagcattttgcagctggatccaagcattcctggagtgttccgaggcccttatccccttggcattgatcctatttggaacttggccacaaatcgcctcacttttctaaactctttcaaaatgaaaatgtccgtgattttaggaatcattcatatgacttttggrgtcattctgggaatatttaaccacttgcacttcaggaagaagttcaacatttacctggtttccatcccggaacttctcttcatgctctgtatctttggataccttatatttatgattttctacaagtggctggttttttcagcagaaacctccagagttgctcccagcattctgattgaatttattaacatgtttttattcccagccagtaaaacaagtggcctttacacagggcaggagtatgtccagagagtgctgctggttgtcacagcattgtctgtccctgtcctcttcttgggaaagccactgtttttgttgtggcttcacaatgggcgtagttgcttcggggtgaaccggagtggctacacacttataaggaaagatagtgaggaagaagtttcattgctgggaagccaagatatagaagagggaaatcaccaggtggaagatggatgtagagaaatggcgtgtgaagagtttaattttggagaaatattaatgacccaagtaatccattccatcgagtactgtctgggatgcatctccaacaccgcctcctacctgaggctctgggcgcttagcctggctcacgcacrgttgtctgatgtcctgtgggccatgctgatgcgcgtgggcctccgcgttgacaccacctatggcgtcttgctactgctcccggttatcgcgctctttgcagttttgaccattttcatccttctgatcatggaagggctttctgcgtttcttcacgccatacgcctccactgggtagaatttcagaacaaattctacgttggtgcaggcaccaaatttgttcctttctcattcagtctactttcatcaaagttcaataacgacgacagtgtggcatgatcatattgctgtaaccaacaagctttcagatttatggagaatgaccatgttatagactttcacttatgtcagatttatgataggaaaaattccatcttcattactgccttatgacatagccaaataattctgtaagatatacctcttcctcatatgttaaatattttgtaaagtttaccaatttgagatataaaaatttcttttggttttttatgatgagcaaatataagttaatgccaaacgttatgttaaagttattttttcaaatacaggatttggggagagaagccaattttgcatggctagttgaaaatggtattagatacttatttcctttaaactttatttaaaacaaacaacagagttaatctgtcacctgaagttgccagataatattttccaacagctgaagtagggatagttttttaaaaaatttaatgatgggtaatcaaaacattcacatttattctgctggatttaaaaatatgtactttttttttttttttgagatgaagtcttgctgtgtcacgtaggctggagtgcaatggcacgatcgtgtctcattgcaacttccgcctcctggattcaggtgattctcctgtctcagcctcccgagtaactgggattacaggcatgcgccaccgtgaccagctaatttttttgtatttttg

SEQ ID NO: 1534 - DNA, 2628 bp, Homo sapiens
tgcttagtcaccgtgaggctgcgcttgcccggggcccgcrcccccctaccccggggaccgmccccgggccgcccgccccacttggmgcgccacttccgcgtgcatggccctgctgccccgagccctgagcgccggcgcgggaccgagctggcggcgggcggcgcgcgccttccgaggcttcctgctgcttctgcccgagcccgcggccctcacgcgcgccctctcccgtgccatggcctgcaggcaggagccgcagccgcagggcccgccgcccgctgctggcgccgtggcytcctatgactacctggtgatcgggggcggctcgggcgggctggccagcgcgcgcagggcggccgagctgggygccagggccgccgtggtggagagccacaagctgggtggcacttgcgtgaatgttggatgtgtacccaaaaaggtaatgtggaacacagctgtccactctgaattcatgcatgatcatgctgattatggctttccaagttgtgagggtaaattcaattggcgtgttattaaggaaaagcgggatgcctatgtgagcygcctgaatgccatctatcaaaacaatctcaccaagtcccatatagaaatcatccgtggccatgcagccttcacgagtgatcccaagcccacaatagaggtcagtgggaaaaagtacaccgccccacacatcctgatcgccacaggtggtatgccctccacccctcatgagagccagatccccggtgccagcttaggaataaccagcgatggattttttcagctggaagaattgcccggccgcagcgtcattgttggtgcaggttacattgctgtggagatggcagggatcctgtcagccctgggttctaagacatcactgatgatacggcatgataaggtacttagaagttttgattcaatgatcagcaccaactgcacggaggagctggagaacgctggcgtggaggtgctgaagttctcccaggtcaaggaggttaaaaagactttgtcgggcttggaagtcagcatggttactgcagttcmcggtaggctaccagtcatgaccatgattccagatgttgactgcctgctctgggccattgggcgggtcccgaataccaaggacctgagtttaaacaaactggggattcaaaccgatgacaagggtcatatcatcgtagacgaattccagaataccaacgtcaaaggcatctatgcagttggggatgtatgtggaaaagctcttcttactccagttgcaatagctgctggccgaaaacttgcccatcgactttttgaatataaggaagattccaaattagattataacaacatcccaactgtggtcttcagccacccccctattgggacagtgggactcacggaagatgaagccattcataaatatggaatagaaaatgtgaagacctattcaacgagctttaccccgatgtatcacgcagttaccaaaaggaaaacaaaatgtgtgatgaaaatggtctgtgctaacaaggaagaaaaggtggttgggatccatatgcagggacttgggtgtgatgaaatgctgcagggttttgctgttgcagtgaagatgggagcaacgaaggcagactttgacaacacagtcgccattcaccctacctcttcagaagagctggtcacacttcgttgagaaccaggagacacgtgtggcgggcagtgggacccatagatcttctgaaatgaaacaaataatcacattgacttactgtttgagttttatgtatttctttattttaatcaggatcttctgatagtggaaatttttagtacataatagaacttatttatggagttasaaatttgtagtgttatccaggattgattttcatttgatcacatctcacagtaaytaatattttcaagttttttttttattaacagctctgtgctagttttttttttctgttttagcctcatcccaaatataaagctttgtgaagtacaattaacttaatgtacttgaatgaatagaacttgctactttttttttttttttttttgagacagagttttgctctcattgcccaggctggagtgcggtggtgctatttcagctcaccacaacctctgcctcctgggttcaagtgattctcctgccttagcctcccgaatagctggaattacaggcacgcaccaccatgcctgactaattttgtatttttagtagacatggggtttctccatgttggtcaggctggtctcaaactcccaccttcaggtgatccgcccacctcggcctcctgaggtgctgagattacaggcgtgagccactgtgccagcttgctaattttcacagaagttgatggcaattcttcacatgtwaacagtgccagtgcacagaacctttatatattttttgaagccagtactgtgctctgcatataacaaagctgcttcaaggatgaracctttttctaaaagcatgtaatgtgagaagccggcctgccggaggccgaggcaggaggattacttgagcctacaagtttgargccagcatgcacagcatagcaagactgcatctctacagagagtaaaaaaaattacccgagtgtggtgatgtgcatctgtrrtctcagctacttggga

SEQ ID NO: 1535 - DNA, 3131 bp, Homo sapiens
tgcttagtcaccgtgaggctgcgcttgcccggggcccgcrcccccctaccccggggaccgmccccgggccgcccgccccacttggmgcgccacttccgcgtgcatggccctgctgccccgagccctgagcgccggcgcgggaccgagctggcggcgggcggcgcgcgccttccgaggcttcctgctgcttctgcccgagcccgcggccctcacgcgcgccctctcccgtgccatggcctgcaggcaggagccgcagccgcagggcccgccgcccgctgctggcgccgtggcytcctatgactacctggtgatcgggggcggctcgggcgggctggccagcgcgcgcagggcggccgagctgggygccagggccgccgtggtggagagccacaagctgggtggcacttgcgtgaatgttggatgtgtacccaaaaaggtaatgtggaacacagctgtccactctgaattcatgcatgatcatgctgattatggctttccaagttgtgagggtaaattcaattggcgtgttattaaggaaaagcgggatgcctatgtgagcygcctgaatgccatctatcaaaacaatctcaccaagtcccatatagaaatcatccgtggccatgcagccttcacgagtgatcccaagcccacaatagaggtcagtgggaaaaagtacaccgccccacacatcctgatcgccacaggtggtatgccctccacccctcatgagagccagatccccggtgccagcttaggaataaccagcgatggattttttcagctggaagaattgcccggccgcagcgtcattgttggtgcaggttacattgctgtggagatggcagggatcctgtcagccctgggttctaagacatcactgatgatacggcatgataaggtacttagaagttttgattcaatgatcagcaccaactgcacggaggagctggagaacgctggcgtggaggtgctgaagttctcccaggtcaaggaggttaaaaagactttgtcgggcttggaagtcagcatggttactgcagttcmcggtaggctaccagtcatgaccatgattccagatgttgactgcctgctctgggccattgggcgggtcccgaataccaaggacctgagtttaaacaaactggggattcaaaccgatgacaagggtcatatcatcgtagacgaattccagaataccaacgtcaaaggcatctatgcagttggggatgtatgtggaaaagctcttcttactccagttgcaatagctgctggccgaaaacttgcccatcgactttttgaatataaggaagattccaaattagattataacaacatcccaactgtggtcttcagccacccccctattgggacagtgggactcacggaagatgaagccattcataaatatggaatagaaaatgtgaagacctattcaacgagctttaccccgatgtatcacgcagttaccaaaaggaaaacaaaatgtgtgatgaaaatggtctgtgctaacaaggaagaaaaggtggttgggatccatatgcagggacttgggtgtgatgaaatgctgcagggttttgctgttgcagtgaagatgggagcaacgaaggcagactttgacaacacagtcgccattcaccctacctcttcagaagagctggtcacacttcgttgagaaccaggagacacgtgtggcgggcagtgggacccatagatcttctgaaatgaaacaaataatcacattgacttactgtttgagttttatgtatttctttattttaatcaggatcttctgatagtggaaatttttagtacataatagaacttatttatggagttasaaatttgtagtgttatccaggattgattttcatttgatcacatctcacagtaaytaatattttcaagttttttttttattaacagctctgtgctagttttttttttctgttttagcctcatcccaaatataaagctttgtgaagtacaattaacttaatgtacttgaatgaatagaacttgctactttttttttttttttttttgagacagagttttgctctcattgcccaggctggagtgcggtggtgctatttcagctcaccacaacctctgcctcctgggttcaagtgattctcctgccttagcctcccgaatagctggaattacaggcacgcaccaccatgcctgactaattttgtatttttagtagacatggggtttctccatgttggtcaggctggtctcaaactcccaccttcaggtgatccgcccacctcggcctcctgaggtgctgagattacaggcgtgagccactgtgccagcttgctaattttcacagaagttgatggcaattcttcacatgtwaacagtgccagtgcacagaacctttatatattttttgaagccagtactgtgctctgcatataacaaagctgcttcaaggatgaracctttttctaaaagcatgtaatgtgagaagccggcctgccttattttcttttttcttttttaatgawtaaaaatagtttgtggcaaggcacggtggctcaggcctgtaattctagcactttgggaggccgaggcaggaggattacttgagcctacaagtttgargccagcatgcacagcatagcaagactgcatctctacagagagtaaaaaaaattacccgagtgtggtgatgtgcatctgtrrtctcagctacttgggaggctgaggtgagaggatcrcttgagcttgggtgaggtgaggctgcrgtgagtcctgatcatgctgctgcactcaatcttggacaacagagcargaccctgtctcaaaaaaaaaaawatatatatatatatatatatattatttttatgaggtgaagtgcatcaaacttgggaaagatttgaggaggctgggaacctcctggaaaaccactccttgaagaaagatatgagagacatttagaagtgattcctgctttcagaaggaggtggattcaaatacatcaaaagtcccttcctctgctaagtgtttatagttcaatgaataatttcaatatttktatgtgttcttgtcattttatttttttctgaaaaacttccaaaaatttgaaaataaaattacagccttttcttcttataaaattt

SEQ ID NO: 1536 - DNA, 2642 bp, Homo sapiens
atggccctgctgccccgagccctgagcgccggcgcgggaccgagctggcggcgggcggcgcgcgccttccgaggcttcctgctgcttctgcccgagcccgcggccctcacgcgcgccctctcccgtgccatggcctgcaggcaggagccgcagccgcagggcccgccgcccgctgctggcgccgtggcytcctatgactacctggtgatcgggggcggctcgggcgggctggccagcgcgcgcagggcggccgagctgggygccagggccgccgtggtggagagccacaagctgggtggcacttgcggcctggggaacttgcggtcctgggttcctgctgagtgtactgattctgtgatragaataacyaggttcytgtggttttggcgagtagtacttaccaatgagagttgggtagtgaatgttggatgtgtacccaaaaaggtaatgtggaacacagctgtccactctgaattcatgcatgatcatgctgattatggctttccaagttgtgagggtaaattcaattggcgtgttattaaggaaaagcgggatgcctatgtgagcygcctgaatgccatctatcaaaacaatctcaccaagtcccatatagaaatcatccgtggccatgcagccttcacgagtgatcccaagcccacaatagaggtcagtgggaaaaagtacaccgccccacacatcctgatcgccacaggtggtatgccctccacccctcatgagagccagatccccggtgccagcttaggaataaccagcgatggattttttcagctggaagaattgcccggcgtcattgttggtgcaggttacattgctgtggagatggcagggatcctgtcagccctgggttctaagacatcactgatgatacggcatgataaggtaaatatgcaggtacttagaagttttgattcaatgatcagcaccaactgcacggaggagctggagaacgctggcgtggaggtgctgaagttctcccaggtcaaggaggttaaaaagactttgtcgggcttggaagtcagcatggttactgcagttcmcggtaggctaccagtcatgaccatgattccagatgttgactgcctgctctgggccattgggcgggtcccgaataccaaggacctgagtttaaacaaactggggattcaaaccgatgacaagggtcatatcatcgtagacgaattccagaataccaacgtcaaaggcatctatgcagttggggatgtatgtggaaaagctcttcttactccagttgcaatagctgctggccgaaaacttgcccatcgactttttgaatataaggaagattccaaattagattataacaacatcccaactgtggtcttcagccacccccctattgggacagtgggactcacggaagatgaagccattcataaatatggaatagaaaatgtgaagacctattcaacgagctttaccccgatgtatcacgcagttaccaaaaggaaaacaaaatgtgtgatgaaaatggtctgtgctaacaaggaagaaaaggtggttgggatccatatgcagggacttgggtgtgatgaaatgctgcagggttttgctgttgcagtgaagatgggagcaacgaaggcagactttgacaacacagtcgccattcaccctacctcttcagaagagctggtcacacttcgttgagaaccaggagacacgtgtggcgggcagtgggacccatagatcttctgaaatgaaacaaataatcacattgacttactgtttgagttttatgtatttctttattttaatcaggatcttctgatagtggaaatttttagtacataatagaacttatttatggagttasaaatttgtagtgttatccaggattgattttcatttgatcacatctcacagtaaytaatattttcaagttttttttttattaacagctctgtgctagttttttttttctgttttagcctcatcccaaatataaagctttgtgaagtacaattaacttaatgtacttgaatgaatagaacttgctactttttttttttttttttttgagacagagttttgctctcattgcccaggctggagtgcggtggtgctatttcagctcaccacaacctctgcctcctgggttcaagtgattctcctgccttagcctcccgaatagctggaattacaggcacgcaccaccatgcctgactaattttgtatttttagtagacatggggtttctccatgttggtcaggctggtctcaaactcccaccttcaggtgatccgcccacctcggcctcctgaggtgctgagattacaggcgtgagccactgtgccagcttgctaattttcacagaagttgatggcaattcttcacatgtwaacagtgccagtgcacagaacctttatatattttttgaagccagtactgtgctctgcatataacaaagctgcttcaaggatgaracctttttctaaaagcatgtaatgtgagaagccggcctgccggaggccgaggcaggaggattacttgagcctacaagtttgargccagcatgcacagcatagcaagactgcatctctacagagagtaaaaaaaattacccgagtgtggtgatgtgcatctgtrrtctcagctacttggga

SEQ ID NO: 1537 - DNA, 3137 bp, Homo sapiens
tgcttagtcaccgtgaggctgcgcttgcccggggcccgcrcccccctaccccggggaccgmccccgggccgcccgccccacttggmgcgccacttccgcgtgcatggccctgctgccccgagccctgagcgccggcgcgggaccgagctggcggcgggcggcgcgcgccttccgaggcttcctgctgcttctgcccgagcccgcggccctcacgcgcgccctctcccgtgccatggcctgcaggcaggagccgcagccgcagggcccgccgcccgctgctggcgccgtggcytcctatgactacctggtgatcgggggcggctcgggcgggctggccagcgcgcgcagggcggccgagctgggygccagggccgccgtggtggagagccacaagctgggtggcacttgcgtgaatgttggatgtgtacccaaaaaggtaatgtggaacacagctgtccactctgaattcatgcatgatcatgctgattatggctttccaagttgtgagggtaaattcaattggcgtgttattaaggaaaagcgggatgcctatgtgagcygcctgaatgccatctatcaaaacaatctcaccaagtcccatatagaaatcatccgtggccatgcagccttcacgagtgatcccaagcccacaatagaggtcagtgggaaaaagtacaccgccccacacatcctgatcgccacaggtggtatgccctccacccctcatgagagccagatccccggtgccagcttaggaataaccagcgatggattttttcagctggaagaattgcccggcgtcattgttggtgcaggttacattgctgtggagatggcagggatcctgtcagccctgggttctaagacatcactgatgatacggcatgataaggtaaatatgcaggtacttagaagttttgattcaatgatcagcaccaactgcacggaggagctggagaacgctggcgtggaggtgctgaagttctcccaggtcaaggaggttaaaaagactttgtcgggcttggaagtcagcatggttactgcagttcmcggtaggctaccagtcatgaccatgattccagatgttgactgcctgctctgggccattgggcgggtcccgaataccaaggacctgagtttaaacaaactggggattcaaaccgatgacaagggtcatatcatcgtagacgaattccagaataccaacgtcaaaggcatctatgcagttggggatgtatgtggaaaagctcttcttactccagttgcaatagctgctggccgaaaacttgcccatcgactttttgaatataaggaagattccaaattagattataacaacatcccaactgtggtcttcagccacccccctattgggacagtgggactcacggaagatgaagccattcataaatatggaatagaaaatgtgaagacctattcaacgagctttaccccgatgtatcacgcagttaccaaaaggaaaacaaaatgtgtgatgaaaatggtctgtgctaacaaggaagaaaaggtggttgggatccatatgcagggacttgggtgtgatgaaatgctgcagggttttgctgttgcagtgaagatgggagcaacgaaggcagactttgacaacacagtcgccattcaccctacctcttcagaagagctggtcacacttcgttgagaaccaggagacacgtgtggcgggcagtgggacccatagatcttctgaaatgaaacaaataatcacattgacttactgtttgagttttatgtatttctttattttaatcaggatcttctgatagtggaaatttttagtacataatagaacttatttatggagttasaaatttgtagtgttatccaggattgattttcatttgatcacatctcacagtaaytaatattttcaagttttttttttattaacagctctgtgctagttttttttttctgttttagcctcatcccaaatataaagctttgtgaagtacaattaacttaatgtacttgaatgaatagaacttgctactttttttttttttttttttgagacagagttttgctctcattgcccaggctggagtgcggtggtgctatttcagctcaccacaacctctgcctcctgggttcaagtgattctcctgccttagcctcccgaatagctggaattacaggcacgcaccaccatgcctgactaattttgtatttttagtagacatggggtttctccatgttggtcaggctggtctcaaactcccaccttcaggtgatccgcccacctcggcctcctgaggtgctgagattacaggcgtgagccactgtgccagcttgctaattttcacagaagttgatggcaattcttcacatgtwaacagtgccagtgcacagaacctttatatattttttgaagccagtactgtgctctgcatataacaaagctgcttcaaggatgaracctttttctaaaagcatgtaatgtgagaagccggcctgccttattttcttttttcttttttaatgawtaaaaatagtttgtggcaaggcacggtggctcaggcctgtaattctagcactttgggaggccgaggcaggaggattacttgagcctacaagtttgargccagcatgcacagcatagcaagactgcatctctacagagagtaaaaaaaattacccgagtgtggtgatgtgcatctgtrrtctcagctacttgggaggctgaggtgagaggatcrcttgagcttgggtgaggtgaggctgcrgtgagtcctgatcatgctgctgcactcaatcttggacaacagagcargaccctgtctcaaaaaaaaaaawatatatatatatatatatatattatttttatgaggtgaagtgcatcaaacttgggaaagatttgaggaggctgggaacctcctggaaaaccactccttgaagaaagatatgagagacatttagaagtgattcctgctttcagaaggaggtggattcaaatacatcaaaagtcccttcctctgctaagtgtttatagttcaatgaataatttcaatatttktatgtgttcttgtcattttatttttttctgaaaaacttccaaaaatttgaaaataaaattacagccttttcttcttataaaattt

SEQ ID NO: 1538 - DNA, 1724 bp, Homo sapiens
atttaatgtaaagtttttccagtgaaacaaaaygtaagaatctgagtttgtttttcaaagatcactaaattttagttatgattatatcacattttccaaaatgtgtggcagtttttgccctccttgctctgagtgttggtgcactggacacttttattgctgcagtatatgagcrtgcggtgatattaccaaacagaacagaaacacctgtttcaaaagaagaagctttgctcctgatgaacaagaacatagatgttttggagaaagcagttaagctggcagcgaagcagggtgcacatatcattgtgaccccagaagatggaatctatggttggatcttcrccagggagagcatttacccctatctagaggatataccagaccctggagtgaactggattccatgtagagacccctggagattcggcaacacaccagtgcaacaaagactcagctgcctggccaaggacaactctatctatgtcgtggctaatattggggacaagaagccatgcaatgcyagtgactctcagtgtccccctgatggccgttaccaatacaacactgatgtggtgtttgattctcagggaaaactgttggcacgctaccataagtacaatctttttgcacctgaaattcagtttgatttccccaaggattcagaacttgtgacttttgacactccctttgggaagtttggcatttttacttgctttgacattttttctcatgacccagctgyggtggtggtggatgagtttcaattgacagcattctctaccccacagcatggtacaacacgctgcccctcctctcggctgttcccttccattcagcatgggccaaggccatgggagtcaatctacttgctgcaaatacccacaacaccagcatgcacatgacagggagtggaatctacgccccagaagcagtcaaggtgtaccactatgacatggaaacagagagtggtcagctgttgctatcagaactgaagtctcggcccygccgtgagcccacctaccctgcagctgttgactggcatgcgtatgccagcagtgtcaagccattttcctctgaacagtcagattttctggggatgatttattttgmtgagtttacctycaccaagcttaagagaaatacaggaaattacacagcttgccagaaagatctgtgttgtcacttaacttacaagatgtctgagaagcgaayagacgagatctatgccctaggtgcttttgatggactgcacacagtagaaggccaatattacttacagatatgtrcattactgaagtgtcaaaccactgacctggaaacgtgtggagaacctgtggggtcagcttttaccaagtttgaagacttctccctcagtggcacatttggaacgcgttatgttttcccacagatcattctaagtgggagtcagcttgcccctgaaagacattatgagatttcaagagatggacgcttgaggagccgaagtggagcccctttgcctgtcttagttatggccctgtatggaagagtgtttgagaaggaccctccacgcttagggcagggatctgggaaattccagtgatctcctttagcagagcccttttaggattagcctggctaagaaaggaagaaaaaaaagagatccgttagtgtctgtttagaaaagatgttataaacttacagaaacaaatataataaactgaagcagatttgaaaagcaacaa

SEQ ID NO: 1539 - DNA, 813 bp, Homo sapiens
atttaatgtaaagtttttccagtgaaacaaaaygtaagaatctgagtttgtttttcaaagatcactaaattttagttatgattatatcacattttccaaaatgtgtggcagtttttgccctccttgctctgagtgttggtgcactggacacttttattgctgcagtatatgagcrtgcggtgatattaccaaacagaacagaaacacctgtttcaaaagaagaagctttgctcctgatgaacaagaacatagatgttttggagaaagcagttaagctggcagcgaagcagggtgcacatatcattgtgaccccagaagatggaatctatggttggatcttcrccagggagagcatttacccctatctagaggatataccagaccctggagtgaactggattccatgtagagacccctggaggaagagtaaaaagatgaatgagcctgtttccaaagagctttgctatcactrtcattcagaatgcaatcaatatggccaatggaaattgtataggacttgaaaaaggaagccctacttctgggaccacattttacgaccacctagctgagtgataaatcactaaaatatagtaagtttgaggaaatgtctattgaattagattcggcaacacaccagtgcaacaaagactcagctgcctggccaaggacaactctatctatgtcgtggctaatattggggacaagaagccatgcaatgcyagtgactctcagtgtccccctgatggccgttaccaatacaacactgatgtggtgtttgattctcagggaaaactgttggcacgctaccataag

SEQ ID NO: 1540 - DNA, 300 bp, Homo sapiens
atgccagcactgtcatcgcagacttggctgcccaaccccgtcgtctacctgatgaaggccttcgacctcctagtggaccgaycggcgaccctcgtgagagtttatagagtggcagcacgcaaagaacaggtagaactgggccaaggaagtggagcattcacccaggtggccaaggcttaccaggaccgctatcaggacctgggggcccaccattctgccaggaagtgccgggccaaacacaagcagaggatgctggaagagagaaaagctgcaaaagaggccaccgctgccgcctcctga

SEQ ID NO: 1541 - DNA, 1100 bp, Homo sapiens
gctggctgtgccctggccctggtgatggttggtccagctggggcagcagatattaatgtgccaggcagtgctggcaggtgaagccccgagtggaccctgtagatcggatggaccacgtggagtaccactacagcaaggccatgccactcatcttcatgagcagtatgctctgcagcggcaccatgctgatactcactgggctggatgcccaccttgaggtgcaccgcagcaaggagacgcacatcatcccttgtgtgctggccatgcaccaggcctggtccaagtctggccacaagaaactacagctggacaaggcgggcgtgactgacgaggtgctggacattgccatgcaggccttcatcctggaggtgatctctaagcaaagggagccagcccatgtgctctccaacaaggaccacttcagactcaagtccttgaatcactggtctacctgtcacacctgttctccagctccaagttcctgcttatggctcaggacagccatgtctccatgcactccttgatcacatgcaaggtcactattgcaaggtcactacmcaggcttcgacctcagcagctatggcaactgcctcaccaagtggaacaaggccatagaggtgatgtacacccagtgcatggaggtgggcaaggacaagtgcctgctcgtgtactacaaggaactggtgctgtagcctaggagcttcctcagactcatcccagaccatctcggcatcacctggagcaacactgtcctccaccatcaagacctcactggcaagtggaatggcatctccctgtctaagatccagtggtccatggatgaggtcatcaagcctgtgaacctggaagtgctctccaagtggactcaccacatccctggggacatggtgccagacatggcccagattgtcccatgctggctcagcttagccatgacccctatgcaaataccctccccaacccccacttccactatagcaaccctgacccccatcatcatcagtaacgcacaccaagtaagggactataaaacaccagtcaatctgaaaggatattttcaggtgaaccagaatagcacctcctcccacttaggaagctca

SEQ ID NO: 1542 - DNA, 1655 bp, Homo sapiens
gggccgcggaccgcgcgcacagcccgcactgccccacgccgcgggctagggacacccggcccgccaccatgacttccagcaagatagagatgcccggcgaggtgaaggccgaccccgccgccctcatggcgtcgctgcacctcctgccgtcgcccacgcccaatctcgaaattaagtacaccaagatctttataaacaacgagtggcagaactcagagagtgggagagtgttccctgtctataatccagccacaggagaacaggtgtgtgaagttcaagaagcagacaaggcagatatagacaaagcagtgcaggcagcccgcctggctttctctcttggttcagtgtggagaaggatggatgcttcagaaaggggacgtctgttggataagcttgcagacttggtggaacgggacagggcagttcttgcaaccatggaatccctaaatggtggcaaaccattcctgcaagctttttatgtggatttgcagggcgtcatcaaaacctttcgatattacgcaggctgggctgataaaattcatgggatgaccattcctgtagatggagactattttacctttacaagacatgaacccattggagtgtgtggacagatcatcccatggaacttccccctgctgatgtttgcctggaaaatagctccagctttgtgctgtggcaatacagtagttattaagccagcagagcaaacaccmctcagtgcactctacatgggagccctcatcaaggaggctggctttcctcccggggtcatcaatattttgccaggatatgggccaacggctggggcagcaatagcttctcacattggcatagacaagattgcattcacagggtctactgaggttggaaagcttatccaagaagcagctggaagaagtaatttgaagagagtaactctggaacttggaggcaaaagtcctaatattatttttgctgatgctgacttggactatgctgtggagcaggcccaccagggtgtgttcttcaatcaaggtcagtgctgcactgcaggctctcgcatcttcgtggaggagtccatctatgaggagtttgtgagaagaagcgtggagcgggccaagaggcgcgtagtggggagtccctttgaccccaccactgagcagggtccccagattgataagaaacagtacaacaagatcttggaactcatccagagtggtgtggctgagggcgccaagctggaatgtggaggcaaaggactgggccgaaaggggtttttcattgagcccacagtgttttccaacgtcactgatgatatgcggattgccaaggaggagatmtttggccctgttcaggaaattttgagatttaagacgatggatgaagttatcgaaagagccaataactcagactttggactcgtagcagctgtctttactaatgacatcaacaaggccctcacagtgtcttctgcaatgcaagctgggactgtttggatcaattgttacaatgccttaaatgcccagagcccctttgggggattcaagatgtctggaaatgggagagaaatgggagaatttggcttgcgggagtactcagaagttaagacggtgacagtaaagatcccccagaagaactcctaagaaggccaagaaggaggatgaagcccagcc

SEQ ID NO: 1543 - DNA, 1655 bp, Homo sapiens
gggccgcggaccgcgcgcacagcccgcactgccccacgccgcgggctagggacacccggcccgccaccatgacttccagcaagatagagatgcccggcgaggtgaaggccgaccccgccgccctcatggcgtcgctgcacctcctgccgtcgcccacgcccaatctcgaaattaagtacaccaagatctttataaacaacgagtggcagaactcagagagtgggagagtgttccctgtctataatccagccacaggagaacaggtgtgtgaagttcaagaagcagacaaggtatatatagacaaagcagtgcaggcagcccgcctggctttctctcttggttcagtgtggagaaggatggatgcttcagaaaggggacgtctgttggataagcttgcagacttggtggaacgggacagggcagttcttgcaaccatggaatccctaaatggtggcaaaccattcctgcaagctttttatgtggatttgcagggcgtcatcaaaacctttcgatattacgcaggctgggctgataaaattcatgggatgaccattcctgtagatggagactattttacctttacaagacatgaacccattggagtgtgtggacagatcatcccatggaacttccccctgctgatgtttgcctggaaaatagctccagctttgtgctgtggcaatacagtagttattaagccagcagagcaaacaccmctcagtgcactctacatgggagccctcatcaaggaggctggctttcctcccggggtcatcaatattttgccaggatatgggccaacggctggggcagcaatagcttctcacattggcatagacaagattgcattcacagggtctactgaggttggaaagcttatccaagaagcagctggaagaagtaatttgaagagagtaactctggaacttggaggcaaaagtcctaatattatttttgctgatgctgacttggactatgctgtggagcaggcccaccagggtgtgttcttcaatcaaggtcagtgctgcactgcaggctctcgcatcttcgtggaggagtccatctatgaggagtttgtgagaagaagcgtggagcgggccaagaggcgcgtagtggggagtccctttgaccccaccactgagcagggtccccagattgataagaaacagtacaacaagatcttggaactcatccagagtggtgtggctgagggcgccaagctggaatgtggaggcaaaggactgggccgaaaggggtttttcattgagcccacagtgttttccaacgtcactgatgatatgcggattgccaaggaggagatmtttggccctgttcaggaaattttgagatttaagacgatggatgaagttatcgaaagagccaataactcagactttggactcgtagcagctgtctttactaatgacatcaacaaggccctcacagtgtcttctgcaatgcaagctgggactgtttggatcaattgttacaatgccttaaatgcccagagcccctttgggggattcaagatgtctggaaatgggagagaaatgggagaatttggcttgcgggagtactcagaagttaagacggtgacagtaaagatcccccagaagaactcctaagaaggccaagaaggaggatgaagcccagcc

SEQ ID NO: 1544 - DNA, 892 bp, Homo sapiens
tcctccagacgttagctgtcttgctgaaactccttttttcacccttgaaaaccactgcaagaatggccaagaacccagctatcctgaggctgtgaccatctatgacaagccggcatctttctttcaagagacacctctggacctgcagcaccgactcttcatgaagctgggcagcacgcactctccgttcagggcccgctcagaacctgaggacccagccaggagcgctttagaaaagtttgagcaactgactcttgacgaacacaaccttccttctctcgtctgtgtgataacaggcaaatggcctctgagggagtattacagccacctcatccaccagaagcatttccagcacatccaggtctgcaccccctggctggaggccgaggactaccccctgcttctagggtcggtggacctgggtgtctgtctgcacacgtcctccagtggcctggacctgcccatgaaggtggtggacatgttygggtgctgtttgcctgtgtgtgcygtgaacttcaagtgtttacatgagctggtgaaacatgaagaaaacagcttggtctttgaggactcagaggaactggcagctcagctgcagatgcttttctcaaactttcctgatcctgarggcaagctaaaccagttccggaagaacctgcgggagtcgcagcagctccgatgggatgagagctgggtgcagactgtgcttcctttggttatggacacataaatcctgggccagagactaaaaccccaggacccctgctgtccttcccgcagcttcttctcggagtctcagggcaaaccctttcgagcagcgcctcccagtggccagaagctgaaatgacagcagtggtgccgccgggtgaatgaattggttctgtgacccggg

SEQ ID NO: 1545 - DNA, 1045 bp, Homo sapiens
tcctccagacgttagctgtcttgctgaaactccttttttcacccttgaaaaccactgcaagaatggccaagaacccagctatcctgaggctgtgaccatctatgacaagccggcatctttctttcaagagacacctctggacctgcagcaccgactcttcatgaagctgggcagcacgcactctccgttcagggcccgctcagaacctgaggacccagccaggagcggtcggccttcatgaagcgggatgctgggagcgggctggtgatgcgtctccatgagcggccagccctgctggtcagcagcacaggctggacaggtctgcacgacccatggaacacttgagaggacgaagacttctccatcctgctggcagctttagaaaagtttgagcaactgactcttgacgaacacaaccttccttctctcgtctgtgtgataacaggcaaatggcctctgagggagtattacagccacctcatccaccagaagcatttccagcacatccaggtctgcaccccctggctggaggccgaggactaccccctgcttctagggtcggtggacctgggtgtctgtctgcacacgtcctccagtggcctggacctgcccatgaaggtggtggacatgttygggtgctgtttgcctgtgtgtgcygtgaacttcaagtgtttacatgagctggtgaaacatgaagaaaacagcttggtctttgaggactcagaggaactggcagctcagctgcagatgcttttctcaaactttcctgatcctgarggcaagctaaaccagttccggaagaacctgcgggagtcgcagcagctccgatgggatgagagctgggtgcagactgtgcttcctttggttatggacacataaatcctgggccagagactaaaaccccaggacccctgctgtccttcccgcagcttcttctcggagtctcagggcaaaccctttcgagcagcgcctcccagtggccagaagctgaaatgacagcagtggtgccgccgggtgaatgaattggttctgtgacccggggaaa

SEQ ID NO: 1546 - DNA, 1972 bp, Homo sapiens
gtgagccagacagactgttttgtgagcctctggctgcccaccgcctctcagaagaagctgaggacaaggaccatctccaactgcccaaatccagagtggaatgaaagcttcaacttccagatccagagccgagtgaagaacgtgctagagttgagtgtctgtgatgaagacacagtgacaccagatgaccatctcctgacagttctctatgacctcaccaagctctgtttccgaaagaaaacccacgtgaagtttccactcaacccgcagctggacgtgcggctgggcttcagcctgtgcccagcagagctggagtttctgcagaagcggaaggtcgtggtggccaaggccctgaagcaggtgctgcagctggaggaagacctgcaggaggacgaggtgccgctgatagccatcatggccactgggggtggaacaagatccatgacctccatgtatggccacctgctggggctgcagaagctgarcctcctggactgtgccagctacatcacyggtctatcaggggccacctggaccatggctaccttgtaccgtgaccctgactggtcctccaaaaacttggagcctgctatctttgaggctcggagacatgtggtaaaggacaagctaccctccctgttcccagaccagctccgcaaattccaggaggagctccggcagcgcagccaggaaggctacagggtcacctttacagacttctggggcctgctgatacttctctttaaccattttgtttccccacagagaaatgaatgcaaactgtcagatcagcgtgctgctttgagctgcggccagaaccccctgcccatctacctcaccatcaatgtcaaggatgatgtaagcaaccaggacttcagagagtggttcgagttctccccctacgaggtgggyctgcagaagtatggggccttcatcccctccgagctcttcggctccgagttcttcatggggcggctggtgaagaggatcccggagtctcgaatctgctacatgctaggcctgtggagcagcatcttctccctgaacctgctggatgcctggaacctgtcacacacctcggaggagtttttccacaggcaaccatgtggggcttcgcataggcaatctggggactccacctctcatgacctgcccttcatccctccctcccctgcagaagacgagccgatcctgcctgaaatccccaaatgtgatgctaacatcctggagaccacggtagtgatcccagggtcatggctgtccaattctttccgagaaatccttacccatcggtccttcgtgtctgagtttcacaacttcctgtctgggctgcagctgcacaccaactacctccagaatggccagttctctaggtgtgttggtaacgggaaggcttggctttcagacacagtgctagatggtttcccaaaccagctgaccgagtccgcgaaccacctgtgcctgctggacactgcgttctttgtcaactccagctacccgcccctcctcaggccagagcgaaaagccgacctcatcatccacctcaactactgtgctgggtcccagacaaaggcaacccctgaaacaaacctgtgagtactgcactgtgcagaacatccccttccccaaatacgagctgccagatgagaatgaaaatctcaaggaatgctacctgatggagaacccccaggaacccgatgcccccatcgtgactttcttcccactcatcaatgacactttccgaaaatacaaggcaccaggtgtagagcgaagccctgaggagctggagcagggccaggtggacatttatggtcccaaaactccctatgccaccaaggagctgacatacacagaggccacctttgacaagctggtgaaactctcagagtataacatcctgaataataaggacactctcctccaggctctgcggctcgcagtggagaagaagaagcgcctgaagggccagtgt

SEQ ID NO: 1547 - DNA, 1003 bp, Homo sapiens
agcaggacgtgagacttctagtgctcactcagaatcatttctgcaccaaccatggccatctttgtggagctcaataccaaagccaagatgcccattgtgggcctgggcacttggaagtctcctctcggcaaagtgaaagaagtggtgaaggtggccattgatgcaggatatcgccacattgactgtgcctatgtctatcagaatgaacatgaggtgggggaagccatccaagagaagatccaagagaaggctgtaaagcgggaggacctcttcatcatcaacaagttgtggcccactttctttgagagaccccttggatacaagtctggggatgattttttccgcaaagatgataaaggtaatatgatcggtggaaaagcaatgttcttggatgcctgggaggccatggaggagctggtggatgaggggctggtgaaagcccttggggtctccaatttcaaccacttccagatagagaggctcttgaacaaacctggactgaaatataaaccagtgactaaccaggttgagtgtcacccatacctcacacaggagaaactgatccagtactgccactccaagggcatcaccattatggcctacagccccctaggctctccggatagactttgggccaagccagaggacccttccctgctggaggatcccaagattaaggagattgctgcaaggcacaaaaaaccacagcccaggttctgatccatttccatatccagaggaatgtgactgtgatccccaagtctgtgacaccagcacgcattgttgagaacattcaggcctttgactttacattgaatgatgaggagatggcaaccayactcagcttcaacagaaactggagggcccgtaacatgttgcaatcctctcatttggaggactatcccttcgatgcagaatattgaggttgaatctcctggtgagattacacagggaattctctttcttcgctgaagtgtgacatctccactcaagtcctatttta

SEQ ID NO: 1548 - DNA, 3852 bp, Homo sapiens
ccgcgggcggggccggctggcgttcacgtgacccggcgtcattggctcgctcgcggaagtagtcctacatycgcggtcagcgcggggtctccgggcgccctgcagggcgggcaggctgtgccatcccgccggacgtcgggatggtgcagctgtacaacctgcacccgttcgggtcgcagcaggtggtgccctgcaagctggagccggaccggttctgtggcggggggcgtgacgcgcttttcgtggcggcgggctgcaaggtggaggcgttcgcgrtggccggccaggagctgtgccagccgcggtgcgccttctccacgctgggccgggtgttgcgcctggcctacagcgaggctggcatcagtaatgaaatttcacagcttgagtcagatgattttgtcatctgccagaagcccctggaacttcttggtgaaaaaagtgaacagtctggattatctgttacactgragtctacgggattagctgatgaaaaaagaaaatattcccactttcagcacctgctctatagacgttttgctcctgatatttcgtcctatgtcttgtctgatgacatcaagctacattccctccagctgctacccatttaccagaccggttctcttacrtctgatggaaaaaatttgtctcaggaaaaagaattgctgagtctcttttgctttttctccttacctcatgtgggctatctctacatggttgtcaaatctgttgaattgatgtcagtctaccagtatcctgaaaagtctcagcaggcagtactcacgccacaatttttgcacgtcattacaagtaacaacctgcagtgtttcactgtgcggtgcagtgcggcggcagctcgtgaggaggacccgtacatggacaccaccctgaaggcttgcccacctgtcagtatggatgtctgtgctttaagaatacagcttttcataggcttgaaagccatctgtcactttaaaaaccacatcatacttttgactaaagcagaacctgaagccattccagagagaagacagtcacccaagaggcttctttcgagaaaagataccagtgttaaaatcaaaatacctcctgtagctgaggctgggtggaatttgtatattgtgaatacratctcaccagtgcarctgtacaaagagatggtagactatagcaatacctataagactgtcaaaacccagagctgcattcaccttctcagtgaggctcatctgttagtgcgagctgccctgatggatgccagtcagctggaacctggagagaaggcagagcttttggaagcatttaaggaaagctgtgggcaccttggggactgttacagcaggcttgactcccagcattctcatctcaccttgccatactataagatgtctggtttgtctatggctgaagttctggcccgcacggactggacagtagaggatggattacagaaatacgagagaggattaatcttttacattaatcattcactttatgaaaacctggatgaagaattaaatgaagaattagcagcaaaagtggttcagatgttttatgtggctgagccaaagcaagtgccccatattctctgtagtccttctatgaagaatattaatcctttaactgccatgagctatctaaggaagctggatacttctgggttttcatcgatcttagtgacattgaccaaggcagcagtggctctgaaaatgggagatcttgacatgcacagaaatgaaatgaaaagccattcagagatgaagttggtatgtggcttcattctggaacctcggctgttgattcaacagagaaagggacagattgttccaaccgagcttgcacttcacttgaaggaaactcagcctggattgcttgtggcttcagttctgggcttgcagaagaacaacaaaattggaattgaagaagcagattccttttttaaggtgctttgtgctaaggatgaagatacaattcctcagctcttggtagacttttgggaagctcagctagtggcatgtctcccagatgtggtacttcaggaactctttttcaaactcacatcacagtacatctggagattgtctaagaggcagcctcctgacaccacaccattgcgaacatcggaggatctgataaatgcctgtagtcattatggcttaatttatccatgggttcaygtcgtaatatcatctgattctttagctgataaaaattatacagaagatctttcaaaattacagtctcttatatgtggtccttcatttgacatagcttccattattccgttcttggagccactttcagaagacactattgccggcctcagtgtccatgttctgtgtcgtacacgcttgaaagagtatgaacagtgcatagacatactgttagagagatgcccggaggcagtcattccatatgctaatcatgaactgaaagaagagaaccggactctgtggtggaaaaaactgttgcctgaactttgtcagagaataaaatgtggtggagagaagtatcaactctacctgtcatcattaaaagaaacattgtcaattgttgctgtggaactagaactgaaggatttcatgaatgttctcccagaagatggtactgcaacatttttcttgccatatcttctctattgcagtcgaaagaaaccattgacttaaaggtatcatttgaaaaataccataatggcatttgagactgaatttctaaaaattgaatgccaaagtacaagtagaggagttttttattttatatatwcacacacacacacacacacacacacacacacacacatatatgatacaaatgctttcaggctgcttaccttaccgtgtagtggtaactattcacttcttaatttatgacctcaatcaatttaattgtctagaatgtaaaaagtctttaagacataagaattcctcaaagaagccatacattttttaaggtggggattgacttttattccaaggaacaacatcagttcactgttgttggagacatgacaatcattttcatcccaagaacactttaaggaaacattttacaagtatgcttgaaagaatgtcactaactggtccagaattttatcttcttgatttttccagatttctctatgtttttgagaaagatgttaatgttttgccatggtaaaagatttcaaacctcattttttttgttccttttcttgktacttttaagaaaactcatgctctgtttctctgaatcaaatgaagtagaagtttacaaagctaactttcttcttgtctagctattaacatgatttgtcaaatgcatgtttttttcagccaaagccttgtttccatttttgttgatgtgtactcttgctcttttagctagagtgtatgtgaaaataaagaaatacatcattgtattcacaaccatgtgtcttcatttataactttttgtttaaaaaatttttagttcaagtttagttcattgatattatcctctgaatgcagttaaggctgggcagaaattctactcatgtgacatctgccacaggtctattttgaagcttttcttctaatggcaatgtttgtccttaccaggatttaatctatagaattgtctctcaactctgcttttctccagttccagataacgtccttaagaccatctgtgcaggggttcacaaaactcaaatttgtgtcattctattttatttattttattttttatttccttccctcataccttgcccattccctctgaatattaggtgtgatgtcaacagcatgttagaaggatcaatgggaaggcaatgattgaaaacatttcaatgaaccttaatagtgttcctttgaggagcacccaggagaatatctggtcata

SEQ ID NO: 1549 - DNA, 4347 bp, Homo sapiens
ccgcgggcggggccggctggcgttcacgtgacccggcgtcattggctcgctcgcggaagtagtcctacatycgcggtcagcgcggggtctccgggcgccctgcagggcgggcaggctgtgccatcccgccggacgtcgggatggtgcagctgtacaacctgcacccgttcgggtcgcagcaggtggtgccctgcaagctggagccggaccggttctgtggcggggggcgtgacgcgcttttcgtggcggcgggctgcaaggtggaggcgttcgcgrtggccggccaggagctgtgccagccgcggtgcgccttctccacgctgggccgggtgttgcgcctggcctacagcgaggctggagattatttggtagcaattgaagagaaaaacaaagctacatttctacgtgcttatgtgaactggagaaataaaaggactgaaaactctcgtgtgtgtatccgaatgattgggcataatgtggagggaccattcagcaaagccttcagagaccagatgtacattattgaaatgccgctttcggaggcccccttgtgcatttcctgttgccctgtgaaaggagaccttctcgttggctgcacaaataaattagtcttatttagtttgaagtaccagatcattaatgaggaattctcactattggactttgaacgttctttaattatacacatagataatatcactcctgttgaggtttctttttgtgttggatatgttgctgtcatgtcagacttagaagtcttaatcgtaaaactggagtcaggccctaaaaatggagagagagttcaccaccatccacataagaccaacaatcgaataagacggacagaagaaggcatcagtaatgaaatttcacagcttgagtcagatgattttgtcatctgccagaagcccctggaacttcttggtgaaaaaagtgaacagtctggattatctgttacactgragtctacgggattagctgatgaaaaaagaaaatattcccactttcagcacctgctctatagacgttttgctcctgatatttcgtcctatgtcttgtctgatgacatcaagctacattccctccagctgctacccatttaccagaccggttctcttacrtctgatggaaaaaatttgtctcaggaaaaagaattgctgagtctcttttgctttttctccttacctcatgtgggctatctctacatggttgtcaaatctgttgaattgatgtcagtctaccagtatcctgaaaagtctcagcaggcagtactcacgccacaatttttgcacgtcattacaagtaacaacctgcagtgtttcactgtgcggtgcagtgcggcggcagctcgtgaggaggacccgtacatggacaccaccctgaaggcttgcccacctgtcagtatggatgtctgtgctttaagaatacagcttttcataggcttgaaagccatctgtcactttaaaaaccacatcatacttttgactaaagcagaacctgaagccattccagagagaagacagtcacccaagaggcttctttcgagaaaagataccagtgttaaaatcaaaatacctcctgtagctgaggctgggtggaatttgtatattgtgaatacratctcaccagtgcarctgtacaaagagatggtagactatagcaatacctataagactgtcaaaacccagagctgcattcaccttctcagtgaggctcatctgttagtgcgagctgccctgatggatgccagtcagctggaacctggagagaaggcagagcttttggaagcatttaaggaaagctgtgggcaccttggggactgttacagcaggcttgactcccagcattctcatctcaccttgccatactataagatgtctggtttgtctatggctgaagttctggcccgcacggactggacagtagaggatggattacagaaatacgagagaggattaatcttttacattaatcattcactttatgaaaacctggatgaagaattaaatgaagaattagcagcaaaagtggttcagatgttttatgtggctgagccaaagcaagtgccccatattctctgtagtccttctatgaagaatattaatcctttaactgccatgagctatctaaggaagctggatacttctgggttttcatcgatcttagtgacattgaccaaggcagcagtggctctgaaaatgggagatcttgacatgcacagaaatgaaatgaaaagccattcagagatgaagttggtatgtggcttcattctggaacctcggctgttgattcaacagagaaagggacagattgttccaaccgagcttgcacttcacttgaaggaaactcagcctggattgcttgtggcttcagttctgggcttgcagaagaacaacaaaattggaattgaagaagcagattccttttttaaggtgctttgtgctaaggatgaagatacaattcctcagctcttggtagacttttgggaagctcagctagtggcatgtctcccagatgtggtacttcaggaactctttttcaaactcacatcacagtacatctggagattgtctaagaggcagcctcctgacaccacaccattgcgaacatcggaggatctgataaatgcctgtagtcattatggcttaatttatccatgggttcaygtcgtaatatcatctgattctttagctgataaaaattatacagaagatctttcaaaattacagtctcttatatgtggtccttcatttgacatagcttccattattccgttcttggagccactttcagaagacactattgccggcctcagtgtccatgttctgtgtcgtacacgcttgaaagagtatgaacagtgcatagacatactgttagagagatgcccggaggcagtcattccatatgctaatcatgaactgaaagaagagaaccggactctgtggtggaaaaaactgttgcctgaactttgtcagagaataaaatgtggtggagagaagtatcaactctacctgtcatcattaaaagaaacattgtcaattgttgctgtggaactagaactgaaggatttcatgaatgttctcccagaagatggtactgcaacatttttcttgccatatcttctctattgcagtcgaaagaaaccattgacttaaaggtatcatttgaaaaataccataatggcatttgagactgaatttctaaaaattgaatgccaaagtacaagtagaggagttttttattttatatatwcacacacacacacacacacacacacacacacacacatatatgatacaaatgctttcaggctgcttaccttaccgtgtagtggtaactattcacttcttaatttatgacctcaatcaatttaattgtctagaatgtaaaaagtctttaagacataagaattcctcaaagaagccatacattttttaaggtggggattgacttttattccaaggaacaacatcagttcactgttgttggagacatgacaatcattttcatcccaagaacactttaaggaaacattttacaagtatgcttgaaagaatgtcactaactggtccagaattttatcttcttgatttttccagatttctctatgtttttgagaaagatgttaatgttttgccatggtaaaagatttcaaacctcattttttttgttccttttcttgktacttttaagaaaactcatgctctgtttctctgaatcaaatgaagtagaagtttacaaagctaactttcttcttgtctagctattaacatgatttgtcaaatgcatgtttttttcagccaaagccttgtttccatttttgttgatgtgtactcttgctcttttagctagagtgtatgtgaaaataaagaaatacatcattgtattcacaaccatgtgtcttcatttataactttttgtttaaaaaatttttagttcaagtttagttcattgatattatcctctgaatgcagttaaggctgggcagaaattctactcatgtgacatctgccacaggtctattttgaagcttttcttctaatggcaatgtttgtccttaccaggatttaatctatagaattgtctctcaactctgcttttctccagttccagataacgtccttaagaccatctgtgcaggggttcacaaaactcaaatttgtgtcattctattttatttattttattttttatttccttccctcataccttgcccattccctctgaatattaggtgtgatgtcaacagcatgttagaaggatcaatgggaaggcaatgattgaaaacatttcaatgaaccttaatagtgttcctttgaggagcacccaggagaatatctggtcata

SEQ ID NO: 1550 - DNA, 1035 bp, Homo sapiens
ccgctctttggcccacttcattcccttagtcccgagtgctcgcccactgcagcttcctttcctgtgcggacatggcctcaagcaccaccaccactgccatgaagattggaataattggtggaacaggcctggatgatccagaaattttagaaggaagaactgaaaaatatgtggatactccatttggcaagccatttgatgtcttaattttggggaagataaaaaatgttgattgtgtcctccttgcaaggcatgggaggcagcacaccatcctggcttccaaggtcaactaccaggcgaccatctgggctttgaaggaagagggctgtacacatgtcatagggaccacagcttgtggctccttgagggaggagattcaacctggcgatattgtcattattgatcagttcattgacaggaccagtatgagacctcagtccctctatgatggaagtcattgttgtgctagaggagtgtgycatattccaatgggggccaagcccccaaacgagagacgttcttatagagactgctaagaagctaggactctggtgacattcaaaggggacaatggtcacaactgagggacctcgttttatctcttgagcagaaagcttcatgttctgcacctggggggtggatgttatcaacatgaccacagttccagaggtggttctcactaaagaggctggaatttgttatgcgagtattgccatggtgacagattatgactgctggaaggagcacgaggaagcagttttggtggaccgggacttacagaccccgaaagaaaatgctagtaaagccaaaagtttactgctcactgccatacctcagataggatccatggaatggtcaaaaaccctccatggcctgaagaatatagcccagttttctgttttaaaatttttgcaatctatccttttgacaaagggctaatatctagaatctacagagaactttaacaaatttacaagaaaaacaaacaaacaaccccatcaaaaagtgggagaaggatatgaacagacacttctc

SEQ ID NO: 1551 - DNA, 1160 bp, Homo sapiens
ggcggtgaggagaatagmaaacttgccctcacttaagatggccacatcctgcctttgtcctcattggtaaattggctctctcagcttccgtgacccgcctcccttcttcytcctgcccgtagtagccatggcggccatgagtttgttgcggcgggtttcggttactgcggtggcagctctgtctggscggccccttggcactcgcctcggatttgggggcttcctcmctcgtggctttccgaaggctgctgctcctgttcgacacagtggagaccatgggaaaagactatttgtcatcagaccttctagattctatgacaggcgttttttgaagttattgagattctacattgcattgactgggattccagtagcaattttcataactctggtgaatgtattcattggtcaagctgaactagcagaaattccagaaggctatgtcccagaacactgggaatattataagcatcccatatcaagatggattgcccgtaatttctatgatagtcctgaaaagatatatgaaagaacaatggccgtccttcagattgaagctgaaaaggctgaattacgggtaaaggagctggaagtgcgaaaattgatgcatgtgagaggagatggaccctggtattactatgagacaattgacaaggaacttattgatcattctccgaaagcaactcctgacaattaagcatttttttctccaaatacaaagtatattctctttattggaaaataaattaataaatatattctgtatttttgctctccgtgaaaaacaaaagagcctctgacattactgtctctcagtgttggttcagattgaggcttttgtttgaggagtttggcttccagtccccaaagaaggtttaaaatgtactaataaaaactggagaaataggaatttgtgaacycctaaaattgtagcaactttgaaaggttagtgttttatttacctgacaaatggaagttatagaagtctaataatgttaagcaccagtaattatagtattttgtacaaatgcctgtactgtagatgtctgtattattgaggggcaactcaggattttaagttccataaagtattgaaccaactctaaaatgttaactccttaataaacagattctcagtaaacaaattttaaagtttataa

SEQ ID NO: 1552 - DNA, 1027 bp, Homo sapiens
gggtttcggttactgcggtggcagctctgtctggscggccccttggcactcgcctcggatttgggggcttcctcmctcgtggctttccgaaggctgctgggtaattcaatattcccagctcctgttcgacacagtggagaccatgggaaaagactatttgtcatcagaccttctagattctatgacaggcgttttttgaagttattgagattctacattgcattgactgggattccagtagcaattttcataactctggtgaatgtattcattggtcaagctgaactagcagaaattccagaaggctatgtcccagaacactgggaatattataagcatcccatatcaagatggattgcccgtaatttctatgatagtcctgaaaagatatatgaaagaacaatggccgtccttcagattgaagctgaaaaggctgaattacgggtaaaggagctggaagtgcgaaaattgatgcatgtgagaggagatggaccctggtattactatgagacaattgacaaggaacttattgatcattctccgaaagcaactcctgacaattaagcatttttttctccaaatacaaagtatattctctttattggaaaataaattaataaatatattctgtatttttgctctccgtgaaaaacaaaagagcctctgacattactgtctctcagtgttggttcagattgaggcttttgtttgaggagtttggcttccagtccccaaagaaggtttaaaatgtactaataaaaactggagaaataggaatttgtgaacycctaaaattgtagcaactttgaaaggttagtgttttatttacctgacaaatggaagttatagaagtctaataatgttaagcaccagtaattatagtattttgtacaaatgcctgtactgtagatgtctgtattattgaggggcaactcaggattttaagttccataaagtattgaaccaactctaaaatgttaactccttaataaacagattctcagtaaacaaattttaaagtttataa

SEQ ID NO: 1553 - DNA, 987 bp, Homo sapiens
gggtttcggttactgcggtggcagctctgtctggscggccccttggcactcgcctcggatttgggggcttcctcmctcgtggctttccgaaggctgctgggtaattcaatattcccagctcctgttcgacacagtggagaccatgggaaaagactatttgtcatcagaccttctagattctatgacaggcgttttttgaagttattgagattctacattgcattgactgggattccagtagcaattttcataactctggtgaatgtattcattggtcaagctgaactagcagaaattccagaaggctatgtcccagaacactgggaatattataagcatcccatatcaagatggattgcccgtaatttctatgatagtcctgaaaagatatatgaaagaacaatggccgtccttcagattgaagctgaaaaggctgaattacgggtaaaggagctggaagtgcgaaaattgatgcatgtgagaggagatggaccctggtattactatgagacaattgacaaggaacttattgatcattctccgaaagcaactcctgacaattaagcatttttttctccaaatacaaagtatattctctttattggaaaataaattaataaatatattctgtatttttgctctccgtgaaaaacaaaagagcctctgacattactgtctctcagtgttggttcagattgaggcttttgtttgaggagtttaaaatgtactaataaaaactggagaaataggaatttgtgaacycctaaaattgtagcaactttgaaaggttagtgttttatttacctgacaaatggaagttatagaagtctaataatgttaagcaccagtaattatagtattttgtacaaatgcctgtactgtagatgtctgtattattgaggggcaactcaggattttaagttccataaagtattgaaccaactctaaaatgttaactccttaataaacagattctcagtaaacaaa

SEQ ID NO: 1554 - DNA, 1220 bp, Homo sapiens
ggcggtgaggagaatagmaaacttgccctcacttaagatggccacatcctgcctttgtcctcattggtaaattggctctctcagcttccgtgacccgcctcccttcttcytcctgcccgtagtagccatggcggccatgagtttgttgcggcgggtttcggttactgcggtggcagctctgtctggscggccccttggcactcgcctcggatttgggggcttcctcmctcgtggctttccgaaggctgctgctcctgttcgacacagtggagaccatgggaaaagactatttgtcatcagaccttctagattctatgacaggcgttttttgaagttattggctctatacgaacaaagtagaggcttagaaaatgggagattgtctggaccatctgccacgagattctacattgcattgactgggattccagtagcaattttcataactctggtgaatgtattcattggtcaagctgaactagcagaaattccagaaggctatgtcccagaacactgggaatattataagcatcccatatcaagatggattgcccgtaatttctatgatagtcctgaaaagatatatgaaagaacaatggccgtccttcagattgaagctgaaaaggctgaattacgggtaaaggagctggaagtgcgaaaattgatgcatgtgagaggagatggaccctggtattactatgagacaattgacaaggaacttattgatcattctccgaaagcaactcctgacaattaagcatttttttctccaaatacaaagtatattctctttattggaaaataaattaataaatatattctgtatttttgctctccgtgaaaaacaaaagagcctctgacattactgtctctcagtgttggttcagattgaggcttttgtttgaggagtttggcttccagtccccaaagaaggtttaaaatgtactaataaaaactggagaaataggaatttgtgaacycctaaaattgtagcaactttgaaaggttagtgttttatttacctgacaaatggaagttatagaagtctaataatgttaagcaccagtaattatagtattttgtacaaatgcctgtactgtagatgtctgtattattgaggggcaactcaggattttaagttccataaagtattgaaccaactctaaaatgttaactccttaataaacagattctcagtaaacaaattttaaagtttataa

SEQ ID NO: 1555 - DNA, 954 bp, Homo sapiens
cgtagtagccatggcggccatgagtttgttgcggcgggtttcggttactgcggtggcagctctgtctggscggccccttggcactcgcctcggatttgggggcttcctcmctcgtggctttccgaaggctgctgagattctacattgcattgactgggattccagtagcaattttcataactctggtgaatgtattcattggtcaagctgaactagcagaaattccagaaggctatgtcccagaacactgggaatattataagcatcccatatcaagatggattgcccgtaatttctatgatagtcctgaaaagatatatgaaagaacaatggccgtccttcagattgaagctgaaaaggctgaattacgggtaaaggagctggaagtgcgaaaattgatgcatgtgagaggagatggaccctggtattactatgagacaattgacaaggaacttattgatcattctccgaaagcaactcctgacaattaagcatttttttctccaaatacaaagtatattctctttattggaaaataaattaataaatatattctgtatttttgctctccgtgaaaaacaaaagagcctctgacattactgtctctcagtgttggttcagattgaggcttttgtttgaggagtttggcttccagtccccaaagaaggtttaaaatgtactaataaaaactggagaaataggaatttgtgaacycctaaaattgtagcaactttgaaaggttagtgttttatttacctgacaaatggaagttatagaagtctaataatgttaagcaccagtaattatagtattttgtacaaatgcctgtactgtagatgtctgtattattgaggggcaactcaggattttaagttccataaagtattgaaccaactctaaaatgttaactccttaataaacagattctcagtaaacaaattttaaagtttataa

SEQ ID NO: 1556 - DNA, 1053 bp, Homo sapiens
ggcggtgaggagaatagmaaacttgccctcacttaagatggccacatcctgcctttgtcctcattggtaaattggctctctcagcttccgtgacccgcctcccttcttcytcctgcccgtagtagccatggcggccatgagtttgttgcggcgggtttcggttactgcggtggcagctctgtctggscggccccttggcactcgcctcggatttgggggcttcctcmctcgtggctttccgaaggctgctgctcctgttcgacacagtggagaccatgggaaaagactatttgtcatcagaccttctagattctatgacaggcgttttttgaagttattgagattctacattgcattgactgggattccagtagcaattttcataactctggtgaatgtattcattggtcaagctgaactagcagaaattccagaaggctatgtcccagaacactgggaatattataagggtaaaggagctggaagtgcgaaaattgatgcatgtgagaggagatggaccctggtattactatgagacaattgacaaggaacttattgatcattctccgaaagcaactcctgacaattaagcatttttttctccaaatacaaagtatattctctttattggaaaataaattaataaatatattctgtatttttgctctccgtgaaaaacaaaagagcctctgacattactgtctctcagtgttggttcagattgaggcttttgtttgaggagtttggcttccagtccccaaagaaggtttaaaatgtactaataaaaactggagaaataggaatttgtgaacycctaaaattgtagcaactttgaaaggttagtgttttatttacctgacaaatggaagttatagaagtctaataatgttaagcaccagtaattatagtattttgtacaaatgcctgtactgtagatgtctgtattattgaggggcaactcaggattttaagttccataaagtattgaaccaactctaaaatgttaactccttaataaacagattctcagtaaacaaattttaaagtttataa

SEQ ID NO: 1557 - DNA, 892 bp, Homo sapiens
cgtagtagccatggcggccatgagtttgttgcggcgggtttcggttactgcggtggcagctctgtctggscggccccttggcactcgcctcggatttgggggcttcctcmctcgtggctttccgaaggctgctgagattctacattgcattgactgggattccagtagcaattttcataactctggtgaatgtattcattgcatcccatatcaagatggattgcccgtaatttctatgatagtcctgaaaagatatatgaaagaacaatggccgtccttcagattgaagctgaaaaggctgaattacgggtaaaggagctggaagtgcgaaaattgatgcatgtgagaggagatggaccctggtattactatgagacaattgacaaggaacttattgatcattctccgaaagcaactcctgacaattaagcatttttttctccaaatacaaagtatattctctttattggaaaataaattaataaatatattctgtatttttgctctccgtgaaaaacaaaagagcctctgacattactgtctctcagtgttggttcagattgaggcttttgtttgaggagtttggcttccagtccccaaagaaggtttaaaatgtactaataaaaactggagaaataggaatttgtgaacycctaaaattgtagcaactttgaaaggttagtgttttatttacctgacaaatggaagttatagaagtctaataatgttaagcaccagtaattatagtattttgtacaaatgcctgtactgtagatgtctgtattattgaggggcaactcaggattttaagttccataaagtattgaaccaactctaaaatgttaactccttaataaacagattctcagtaaacaaattttaaagtttataa

SEQ ID NO: 1558 - DNA, 965 bp, Homo sapiens
gggtttcggttactgcggtggcagctctgtctggscggccccttggcactcgcctcggatttgggggcttcctcmctcgtggctttccgaaggctgctgggtaattcaatattcccagctcctgttcgacacagtggagaccatgggaaaagactatttgtcatcagaccttctagattctatgacaggcgttttttgaagttattgagattctacattgcattgactgggattccagtagcaattttcataactctggtgaatgtattcattgcatcccatatcaagatggattgcccgtaatttctatgatagtcctgaaaagatatatgaaagaacaatggccgtccttcagattgaagctgaaaaggctgaattacgggtaaaggagctggaagtgcgaaaattgatgcatgtgagaggagatggaccctggtattactatgagacaattgacaaggaacttattgatcattctccgaaagcaactcctgacaattaagcatttttttctccaaatacaaagtatattctctttattggaaaataaattaataaatatattctgtatttttgctctccgtgaaaaacaaaagagcctctgacattactgtctctcagtgttggttcagattgaggcttttgtttgaggagtttggcttccagtccccaaagaaggtttaaaatgtactaataaaaactggagaaataggaatttgtgaacycctaaaattgtagcaactttgaaaggttagtgttttatttacctgacaaatggaagttatagaagtctaataatgttaagcaccagtaattatagtattttgtacaaatgcctgtactgtagatgtctgtattattgaggggcaactcaggattttaagttccataaagtattgaaccaactctaaaatgttaactccttaataaacagattctcagtaaacaaattttaaagtttataa

SEQ ID NO: 1559 - DNA, 887 bp, Homo sapiens
cgtagtagccatggcggccatgagtttgttgcggcgggtttcggttactgcggtggcagctctgtctggscggccccttggcactcgcctcggatttgggggcttcctcmctcgtggctttccgaaggctgctggtcaagctgaactagcagaaattccagaaggctatgtcccagaacactgggaatattataagcatcccatatcaagatggattgcccgtaatttctatgatagtcctgaaaagatatatgaaagaacaatggccgtccttcagattgaagctgaaaaggctgaattacgggtaaaggagctggaagtgcgaaaattgatgcatgtgagaggagatggaccctggtattactatgagacaattgacaaggaacttattgatcattctccgaaagcaactcctgacaattaagcatttttttctccaaatacaaagtatattctctttattggaaaataaattaataaatatattctgtatttttgctctccgtgaaaaacaaaagagcctctgacattactgtctctcagtgttggttcagattgaggcttttgtttgaggagtttggcttccagtccccaaagaaggtttaaaatgtactaataaaaactggagaaataggaatttgtgaacycctaaaattgtagcaactttgaaaggttagtgttttatttacctgacaaatggaagttatagaagtctaataatgttaagcaccagtaattatagtattttgtacaaatgcctgtactgtagatgtctgtattattgaggggcaactcaggattttaagttccataaagtattgaaccaactctaaaatgttaactccttaataaacagattctcagtaaacaaattttaaagtttataa

SEQ ID NO: 1560 - DNA, 2935 bp, Homo sapiens
ccgcgcgctctcgccccgggagggagtcacaggttcgtacacgcgaggccgggcgcgcgcagccggcasgcgggtgaagtcttcccaggtgctgcaggcggtgctgaggcacagggtctgctgcaggagcagcggcccgaacccgctccagcggcccgccgccgccagcggytcccgcgtcgcgtgtgtacccccgcgcactgaaggaggtccrccagccctcaccagcccccgcggaccgtgcaatggcccagcgtaagaatgccaagagcagcggcaacagcagcagcagcggctccggcagcggtagcacgagtgcgggcagcagcagccccggggcccggagagagacaaagcatggaggacacaagaatgggaggaaaggcggactctcaggaacttcattcttcacgtggtttatggtgattgcattgctgggcgtctggacatctgtagctgtcgtttggtttgatcttgttgactatgaggaagttctaggaaaactaggaatctatgatgctgatggtgatggagattttgatgtggatgatgccaaagttttattaggacttaaagagagatctacttcagagccagcagtcccgccagaagaggctgagccacacactgagcccgaggagcaggttcctgtggaggcagaaccccagaatatcgaagatgaagcaaaagaacaaattcagtcccttctccatgaaatggtacacgcagaacatgttgagggagaagacttgcaacaagaagatggacccacargagaaccacaacaagaggatgatgagtttcttatggcgactgatgtagatgatagatttgagaccctggaacctgaagtatctcatgaagaaaccgagcatagttaccacgtggaagagacagtttcacaagactgtaatcaggatatggaagagatgatgtctgagcaggaaaatccagattccagtgaaccagtagtagaagatgaaagattgcaccatgatacagatgatgtaacataccaagtctatgaggaacaagcagtatatgaacctctagaaaatgaagggatagaaatcacagaagtaactgctccccctgaggataatcctgtagaagattcacaggtaattgtagaagaagtaagcatttttcctgtggaagaacagcaggaagtaccaccagatacttaaagcttcaaaaagactgcccctaccaccacaggaggaccagcctaaccatacgctccaaaagatggctgtgatagatcttgtgaagcaattactgagcagatcaagatctttgggaaggaacactaaagatgttttgaatgaattatagtccactggcattttagtgtatttttttttctttttagaaacacacatttctaaaaatgtcatgttacattcctgcatgtcccttttgatagcattagtggatccattggatttcttttttctttttgtgagacagcttttagtcttacctgaatttatgtgtgtttttccgacagtggttaataattatattggtgatgtagcagcaattgtgttggcagggttttcatatattattagtaattaacactaactgttggactgacttgtgtacactgtgttaaacatgatttaaaagctattaagagtactttgtgttagcactcttaaaaacgctaacagagatcatcattagctgtgaagatttgagttgtatatacctgcactgatattcttatcaaaaatttctacattagctttaagtgttcagattaacacttttgaaatttttgtagcttttagctgattaattagaaaaatttaatatttcagtgaaagttttaaattatcatttatttatttttttaaatgagaggggaaagctgaaattccttgttaagacacaaggaaaaagaatggccctactattatcatgcaaaaatgctttgttggcacctcagattaatcatataatagctatagtctcttcagcatttgtttaaattttagaaaacctgtataaattactggtgcataacttaaagattattctgcctttggctaattgagtaattcccctccagcactagagaccgctcagtgctcttactagatgaactcagtaacgccttgagctgggttgattgaggatgtgtgaaaagctcacagagcccgatgcctgctgctatttcacggcaatgagcctttttctttctacactgaagattttcttcttatttaatgtggtttattttgggctcagaaataattgctctgttgaaaataatcctttgtcagaaaagaaggtagctaccacatcattttgaaaggaccatgagcaactataagcaaagccataagaagtggtttgatcgatatattaggggtagctcttgattttgttaacattaagataaggtgactttttccccctgcttttaggattaaaatcaaagatacttctatatttttatcactatagatcatagttattatacaatgtagtgagtcctgcatgggtactcgatgtgtaatgaaacctgaaataataagataataagaaaagcaataattttctaaagctgtgctgtcggtgatacagagatgatactcaaattataataaaactcttcattttgtgaattatagaagctactttttataaagccatatttttttagggaaactaaggagtgacatagaactgatgaatgagyaaaagtaagttttgctggatttttgtagaactctggacgttgaggattcattatgctgtggttaactttaaatatttttgaattccaaatatctgaattaatgagccttgtctttacaaatatgtgccattgtgcaacatcggtggattttctaaaaataatgtaaatgtcttctattaaatgttgagtgcaataaaatacagaagaattctctatattgtcatt

SEQ ID NO: 1561 - DNA, 1487 bp, Homo sapiens
gcttgattttttaggggttggagttagctaggaccaactgggaaaagaatcccgtaagtgggagaaaggctgtggtgttgttagggagtgcacttcagcctaagtggtgattagcagcatttagcctctaaaaataactggtgagcagagtttgtagtcaggtccaatttcagttctagaggcccttacagtgcagggattggccagtctcaagctctggtaggcaagtgcatgcagtgtgcctaaaacctgccagcagtacttttgagtttttttttttgttttgttttactttagcatttattattcatggattgaagaaatcaaaatggctgaagataaagagacaaagcatggaggacacaagaatgggaggaaaggcggactctcaggaacttcattcttcacgtggtttatggtgattgcattgctgggcgtctggacatctgtagctgtcgtttggtttgatcttgttgactatgaggaagttctaggaaaactaggaatctatgatgctgatggtgatggagattttgatgtggatgatgccaaagttttattagaaggacccagtggggtagccaagagaaaaactaaggctaaagttaaagaactcactaaagaagagctcaagaaggagaaagagaaacctgagtcaaggaaggaaagtaagaatgaagagagaaaaaaggggaagaaagaggatgtccgaaaggataagaaaattgctgatgcagacctatccaggaaggagtctcctaagggtaaaaaggacagagaaaaagagaaagtggacctagaaaaaagtgctaaaaccaaggaaaataggaaaaaatcaacaaatatgaaggatgtttctagtaaaatggcatcccgagacaaagatgacagaaaggaaagtagaagttctaccagatatgcacacttaacaaagggaaatacccagaaaagaaacggctaaagctctggcatcatcatcccagaacatggtcatgttccagattgcagtttgttacaaaaaagcatggaaaatgtaatattgctctgattggtgagggtgtgtaaattagccattgaatgtatcattggtgcttagcaagtaaattacctgaaatttaaatataccgtctcatacttctaaatgtaaaaacattttaaaaatgtcatagaatatgatgtaataacttctatttattgatcatgtattcagataaatgtatatgtatcatgaatttttatggattaatatattgaatactttcattgacgttaaataagaatattaagattttaaatgttatttctgtgcataatgccttgtaactttttcaagtatgctaaatactcagggagatggatttgctcgttgttttcttccctccttccccttcctgcttccctgtttttctctttcgtggacacctccccaggctcatgtgccaccaccttccctcctctccagccctcccagccctcccgcagccttt

SEQ ID NO: 1562 - DNA, 2980 bp, Homo sapiens
ccgcgcgctctcgccccgggagggagtcacaggttcgtacacgcgaggccgggcgcgcgcagccggcasgcgggtgaagtcttcccaggtgctgcaggcggtgctgaggcacagggtctgctgcaggagcagcggcccgaacccgctccagcggcccgccgccgccagcggytcccgcgtcgcgtgtgtacccccgcgcactgaaggaggtccrccagccctcaccagcccccgcggaccgtgcaatggcccagcgtaagaatgccaagagcagcggcaacagcagcagcagcggctccggcagcggtagcacgagtgcgggcagcagcagccccggggcccggagagagacaaagcatggaggacacaagaatgggaggaaaggcggactctcaggaacttcattcttcacgtggtttatggtgattgcattgctgggcgtctggacatctgtagctgtcgtttggtttgatcttgttgactatgaggaagttctagccaaagcaaaggacttccgttataacttatcagaggtgcttcaaggaaaactaggaatctatgatgctgatggtgatggagattttgatgtggatgatgccaaagttttattaggacttaaagagagatctacttcagagccagcagtcccgccagaagaggctgagccacacactgagcccgaggagcaggttcctgtggaggcagaaccccagaatatcgaagatgaagcaaaagaacaaattcagtcccttctccatgaaatggtacacgcagaacatgttgagggagaagacttgcaacaagaagatggacccacargagaaccacaacaagaggatgatgagtttcttatggcgactgatgtagatgatagatttgagaccctggaacctgaagtatctcatgaagaaaccgagcatagttaccacgtggaagagacagtttcacaagactgtaatcaggatatggaagagatgatgtctgagcaggaaaatccagattccagtgaaccagtagtagaagatgaaagattgcaccatgatacagatgatgtaacataccaagtctatgaggaacaagcagtatatgaacctctagaaaatgaagggatagaaatcacagaagtaactgctccccctgaggataatcctgtagaagattcacaggtaattgtagaagaagtaagcatttttcctgtggaagaacagcaggaagtaccaccagatacttaaagcttcaaaaagactgcccctaccaccacaggaggaccagcctaaccatacgctccaaaagatggctgtgatagatcttgtgaagcaattactgagcagatcaagatctttgggaaggaacactaaagatgttttgaatgaattatagtccactggcattttagtgtatttttttttctttttagaaacacacatttctaaaaatgtcatgttacattcctgcatgtcccttttgatagcattagtggatccattggatttcttttttctttttgtgagacagcttttagtcttacctgaatttatgtgtgtttttccgacagtggttaataattatattggtgatgtagcagcaattgtgttggcagggttttcatatattattagtaattaacactaactgttggactgacttgtgtacactgtgttaaacatgatttaaaagctattaagagtactttgtgttagcactcttaaaaacgctaacagagatcatcattagctgtgaagatttgagttgtatatacctgcactgatattcttatcaaaaatttctacattagctttaagtgttcagattaacacttttgaaatttttgtagcttttagctgattaattagaaaaatttaatatttcagtgaaagttttaaattatcatttatttatttttttaaatgagaggggaaagctgaaattccttgttaagacacaaggaaaaagaatggccctactattatcatgcaaaaatgctttgttggcacctcagattaatcatataatagctatagtctcttcagcatttgtttaaattttagaaaacctgtataaattactggtgcataacttaaagattattctgcctttggctaattgagtaattcccctccagcactagagaccgctcagtgctcttactagatgaactcagtaacgccttgagctgggttgattgaggatgtgtgaaaagctcacagagcccgatgcctgctgctatttcacggcaatgagcctttttctttctacactgaagattttcttcttatttaatgtggtttattttgggctcagaaataattgctctgttgaaaataatcctttgtcagaaaagaaggtagctaccacatcattttgaaaggaccatgagcaactataagcaaagccataagaagtggtttgatcgatatattaggggtagctcttgattttgttaacattaagataaggtgactttttccccctgcttttaggattaaaatcaaagatacttctatatttttatcactatagatcatagttattatacaatgtagtgagtcctgcatgggtactcgatgtgtaatgaaacctgaaataataagataataagaaaagcaataattttctaaagctgtgctgtcggtgatacagagatgatactcaaattataataaaactcttcattttgtgaattatagaagctactttttataaagccatatttttttagggaaactaaggagtgacatagaactgatgaatgagyaaaagtaagttttgctggatttttgtagaactctggacgttgaggattcattatgctgtggttaactttaaatatttttgaattccaaatatctgaattaatgagccttgtctttacaaatatgtgccattgtgcaacatcggtggattttctaaaaataatgtaaatgtcttctattaaatgttgagtgcaataaaatacagaagaattctctatattgtcatt

SEQ ID NO: 1563 - DNA, 1669 bp, Homo sapiens
gcttgattttttaggggttggagttagctaggaccaactgggaaaagaatcccgtaagtgggagaaaggctgtggtgttgttagggagtgcacttcagcctaagtggtgattagcagcatttagcctctaaaaataactggtgagcagagtttgtagtcaggtccaatttcagttctagaggcccttacagtgcagggattggccagtctcaagctctggtaggcaagtgcatgcagtgtgcctaaaacctgccagcagtacttttgagtttttttttttgttttgttttactttagcatttattattcatggattgaagaaatcaaaatggctgaagataaagagacaaagcatggaggacacaagaatgggaggaaaggcggactctcaggaacttcattcttcacgtggtttatggtgattgcattgctgggcgtctggacatctgtagctgtcgtttggtttgatcttgttgactatgaggaagttctagccaaagcaaaggacttccgttataacttatcagaggtgcttcaaggaaaactaggaatctatgatgctgatggtgatggagattttgatgtggatgatgccaaagttttattaggcctgaccaaagatggcagtaatgaaaatattgattctcttgaggaagtccttaatattttagcagaggaaagttcagattggttttatggtttcctctcatttctctatgatataatgactccttttgaaatgctagaagaagaagaagaagaaagcgaaaccgcagatggtgttgatggtacgtcacagaatgaaggggttcagggaaagacttgtgtcatattggatttacataaccagtaaccttgattcagggactgaagtcattggctaatgaacacctgaagcagcctcctttttcttttctttccttggcttatgcagggcttaatgtgcagtggggtggttgtgatcttaccgtgcaagtcaaccatgtgatcttgcccagtacagctactagctagtcccttgctcgctcagctcccccaacttctattgaagaaaatggtactcctcattcttgtagtcagctacaaagtacactgaaaatgatgttcttggtggtataattggtttctgtatcgttttgtttcaactcatgtattcactgaactaaatttggacacttaacagcaaattgtgttgtggttaacccttgatgcttgtctttctaacacactattaattatgatgattctaatggatttcattataaaaatatttctggcatgatttttaagttaaatgcttctctgttctttaacatgactgatgtataaaatgatggttctttactaagctgatattttttattgtaatttgtttaggtttgtcagataggttcatacaaatttctatgtaaaattctgtgttaatggtgcttttaaaataatttaaaaataactccatgtttttgccttagagtaagttaacttactgttttcagatagtagcatgacatatttctgtctgtgaaagcaaaatttattttaaattttatttccaaatatacatccagagaaagtaatttgtattttttttaaagtaggcatattacacaagagggaacatgtgaatatgtatcttaatgttgtacatattaaaattattcatcctaaa

SEQ ID NO: 1564 - DNA, 1532 bp, Homo sapiens
gcttgattttttaggggttggagttagctaggaccaactgggaaaagaatcccgtaagtgggagaaaggctgtggtgttgttagggagtgcacttcagcctaagtggtgattagcagcatttagcctctaaaaataactggtgagcagagtttgtagtcaggtccaatttcagttctagaggcccttacagtgcagggattggccagtctcaagctctggtaggcaagtgcatgcagtgtgcctaaaacctgccagcagtacttttgagtttttttttttgttttgttttactttagcatttattattcatggattgaagaaatcaaaatggctgaagataaagagacaaagcatggaggacacaagaatgggaggaaaggcggactctcaggaacttcattcttcacgtggtttatggtgattgcattgctgggcgtctggacatctgtagctgtcgtttggtttgatcttgttgactatgaggaagttctagccaaagcaaaggacttccgttataacttatcagaggtgcttcaaggaaaactaggaatctatgatgctgatggtgatggagattttgatgtggatgatgccaaagttttattagaaggacccagtggggtagccaagagaaaaactaaggctaaagttaaagaactcactaaagaagagctcaagaaggagaaagagaaacctgagtcaaggaaggaaagtaagaatgaagagagaaaaaaggggaagaaagaggatgtccgaaaggataagaaaattgctgatgcagacctatccaggaaggagtctcctaagggtaaaaaggacagagaaaaagagaaagtggacctagaaaaaagtgctaaaaccaaggaaaataggaaaaaatcaacaaatatgaaggatgtttctagtaaaatggcatcccgagacaaagatgacagaaaggaaagtagaagttctaccagatatgcacacttaacaaagggaaatacccagaaaagaaacggctaaagctctggcatcatcatcccagaacatggtcatgttccagattgcagtttgttacaaaaaagcatggaaaatgtaatattgctctgattggtgagggtgtgtaaattagccattgaatgtatcattggtgcttagcaagtaaattacctgaaatttaaatataccgtctcatacttctaaatgtaaaaacattttaaaaatgtcatagaatatgatgtaataacttctatttattgatcatgtattcagataaatgtatatgtatcatgaatttttatggattaatatattgaatactttcattgacgttaaataagaatattaagattttaaatgttatttctgtgcataatgccttgtaactttttcaagtatgctaaatactcagggagatggatttgctcgttgttttcttccctccttccccttcctgcttccctgtttttctctttcgtggacacctccccaggctcatgtgccaccaccttccctcctctccagccctcccagccctcccgcagccttt

SEQ ID NO: 1565 - DNA, 5324 bp, Homo sapiens
ccgcgcgctctcgccccgggagggagtcacaggttcgtacacgcgaggccgggcgcgcgcagccggcasgcgggtgaagtcttcccaggtgctgcaggcggtgctgaggcacagggtctgctgcaggagcagcggcccgaacccgctccagcggcccgccgccgccagcggytcccgcgtcgcgtgtgtacccccgcgcactgaaggaggtccrccagccctcaccagcccccgcggaccgtgcaatggcccagcgtaagaatgccaagagcagcggcaacagcagcagcagcggctccggcagcggtagcacgagtgcgggcagcagcagccccggggcccggagagagacaaagcatggaggacacaagaatgggaggaaaggcggactctcaggaacttcattcttcacgtggtttatggtgattgcattgctgggcgtctggacatctgtagctgtcgtttggtttgatcttgttgactatgaggaagttctaggaaaactaggaatctatgatgctgatggtgatggagattttgatgtggatgatgccaaagttttattaggacttaaagagagatctacttcagagccagcagtcccgccagaagaggctgagccacacactgagcccgaggagcaggttcctgtggaggcagaaccccagaatatcgaagatgaagcaaaagaacaaattcagtcccttctccatgaaatggtacacgcagaacatgttgagggagaagacttgcaacaagaagatggacccacargagaaccacaacaagaggatgatgagtttcttatggcgactgatgtagatgatagatttgagaccctggaacctgaagtatctcatgaagaaaccgagcatagttaccacgtggaagagacagtttcacaagactgtaatcaggatatggaagagatgatgtctgagcaggaaaatccagattccagtgaaccagtagtagaagatgaaagattgcaccatgatacagatgatgtaacataccaagtctatgaggaacaagcagtatatgaacctctagaaaatgaagggatagaaatcacagaagtaactgctccccctgaggataatcctgtagaagattcacaggtaattgtagaagaagtaagcatttttcctgtggaagaacagcaggaagtaccaccagaaacaaatagaaaaacagatgatccagaacaaaaagcaaaagttaagaaaaagaagcctaaacttttaaataaatttgataagactattaaagctgaacttgatgctgcagaaaaactccgtaaaaggggaaaaattgaggaagcagtgaatgcatttaaagaactagtacgcaaataccctcagagtccacgagcaagatatgggaaggcrcagtgtgaggatgatttggctgagaagaggagaagtaatgaggtgctacgtggagccatcgagacctaccaagaggtggccagcctacctgatgtccctgcagacctgctgaagctgagtttgaagcgtcgctcagacaggcaacaatttctaggtcatatgagaggttccctgcttaccctgcagagattagttcaactatttcccaatgatacttccttaaaaaatgaccttggcgtgggatacctcttgatargagataatgacaatgcaaagaaagtttatgaagaggtgctgagtgtgacacctaatgatggctttgctaaagtccattatggcttcatcctgaaggcacagaacaaaattgctgagagcatcccatatttaaaggaaggaatagaatccggagatcctggcactgatgatgggagattttatttccacctgggggatgccatgcagagggttgggaacaaagaggcatataagtggtatgagcttgggcacaagagaggacactttgcatctgtctggcaacgctcactctacaatgtgaatggactgaaagcacagccttggtggaccccaaaagaaacgggctacacagagttagtaaagtctttagaaagaaactggaagttaatccgagatgaaggccttgcagtgatggataaagccaaaggtctcttcctgcctgaggatgaaaacctgagggaaaaaggggactggagccagttcacgctgtggcagcaaggaagaagaaatgaaaatgcctgcaaaggagctcctaaaacctgtaccttactagaaaagttccccgagacaacaggatgcagaagaggacagatcaaatattccatcatgcaccccgggactcacgtgtggccgcacacagggcccacaaactgcaggctccgaatgcacctgggcttggtgattcccaaggaaggctgcaagattcgatgtgccaacgagaccaagacctgggaggaaggcaaggtgctcatctttgatgactcctttgagcacgaggtatggcaggatgcctcatctttccggctgatattcatcgtggatgtgtggcatccggaactgacaccacagcagagacgcagccttccagcaatttagcatgaattcatgcaagcttgggaaactctggagagaggctgcctttctggttccatctccttgggtgtgaggatagaatttcgaacaccaagagtcaattcccttgacttgcagcccgagtaattcaaagcctcctcctagggtcagaagacactaaagggaatatttgcctcgctgcaattcatttaggaaacaccctgctgtgtgtcatctcatgacagcactggtcttctgccagtatttaaggtgaacatttgatagcttctaccttaccagccaaagatattttttccacatagaataggtctaattcaatgtataatgagaacatatgtagaaactgtgaatggattgctttagtttgtaatttttctatgcagttatatttttctagtgtagctagactattttgtcatcatgtaccactacatttttgtttattttaatgacaagctgtataaatgctttacttctagctatttaatggtagcattactggggaactcagacttccctcttttaattcttcttagtaaaagatactcatgaaaaaagcagttttattttcctaacaaaaaagaaagagctcattatgtcagtgtctatgaactgtacccatcccaactctcaaatcgtttggttttttttatcttgattgagatcctcttctcactatgctagtggtggagatattgacaaaatcctatttctttcaaagaggaacttttcacaccgaaaaaagagcatggaattattttatattgttataaaaatcccagatgcaaatttttttaatgccaattattagagcttctggggaaaaagtatagttcacggaaataaaactatgttctttcagggttgggtggataggtggctgctagggtgtctggctcctggcggctttgccatccatgaggcaagggctgggaacacagtgtctttgcctatggtagatccatgtgaatgtcaggaagccagctcttcagtcttggagatgatttctgctacaattctgtagaaagattaaggatggcagagtaaaaggttaccaagaatgccaggatgtttttcttgggcgtaggaggtccagattactttcctttttgatgaaagagtttggaagactgtcccatctctctggcttgagaaatctctgccattttaaacatcactgtgaaatagcaattattatcatctgtatttagttttaacattacccacaacatagaaataataggtaaaaatcgtcttgcctactcattccaaagatgatcaagtcattaatctagcaaagtattcatgtatcagattttgtatattttgaatcaaagctaactaggaatgttagatataagaatgtaatgatattcatgcactgaattctaagccaatatgaacaaaaatgctgcatgaatggcacatataggtcaccaaagttcattcacaggtagaaaaaacttgtgctttcttttccatctaaaaacaaaaggagactttctttatctcatttaaagaacagctctttgaaattgaaattgaccctttttgcttgaccttaaggagattagcttccagtagatgagtttgcaaaatacttttcctgttcttttgttttgctggtattgaaaacatcccactaaatcagatgaagaggcatgggaggaaaaatatccaaattaattactaaaatcgagaagagaaggcaaactcttgaaaagtaaaaaggtgtttgtgaccttcagtatttattgaacagaggaaataactgacaagggcaatacaattcaatgttcatgtagtaacattcatgtcacttgttgaatttggttctcatatgtatattgcatacacataaattcaaactataagtcgtcatttttgagccatcatcttacattcatgtaatgaaattatggaagagagtaaaaactagctcttaacttagtaaatataatatggtatttaaaatcaggtcactacagtaaggttctaagtattgccaattgaaaagctagaaatggtattactgttgcaaagtgttgtcaataattgactccaatagcattgtaaatacttgtatcccacaactattttaaacccaagcaataaaatggattttctaattcacttcaattctttatttctcttacctatctatgtcttggtacataagaaaagtgtttccatcactgcattggtagaattatttcagtgttattatttttgtgatttcgtatgtctacacaaaaatgaattagtttaatttatattgtgatacagttgtttgagaaatatttttaattctgtttcaactttatttctccaagtgtataatataaaaattacttctgttattgttctctaccaataggggaaaaaattaaaacattagatccattgagaaagagatgatgtaataaataattaagattagtaataatattatcaggggtgattatgaccagttgaataatctctttcccttgaattatttagctaacaaattaactctcccaaatatttaaaataatgtaaaatcatattttactgcccattattaactaaaatatttttgtttgactttgagcaccaactggtaatactaataaatacccatgtcatgcagatggctgggcgaataagagatgtctaaaaatatgcactggtcttggaaaacatggcacaagtaaggatrtcatatatgatgtctgtttattttatgtctgatttcttttgaatgagtagttggggactccatttctaaggagactaggtaaataaaatgacctttgacatttc

SEQ ID NO: 1566 - DNA, 2895 bp, Homo sapiens
gcttgattttttaggggttggagttagctaggaccaactgggaaaagaatcccgtaagtgggagaaaggctgtggtgttgttagggagtgcacttcagcctaagtggtgattagcagcatttagcctctaaaaataactggtgagcagagtttgtagtcaggtccaatttcagttctagaggcccttacagtgcagggattggccagtctcaagctctggtaggcaagtgcatgcagtgtgcctaaaacctgccagcagtacttttgagtttttttttttgttttgttttactttagcatttattattcatggattgaagaaatcaaaatggctgaagataaagagacaaagcatggaggacacaagaatgggaggaaaggcggactctcaggaacttcattcttcacgtggtttatggtgattgcattgctgggcgtctggacatctgtagctgtcgtttggtttgatcttgttgactatgaggaagttctagccaaagcaaaggacttccgttataacttatcagaggtgcttcaaggaaaactaggaatctatgatgctgatggtgatggagattttgatgtggatgatgccaaagttttattaggacttaaagagagatctacttcagagccagcagtcccgccagaagaggctgagccacacactgagcccgaggagcaggttcctgtggaggcagaaccccagaatatcgaagatgaagcaaaagaacaaattcagtcccttctccatgaaatggtacacgcagaacatgttgagggagaagacttgcaacaagaagatggacccacargagaaccacaacaagaggatgatgagtttcttatggcgactgatgtagatgatagatttgagaccctggaacctgaagtatctcatgaagaaaccgagcatagttaccacgtggaagagacagtttcacaagactgtaatcaggatatggaagagatgatgtctgagcaggaaaatccagattccagtgaaccagtagtagaagatgaaagattgcaccatgatacagatgatgtaacataccaagtctatgaggaacaagcagtatatgaacctctagaaaatgaagggatagaaatcacagaagtaactgctccccctgaggataatcctgtagaagattcacaggtaattgtagaagaagtaagcatttttcctgtggaagaacagcaggaagtaccaccagatacttaaagcttcaaaaagactgcccctaccaccacaggaggaccagcctaaccatacgctccaaaagatggctgtgatagatcttgtgaagcaattactgagcagatcaagatctttgggaaggaacactaaagatgttttgaatgaattatagtccactggcattttagtgtatttttttttctttttagaaacacacatttctaaaaatgtcatgttacattcctgcatgtcccttttgatagcattagtggatccattggatttcttttttctttttgtgagacagcttttagtcttacctgaatttatgtgtgtttttccgacagtggttaataattatattggtgatgtagcagcaattgtgttggcagggttttcatatattattagtaattaacactaactgttggactgacttgtgtacactgtgttaaacatgatttaaaagctattaagagtactttgtgttagcactcttaaaaacgctaacagagatcatcattagctgtgaagatttgagttgtatatacctgcactgatattcttatcaaaaatttctacattagctttaagtgttcagattaacacttttgaaatttttgtagcttttagctgattaattagaaaaatttaatatttcagtgaaagttttaaattatcatttatttatttttttaaatgagaggggaaagctgaaattccttgttaagacacaaggaaaaagaatggccctactattatcatgcaaaaatgctttgttggcacctcagattaatcatataatagctatagtctcttcagcatttgtttaaattttagaaaacctgtataaattactggtgcataacttaaagattattctgcctttggctaattgagtaattcccctccagcactagagaccgctcagtgctcttactagatgaactcagtaacgccttgagctgggttgattgaggatgtgtgaaaatgtggtttattttgggctcagaaataattgctctgttgaaaataatcctttgtcagaaaagaaggtagctaccacatcattttgaaaggaccatgagcaactataagcaaagccataagaagtggtttgatcgatatattaggggtagctcttgattttgttaacattaagataaggtgactttttccccctgcttttaggattaaaatcaaagatacttctatatttttatcactatagatcatagttattatacaatgtagtgagtcctgcatgggtactcgatgtgtaatgaaacctgaaataataagataataagaaaagcaataattttctaaagctgtgctgtcggtgatacagagatgatactcaaattataataaaactcttcattttgtgaattatagaagctactttttataaagccatatttttttagggaaactaaggagtgacatagaactgatgaatgagyaaaagtaagttttgctggatttttgtagaactctggacgttgaggattcattatgctgtggttaactttaaatatttttgaattccaaatatctgaattaatgagccttgtctttacaaatatgtgccattgtgcaacatcggtggattttctaaaaataatgtaaatgtcttctattaaatgttgagtgcaataaaatacagaagaattctctatattgtcatt

SEQ ID NO: 1567 - DNA, 1342 bp, Homo sapiens
ccgcgcgctctcgccccgggagggagtcacaggttcgtacacgcgaggccgggcgcgcgcagccggcasgcgggtgaagtcttcccaggtgctgcaggcggtgctgaggcacagggtctgctgcaggagcagcggcccgaacccgctccagcggcccgccgccgccagcggytcccgcgtcgcgtgtgtacccccgcgcactgaaggaggtccrccagccctcaccagcccccgcggaccgtgcaatggcccagcgtaagaatgccaagagcagcggcaacagcagcagcagcggctccggcagcggtagcacgagtgcgggcagcagcagccccggggcccggagagagacaaagcatggaggacacaagaatgggaggaaaggcggactctcaggaacttcattcttcacgtggtttatggtgattgcattgctgggcgtctggacatctgtagctgtcgtttggtttgatcttgttgactatgaggaagttctagaaggacccagtggggtagccaagagaaaaactaaggctaaagttaaagaactcactaaagaagagctcaagaaggagaaagagaaacctgagtcaaggaaggaaagtaagaatgaagagagaaaaaaggggaagaaagaggatgtccgaaaggataagaaaattgctgatgcagacctatccaggaaggagtctcctaagggtaaaaaggacagagaaaaagagaaagtggacctagaaaaaagtgctaaaaccaaggaaaataggaaaaaatcaacaaatatgaaggatgtttctagtaaaatggcatcccgagacaaagatgacagaaaggaaagtagaagttctaccagatatgcacacttaacaaagggaaatacccagaaaagaaacggctaaagctctggcatcatcatcccagaacatggtcatgttccagattgcagtttgttacaaaaaagcatggaaaatgtaatattgctctgattggtgagggtgtgtaaattagccattgaatgtatcattggtgcttagcaagtaaattacctgaaatttaaatataccgtctcatacttctaaatgtaaaaacattttaaaaatgtcatagaatatgatgtaataacttctatttattgatcatgtattcagataaatgtatatgtatcatgaatttttatggattaatatattgaatactttcattgacgttaaataagaatattaagattttaaatgttatttctgtgcataatgccttgtaactttttcaagtatgctaaatactcagggagatggatttgctcgttgttttcttccctccttccccttcctgcttccctgttttt

SEQ ID NO: 1568 - DNA, 1507 bp, Homo sapiens
gcttgattttttaggggttggagttagctaggaccaactgggaaaagaatcccgtaagtgggagaaaggctgtggtgttgttagggagtgcacttcagcctaagtggtgattagcagcatttagcctctaaaaataactggtgagcagagtttgtagtcaggtccaatttcagttctagaggcccttacagtgcagggattggccagtctcaagctctggtaggcaagtgcatgcagtgtgcctaaaacctgccagcagtacttttgagtttttttttttgttttgttttactttagcatttattattcatggattgaagaaatcaaaatggctgaagataaagagacaaagcatggaggacacaagaatgggaggaaaggcggactctcaggaacttcattcttcacgtggtttatggtgattgcattgctgggcgtctggacatctgtagctgtcgtttggtttgatcttgttgactatgaggaagttctagccaaagcaaaggacttccgttataacttatcagaggtgcttcaaggaaaactaggaatctatgatgctgatggtgatggagattttgatgtggatgatgccaaagttttattaggcaagtacacattttatgttttttgttagtggtgataaaatgctggaaacaattatttttgctttaataatatctatctcaatagtatatatcttacaggagacttttctcccttaaatcatatatttcattactgttaaaattttaaatggcttatttttccacactctttcatgtcaatttacttttatcaatgaataagtgtatatctcttacacatatatcttttgataagtataataatttcatgtgtgtttccagatttaaagtacttcttattctgaacttagaatttgaatagataatatcctagtctgtttttagatatggtaattatagccatttttcattaacattacacattcacttccatttcaaaatgtaaatttctacaggcttacataaattaatgatgaaataaaagtgataataaacatcttaaaatgtcccatgcatattttaacggtagcattaaaatatgaactcctggtcttttgacccagtgtctttattttggaagtcttggacccttctctttcattatcagaattacttgtctttatcagagatgtttcttgtaataaataacaatgtggtattcccttatttgttttaaagtgctgtcttgctggaaagaatggtgttaatttcaatatgcaaattttatataatctggcctggtgagacttcctttgcttttgtatgtagcataatatatgttaaaactttttatataagagtctttagaaaaataatggatatggcatgatattatacactaagcttataaaataatgacccaaacaaattyttyttagttaacattgttttgtgtatatttattagatatgaaaacatggtaggatgccacatctgtaactagtgaaactgcttttagt

SEQ ID NO: 1569 - DNA, 868 bp, Homo sapiens
ctgagcggcagtgggagctgccgggagttggagcctgcggagttcgagaccatgctgctgttctgccccggctgcgggaacgggctgatcgtggaggagggacaacgctgccaccgcttckcctgcaacacgtgcccctacgtgcacaacatcacccgcaaggtaacaaatcggaagtacccaaaactgaaagaagtggatgatgtgcttggtggagcagctgcctgggagaatgttgactctactgcagagtcgtgtcccaaatgcgaacatcctcgtgcttacttcatgcagcttcagacccgctctgcagatgagccgatgaccaccttctacaagtgctgcaatgctcagtgtggacaccgctggagggattagggccaggatggcccagctgccctagtgtgtgcttgccttgtccctcggggtagatgcttagctggcagtatgagtygtgtgtcctgagggtctttgctagtgtggtggaaagataaaccttttgaggtgaagagccagggggtcaggaaatatggcctatctgccaggcagggtggatgaagtcrtgaatgtctgggagtttttctgtgtggggaggagacagagacccataactaaatatgctctgtgtaaagtcctattctttcatcttccactttattggcagttgacattcccttactcccaatcaacactcttaaatatttgtactgtttgtaaaacttagtacatgtccctaaatatttaactgttacttgtaaacttgtgtaatttattatttattttaatcaaaattctgaatatttcatttaaatgaaagttgsaatattgccttctcagtgttttaaatagcttaagaggtagaaagcaa

SEQ ID NO: 1570 - DNA, 913 bp, Homo sapiens
aggcggggcgcgggcggaggcggggcgcggagaagtggcggaggtggaagcggaggcgtacccgcccctggggacgtcattggtggcggaggcaatggccggcaaccagctgtaagcgaggcacggaagacatatgcttgtgagacaaaggtgtctctgaaactatggatggtacaagaacttcacttgacattgaagagtactcggatactgaggtacagaaaaaccaagtactaactctggaagaatggcaagacaagtgggtgaacggcaagactgcttttcatcaggaacaaggacatcagctattaaagaagcatttagatactttccttaaaggcaagagtggactgagggtattttttcctctttgcggaaaagcggttgagatgaaatggtatgagcagataaacattaacagaattatcttgycttaatgatgaattctttgggtgatttaacaggatgtgagttttaaaactccattttcaggaaatacacagaaattccttatttttctattagtgatgggtatataattggaaataatattctcaaacagtaagaaacaacagaaacaggtatgaagtctttctggattgagttttgaaattaaaaaatcagtttggagccaatggggggagaaaaaacagccttcccttttacatttyctggatccttgtatgtggttcagtttttgtaggtggtttaggaatttagctaagttaatttttagatatttgaaatggtggtggacagagaaattcaaaatgaattacagctttttggcaggacaatgttcatagtccacagttcagctcaaccttcccctcccaccagggaacacaggagtttctgttatcgtgaatcattgttataaaaccagtgattaagaaagtatttcttgtgagta

SEQ ID NO: 1571 - DNA, 2622 bp, Homo sapiens
cggaggcaatggccggcaaccagctgtaagcgaggcacggaagacatatgcttgtgagacaaaggtgtctctgaaactatggatggtacaagaacttcacttgacattgaagagtactcggatactgaggtacagaaaaaccaagtactaactctggaagaatggcaagacaagtgggtgaacggcaagactgcttttcatcaggaacaaggacatcagctattaaagaagcatttagatactttccttaaaggcaagagtggactgagggtattttttcctctttgcggaaaagcggttgagatgaaatgagttcttcggggaacatttcattgtactgttgcagtatttttgatcttcccaggacaaatattggcaaatttgacatgatttgggatagaggagcattagttgccatyaatccaggtgatcgcaaatgctatgcagatacaatgttttccctcctgggaaagaagtttcagtatctcctgtgtgttctttcttatgatccaactaaacatccaggtccaccattttatgttccacatgctgaaattgaaaggttgtttgrtaaaatatgcaatatacgttgtcttgagaaggttgatgcttttgaagaacgacakaaaagttggggaattgactgtctttttgaaaagttatrtctacttacagaaaagtaaatgagacatagataaaataaaatcacactgacatgtttttgaggaattgaaaattatgctaaagcctgaaaatgtaatggatgaatttttaaaattgtttataaatcatatgatagatctttactaaaaatggctttttagtaaagccatttactttttctaaaaaagttttagaagaaaaagatgtaactaaacttttaaagtagctcctttggagaggagattatgatgtgaaagattatgcctatgtgtcttgcagattgcaagatattttaccaatcagcatgtgttacctgtacaattaaaaaaatatttcaaaatgcaatgcatattaaatataatacacacagaaaaactggcatttattttgttttatttttttgagatggagtttcgttcttgttgcccaacctggagtgcaatggtgcaatctcagctcactgcaacctctgcctcccaggttcaggtgattctcctgcctcagcctcctgagtagctgggattacaggtgtgcgccaccacgcccagctaattttttgtatttttagtagagacagggtttcaccatgttggtcaggctgatctcgagctcctgacctcaggtgatctacccacctcggcctcccaaagtgctgggattacaggcgtgagccactgcacctggcctgacattctttwtgaaatttagaattgttgaagaactataacatttcagtagggttcaaggtggtcccaaaagttatataaaagattagtttttactataaacccttgtcttttactcagatcctagcatcccttttcacatggtttctccatgtatataacagaatcaagaaacaaattttaattaaacaatctgtaacagaatcaagaaacaaatacattttaattaaacaatctatatggaacaaacattcccaaattctaagaataaatttttctttaagttttctctgagtttggcaattgttgttttttataatttaatctgtttaaatcatcaggtcttataaaatataatgtacttagagctggattcatggctgtttattatgaaaggttagatttctcagttcttctttaaccacattttgttatatcagacagtcctctataactctgtactacccaacaactaaatggtttagattgtttagctcatgttaataggatggttgtgtattataaaaaacgagttacgtgtgtgtgtgcacgcatgcacgcacatgtgctggcttaaaggttgttaatgcaaggtttggggtcccctttaacactggtgaaagctacggtactctccccagagatatgtcttgtcagcctctctagttccccttggcctgcatgtacaaacttctaccctagaagctctctgccatcgatgtattctaatagatttgtaaggctattaatttgaagcaactccttgctcacagtgattcttgcttctctgagacctgctcccagtcgatactgtgggcttcagaagccatgactccccaactctgcctgtatcaccggttgaatggacaactaacccgagctggaccaacacaattctctccagagacttttgattttacttttatgtagagacagggtctcactttgttgsccacgctgatgttgaacttgacgtgaggcctcaagcagtcctcctgtcttggccacccaaagtgctaggattacaggtatgagccattgcgctggccctcttcataggcttttggacttgggaatagaaaagcaaccccgtctctactaaaaatacaaaaaaattagccaggcgtggtggcacgtgcctgtaatcccagctacttgggaggctgaggcaggagaatcacttgaacctaggaggcggaggttgcagtgagctgagatcatgccactgcacgcmagcctgggcaacagagcaagactctgtctcaaaagaaag

SEQ ID NO: 1572 - DNA, 407 bp, Homo sapiens
cggcaaccagctgtaagcgaggcacggaagacatatgcttgtgagacaaaggtgtctctgaaactatggatggtacaagaacttcacttgacattgaagagtactcggatactgaggtacagaaaaaccaagtactaactctggaagaatggcaagacaagtgggtgaacggcaagactgcttttcatcaggaacaaggacatcagctattaaagaagcatttagatactttccttaaaggcaagagtggactgagggtattttttcctctttgttgcagtgagctgagatcatgccactgcacgcmagcctgggcaacagagcaagactctgtctcaaaagaaagaaaaagaaaagaaaaaaaagaaaggcaagttgactgctgaaaggggaatctgtgtacgcct

SEQ ID NO: 1573 - DNA, 2797 bp, Homo sapiens
cctcctgataccatcagggtcttgcagaagccatttgtcaacaaatatttgctaagaagtgaattcatgttcccaggcacggaagacatatgcttgtgagacaaaggtgtctctgaaactatggatggtacaagaacttcacttgacattgaagagtactcggatactgaggtacagaaaaaccaagtactaactctggaagaatggcaagacaagtgggtgaacggcaagactgcttttcatcaggaacaaggacatcagctattaaagaagcatttagatactttccttaaaggcaagagtggactgagggtattttttcctctttgcggaaaagcggttgagatgaaatggtttscagaccggggacacagtgtagttggtgtggaaatcagtgaacttgggatacaakaattttttacagagcagaatctttcttactcagaagaaccaatcacygaaattcctggaaccaaagtatttaagagttcttcggggaacatttcattgtactgttgcagtatttttgatcttcccaggacaaatattggcaaatttgacatgatttgggatagaggagcattagttgccatyaatccaggtgatcgcaaatgctatgcagatacaatgttttccctcctgggaaagaagtttcagtatctcctgtgtgttctttcttatgatccaactaaacatccaggtccaccattttatgttccacatgctgaaattgaaaggttgtttgrtaaaatatgcaatatacgttgtcttgagaaggttgatgcttttgaagaacgacakaaaagttggggaattgactgtctttttgaaaagttatrtctacttacagaaaagtaaatgagacatagataaaataaaatcacactgacatgtttttgaggaattgaaaattatgctaaagcctgaaaatgtaatggatgaatttttaaaattgtttataaatcatatgatagatctttactaaaaatggctttttagtaaagccatttactttttctaaaaaagttttagaagaaaaagatgtaactaaacttttaaagtagctcctttggagaggagattatgatgtgaaagattatgcctatgtgtcttgcagattgcaagatattttaccaatcagcatgtgttacctgtacaattaaaaaaatatttcaaaatgcaatgcatattaaatataatacacacagaaaaactggcatttattttgttttatttttttgagatggagtttcgttcttgttgcccaacctggagtgcaatggtgcaatctcagctcactgcaacctctgcctcccaggttcaggtgattctcctgcctcagcctcctgagtagctgggattacaggtgtgcgccaccacgcccagctaattttttgtatttttagtagagacagggtttcaccatgttggtcaggctgatctcgagctcctgacctcaggtgatctacccacctcggcctcccaaagtgctgggattacaggcgtgagccactgcacctggcctgacattctttwtgaaatttagaattgttgaagaactataacatttcagtagggttcaaggtggtcccaaaagttatataaaagattagtttttactataaacccttgtcttttactcagatcctagcatcccttttcacatggtttctccatgtatataacagaatcaagaaacaaattttaattaaacaatctgtaacagaatcaagaaacaaatacattttaattaaacaatctatatggaacaaacattcccaaattctaagaataaatttttctttaagttttctctgagtttggcaattgttgttttttataatttaatctgtttaaatcatcaggtcttataaaatataatgtacttagagctggattcatggctgtttattatgaaaggttagatttctcagttcttctttaaccacattttgttatatcagacagtcctctataactctgtactacccaacaactaaatggtttagattgtttagctcatgttaataggatggttgtgtattataaaaaacgagttacgtgtgtgtgtgcacgcatgcacgcacatgtgctggcttaaaggttgttaatgcaaggtttggggtcccctttaacactggtgaaagctacggtactctccccagagatatgtcttgtcagcctctctagttccccttggcctgcatgtacaaacttctaccctagaagctctctgccatcgatgtattctaatagatttgtaaggctattaatttgaagcaactccttgctcacagtgattcttgcttctctgagacctgctcccagtcgatactgtgggcttcagaagccatgactccccaactctgcctgtatcaccggttgaatggacaactaacccgagctggaccaacacaattctctccagagacttttgattttacttttatgtagagacagggtctcactttgttgsccacgctgatgttgaacttgacgtgaggcctcaagcagtcctcctgtcttggccacccaaagtgctaggattacaggtatgagccattgcgctggccctcttcataggcttttggacttgggaatagaaaagcaaccccgtctctactaaaaatacaaaaaaattagccaggcgtggtggcacgtgcctgtaatcccagctacttgggaggctgaggcaggagaatcacttgaacctaggaggcggaggttgcagtgagctgagatcatgccactgcacgcmagcctgggcaacagagcaagactctgtctcaaaagaaag

SEQ ID NO: 1574 - DNA, 3020 bp, Homo sapiens
cggcaaccagctgtaagcgaggcacggaagacatatgcttgtgagacaaaggtgtctctgaaactatggatggtacaagaacttcacttgacattgaagagtactcggatactgaggtacagaaaaaccaagtactaactctggaagaatggcaagacaagtgggtgaacggcaagactgcttttcatcaggaacaaggacatcagctattaaagaagcatttagatactttccttaaaggcaagagtggactgagggtattttttcctctttgcggaaaagcggttgagatgaaatggtttscagaccggggacacagtgtagttggtgtggaaatcagtgaacttgggatacaakaattttttacagagcagaatctttcttactcagaagaaccaatcacygaaattcctggaaccaaagtatttaagagttcttcggggaacatttcattgtactgttgcagtatttttgatcttcccaggacaaatattggcaaatttgacatgatttgggatagaggagcattagttgccatyaatccaggtgatcgcaaatgctatgcagatacaatgttttccctcctgggaaagaagtttcagtatctcctgtgtgttctttcttatgatccaactaaacatccaggtccaccattttatgttccacatgctgaaattgaaaggttgtttgrtaaaatatgcaatatacgttgtcttgagaaggttgatgcttttgaagaacgacakaaaagttggggaattgactgtctttttgaaaagttatrtctacttacagaaaagtaaatgagacatagataaaataaaatcacactgacatgtttttgaggaattgaaaattatgctaaagcctgaaaatgtaatggatgaatttttaaaattgtttataaatcatatgatagatctttactaaaaatggctttttagtaaagccatttactttttctaaaaaagttttagaagaaaaagatgtaactaaacttttaaagtagctcctttggagaggagattatgatgtgaaagattatgcctatgtgtcttgcagattgcaagatattttaccaatcagcatgtgttacctgtacaattaaaaaaatatttcaaaatgcaatgcatattaaatataatacacacagaaaaactggcatttattttgttttatttttttgagatggagtttcgttcttgttgcccaacctggagtgcaatggtgcaatctcagctcactgcaacctctgcctcccaggttcaggtgattctcctgcctcagcctcctgagtagctgggattacaggtgtgcgccaccacgcccagctaattttttgtatttttagtagagacagggtttcaccatgttggtcaggctgatctcgagctcctgacctcaggtgatctacccacctcggcctcccaaagtgctgggattacaggcgtgagccactgcacctggcctgacattctttwtgaaatttagaattgttgaagaactataacatttcagtagggttcaaggtggtcccaaaagttatataaaagattagtttttactataaacccttgtcttttactcagatcctagcatcccttttcacatggtttctccatgtatataacagaatcaagaaacaaattttaattaaacaatctgtaacagaatcaagaaacaaatacattttaattaaacaatctatatggaacaaacattcccaaattctaagaataaatttttctttaagttttctctgagtttggcaattgttgttttttataatttaatctgtttaaatcatcaggtcttataaaatataatgtacttagagctggattcatggctgtttattatgaaaggttagatttctcagttcttctttaaccacattttgttatatcagacagtcctctataactctgtactacccaacaactaaatggtttagattgtttagctcatgttaataggatggttgtgtattataaaaaacgagttacgtgtgtgtgtgcacgcatgcacgcacatgtgctggcttaaaggttgttaatgcaaggtttggggtcccctttaacactggtgaaagctacggtactctccccagagatatgtcttgtcagcctctctagttccccttggcctgcatgtacaaacttctaccctagaagctctctgccatcgatgtattctaatagatttgtaaggctattaatttgaagcaactccttgctcacagtgattcttgcttctctgagacctgctcccagtcgatactgtgggcttcagaagccatgactccccaactctgcctgtatcaccggttgaatggacaactaacccgagctggaccaacacaattctctccagagacttttgattttacttttatgtagagacagggtctcactttgttgsccacgctgatgttgaacttgacgtgaggcctcaagcagtcctcctgtcttggccacccaaagtgctaggattacaggtatgagccattgcgctggccctcttcataggcttttggacttgggaatagaaaagcaaccccgtctctactaaaaatacaaaaaaattagccaggcgtggtggcacgtgcctgtaatcccagctacttgggaggctgaggcaggagaatcacttgaacctaggaggcggaggttgcagtgagctgagatcatgccactgcacgcmagcctgggcaacagagcaagactctgtctcaaaagaaagaaaaagaaaagaaaaaaaagaaaggcaagttgactgctgaaaggggaatctgtgtacgcctgggagctgtggggcagccacattccagcacatggatctgagaaacagaacgctgatctgcagaaagagatgagaaccaaagagaggccacctgcgtcctgggtccattttcatcctccctgaagcccagctgcccagggtggggagaaacaccctgtgtccatgggatagagtcctttccgcttgcagttgtgcccaaagaatcttaaatacaaatg

SEQ ID NO: 1575 - DNA, 2703 bp, Homo sapiens
cattggtggcggaggcaatggccggcaaccagctgtaagcgaggcacggaagacatatgcttgtgagacaaaggtgtctctgaaactatggatggtacaagaacttcacttgacattgaagagtactcggatactgaggtacagaaaaaccaagtactaactctggaagaatggcaagacaagtgggtgaacggcaagactgcttttcatcaggaacaaggacatcagctattaaagaagcatttagatactttccttaaaggcaagagtggactgagggtattttttcctctttgcggaaaagcggttgagatgaaatggtttscagaccggggacacagtgtagttggtgtggaaatcagtgaacttgggatacaakaattttttacagagcagaatctttcttactcagaagaaccaatcacygaaattcctggaaccaaagtatttaagagttcttcggggaacatttcattgtactgttgcagtatttttgatcttcccaggacaaatattggcaaatttgacatacaatgttttccctcctgggaaagaagtttcagtatctcctgtgtgttctttcttatgatccaactaaacatccaggtccaccattttatgttccacatgctgaaattgaaaggttgtttgrtaaaatatgcaatatacgttgtcttgagaaggttgatgcttttgaagaacgacakaaaagttggggaattgactgtctttttgaaaagttatrtctacttacagaaaagtaaatgagacatagataaaataaaatcacactgacatgtttttgaggaattgaaaattatgctaaagcctgaaaatgtaatggatgaatttttaaaattgtttataaatcatatgatagatctttactaaaaatggctttttagtaaagccatttactttttctaaaaaagttttagaagaaaaagatgtaactaaacttttaaagtagctcctttggagaggagattatgatgtgaaagattatgcctatgtgtcttgcagattgcaagatattttaccaatcagcatgtgttacctgtacaattaaaaaaatatttcaaaatgcaatgcatattaaatataatacacacagaaaaactggcatttattttgttttatttttttgagatggagtttcgttcttgttgcccaacctggagtgcaatggtgcaatctcagctcactgcaacctctgcctcccaggttcaggtgattctcctgcctcagcctcctgagtagctgggattacaggtgtgcgccaccacgcccagctaattttttgtatttttagtagagacagggtttcaccatgttggtcaggctgatctcgagctcctgacctcaggtgatctacccacctcggcctcccaaagtgctgggattacaggcgtgagccactgcacctggcctgacattctttwtgaaatttagaattgttgaagaactataacatttcagtagggttcaaggtggtcccaaaagttatataaaagattagtttttactataaacccttgtcttttactcagatcctagcatcccttttcacatggtttctccatgtatataacagaatcaagaaacaaattttaattaaacaatctgtaacagaatcaagaaacaaatacattttaattaaacaatctatatggaacaaacattcccaaattctaagaataaatttttctttaagttttctctgagtttggcaattgttgttttttataatttaatctgtttaaatcatcaggtcttataaaatataatgtacttagagctggattcatggctgtttattatgaaaggttagatttctcagttcttctttaaccacattttgttatatcagacagtcctctataactctgtactacccaacaactaaatggtttagattgtttagctcatgttaataggatggttgtgtattataaaaaacgagttacgtgtgtgtgtgcacgcatgcacgcacatgtgctggcttaaaggttgttaatgcaaggtttggggtcccctttaacactggtgaaagctacggtactctccccagagatatgtcttgtcagcctctctagttccccttggcctgcatgtacaaacttctaccctagaagctctctgccatcgatgtattctaatagatttgtaaggctattaatttgaagcaactccttgctcacagtgattcttgcttctctgagacctgctcccagtcgatactgtgggcttcagaagccatgactccccaactctgcctgtatcaccggttgaatggacaactaacccgagctggaccaacacaattctctccagagacttttgattttacttttatgtagagacagggtctcactttgttgsccacgctgatgttgaacttgacgtgaggcctcaagcagtcctcctgtcttggccacccaaagtgctaggattacaggtatgagccattgcgctggccctcttcataggcttttggacttgggaatagaaaagcaaccccgtctctactaaaaatacaaaaaaattagccaggcgtggtggcacgtgcctgtaatcccagctacttgggaggctgaggcaggagaatcacttgaacctaggaggcggaggttgcagtgagctgagatcatgccactgcacgcmagcctgggcaacagagcaagactctgtctcaaaagaaag

SEQ ID NO: 1576 - DNA, 3026 bp, Homo sapiens
gcgcgggcggaggcggggcgcggagaagtggcggaggtggaagcggaggcgtacccgcccctggggacgtcattggtggcggaggcaatggccggcaaccagctgtaagcgaggcacggaagacatatgcttgtgagacaaaggtgtctctgaaactatggatggtacaagaacttcacttgacattgaagagtactcggatactgaggtacagaaaaaccaagtactaactctggaagaatggcaagacaagtgggtgaacggcaagactgcttttcatcaggaacaaggacatcagctattaaagaagcatttagatactttccttaaaggcaagagtggactgagggtattttttcctctttgcggaaaagcggttgagatgaaatggtttscagaccggggacacagtgtagttggtgtggaaatcagtgaacttgggatacaakaattttttacagagcagaatctttcttactcagaagaaccaatcacygaaattcctggaaccaaagtatttaagagttcttcggggaacatttcattgtactgttgcagtatttttgatcttcccaggacaaatattggcaaatttgacatgatttgggatagaggagcattagttgccatyaatccaggtgatcgcaaatggtccaccattttatgttccacatgctgaaattgaaaggttgtttggtaaaatatgcaatatacgttgtcttgagaaggttgatgcttttgaagaacgacakaaaagttggggaattgactgtctttttgaaaagttatrtctacttacagaaaagtaaatgagacatagataaaataaaatcacactgacatgtttttgaggaattgaaaattatgctaaagcctgaaaatgtaatggatgaatttttaaaattgtttataaatcatatgatagatctttactaaaaatggctttttagtaaagccatttactttttctaaaaaagttttagaagaaaaagatgtaactaaacttttaaagtagctcctttggagaggagattatgatgtgaaagattatgcctatgtgtcttgcagattgcaagatattttaccaatcagcatgtgttacctgtacaattaaaaaaatatttcaaaatgcaatgcatattaaatataatacacacagaaaaactggcatttattttgttttatttttttgagatggagtttcgttcttgttgcccaacctggagtgcaatggtgcaatctcagctcactgcaacctctgcctcccaggttcaggtgattctcctgcctcagcctcctgagtagctgggattacaggtgtgcgccaccacgcccagctaattttttgtatttttagtagagacagggtttcaccatgttggtcaggctgatctcgagctcctgacctcaggtgatctacccacctcggcctcccaaagtgctgggattacaggcgtgagccactgcacctggcctgacattctttwtgaaatttagaattgttgaagaactataacatttcagtagggttcaaggtggtcccaaaagttatataaaagattagtttttactataaacccttgtcttttactcagatcctagcatcccttttcacatggtttctccatgtatataacagaatcaagaaacaaattttaattaaacaatctgtaacagaatcaagaaacaaatacattttaattaaacaatctatatggaacaaacattcccaaattctaagaataaatttttctttaagttttctctgagtttggcaattgttgttttttataatttaatctgtttaaatcatcaggtcttataaaatataatgtacttagagctggattcatggctgtttattatgaaaggttagatttctcagttcttctttaaccacattttgttatatcagacagtcctctataactctgtactacccaacaactaaatggtttagattgtttagctcatgttaataggatggttgtgtattataaaaaacgagttacgtgtgtgtgtgcacgcatgcacgcacatgtgctggcttaaaggttgttaatgcaaggtttggggtcccctttaacactggtgaaagctacggtactctccccagagatatgtcttgtcagcctctctagttccccttggcctgcatgtacaaacttctaccctagaagctctctgccatcgatgtattctaatagatttgtaaggctattaatttgaagcaactccttgctcacagtgattcttgcttctctgagacctgctcccagtcgatactgtgggcttcagaagccatgactccccaactctgcctgtatcaccggttgaatggacaactaacccgagctggaccaacacaattctctccagagacttttgattttacttttatgtagagacagggtctcactttgttgsccacgctgatgttgaacttgacgtgaggcctcaagcagtcctcctgtcttggccacccaaagtgctaggattacaggtatgagccattgcgctggccctcttcataggcttttggacttgggaatagaaaagcaaccccgtctctactaaaaatacaaaaaaattagccaggcgtggtggcacgtgcctgtaatcccagctacttgggaggctgaggcaggagaatcacttgaacctaggaggcggaggttgcagtgagctgagatcatgccactgcacgcmagcctgggcaacagagcaagactctgtctcaaaagaaagaaaaagaaaagaaaaaaaagaaaggcaagttgactgctgaaaggggaatctgtgtacgcctgggagctgtggggcagccacattccagcacatggatctgagaaacagaacgctgatctgcagaaagagatgagaaccaaagagaggccacctgcgtcctgggtccattttcatcctccctgaagcccagctgcccagggtggggagaaacaccctgtgtccatgggatagagtcctttccgcttgcagttgtgcccaaagaatcttaaatacaaatr

SEQ ID NO: 1577 - DNA, 1774 bp, Homo sapiens
gcggattgtgccgggcgtcggcaactgctyggctcgccagactgytcacgggcccagtagagcagtaaataaccggccacccctgcggccgtgccggccgtgatggaactagacagctcacccgactcgagaagaacggggtggggaggcgaggacgcagggcgacctggagaagaaagtttcccagatggctctagggtgaatcttgaatgttgtgatgcagctcgccaggcctacggggaggtaaaggacttgccaggctgaagtaacttcagaagcagaaaaacggaggattaaaaccacaagtcgttgtgatgtgaaatttcgtggggcaagaaagggccggaagtaggtagtctgcacggctctgctagagagaggatcacaagatcacacaaatgtgatctacttatgactggaaaaaatgtgtactttcagagccagcttgaggcattccattgcctccaatatgagctcttcccttcaagattgastataaatctcttagttacaactcacatcccctttccccagacaaaaccccacatagcccggtgtgtatttacygaaagcagtaagataytgctggggctttgggtgcaagatggagagtgctcagagataatgacaggggcctggtcctgcagggccttacgtagaaagtcaaggaatttattctctgagcaattgaaaatcatcccraaagatctgcattttagaaataccatgttgagtagttgcataagaaaccagttaggaggcccctttttattggaggtagagaataatgagagactgaactacagaagtggggaaggaagacagctgtagatccaagaaatagtatccggaagagaggcttgagaagtgatcaaggagaattccacagttatcagagaccctgtcttccttgttcaccactatattaccagaacataatacaaataatgctattgttattgggtggcattatttggttagtaggtactttttaaaatttttaaatttaattttagtattaaaatacatgtaaagatcaggaaaatgaacttttaaaaataaagggctttcactgggcatgataacacatccctgtagtcccagctactcccagctattcakgaggctgaggcggcaggatcacttgaaccaaggagttcaagtttagcctgggcagtatagtgaaaccctttctcaaaaacaaataaagggctactgaaataatgataatttatattcaggtcgtaggtacctaattactagttacacatacatggctttgatgggaaatcaaagaaacattctgacaatacagagattcatcaagcaatttgtctttgaaagttgattattcaaaaacagagcttgtagcaaaagaagcagaarttagatcccacagtcatcaagtttcagatcctaaggcttgcattcttacaccaatttcttctttgcttaaatcttaattttcatcagcattaattaagtgtctgggtactctgccagtcaggagagatgttaccaaaggtacaggatttgagaagtattgtcagaagagccaagttcataatcaggcccayaggatcaataatttgggggagtgtttagagcagtttcaaagatgagagcagtagatcaaagtagaatttcaggactgagcacatgccaaggcacccttttatggatattcaacctgtaccagaagggaggagtcatttacttaaaagagttacacaagatgaaagagctagatccaaataaagacgctataaaaatt

SEQ ID NO: 1578 - DNA, 1326 bp, Homo sapiens
tcccgcccttggacttgggcggcgcctggataaacacctgaacctgactgagctccgagccagggactcgggtgcctggggcagacgaggccggcttctccgcggacagctagggagagtgtcctgggtgtcagccagaacatgtctttcaacctgcaatcatcaaagaaactgttcattttcttaggaaaatcactgtttagtcttctggaggctatgatttttgccttactcccaaagccacggaagaacgttgctggtgaaatagtcctcatcacaggtgctggaagtggactcggaaggctcttagccttgcagtttgcccggctgggatctgttcttgttctctgggatatcaataaggaggggaatgaggaaacatgtaagatggctcgggaagctggagccacaagagtgcacgcctatacctgcgattgcagccaaaaggaaggagtgtatagagtagccgaccaggttaaaaaagaagtcggcgatgtttccatcctaatcaacaatgccggaatcgtaacaggcaaaaagttccttgactgtccagatgagcttatggaaaagtcatttgatgtgaatttcaaagcacatttatggacttataaagcctttctacctgctatgattgctaatgaccatggacatttggtttgcatttcaagttcagctggattaagtggagtaaatgggctggcagattactgtgcaagtaaatttgcagcctttgggtttgctgaatctgtatttgtagaaacatttgtccaaaaacaaaaggggatcaaaaccacgattgtgtgccccttttttataaaaactggaatgtttgaaggttgtactacaggctgtccttctctgttgccaattctggaaccaaaatatgcagttgaaaaaatagtagaagctattctacaagaaaaaatgtacttgtatatgccaaagttgttatacttcatgatgtttcttaaaagctttttgcccctcaagacaggactgcttatagctgactatttgggcatccttcatgcaatggatggctttgttgaccaaaagaagaagctctaaagaccaactctatggctaaggtcatctgatacacagtgttacataatgcgtacttcaatgaagaaaagtatttttgtctgacagtggaatatatctggagaccacaagtaccactcctattctgttatctggactagaattttcaatcaatgtgtttgaaaataatgttgctatcacctatttggttgagttttggttttttctttttcttttttttyccaaaaataaagacagcccatttttgtcatttccatt

SEQ ID NO: 1579 - DNA, 2201 bp, Homo sapiens
caacacttatgaagtgtcccttctaatattgtaatacaaataacataaataacattaagctatggtaactttacggacttttctcgttccctggagtacattggaataacccttctcagggttagcggtgctcgggtccggtaacaacatggcggcgtccgtgaggggctcctttgggcaggggtagtgtttggtgtccctgtcttgcgtgatattgacaaactgaagctttcctgcaccactggacttaaggaagagtgtactcgtaggcggacagcttyagtggccggccggccgctctcatcccccrtaaggagcagagtcctttgtactgaccaagatgagcaacatctacatccaggagcctcccacgaatgggaaggttttattgaaaactacagctggagatattgacatagagttgtggtccaaagaagctcctaaagcttgcagaaattttatccaactttgtttggaagcttattatgacaataccatttttcatagagttgtgcctggtttcatagtccaaggcggagatcctactggcacagggagtggtggagagtctatctatggagcgccattcaaagatgaatttcattcacggttgcgttttaatcggagaggactggttgccatggcaaatgctggttctcatgataatggcagccagtttttcttcacactgggtcgagcagatgaacttaacaataagcataccatctttggaaaggttacaggggatacagtatataacatgttgcgactgtcagaagtagacattgatgatgacgaaagaccacataatccacacaaaataaaaagctgtgaggttttgtttaatccttttgatgacatcattccaagggaaattaaaaggctgaaaaaagagaaaccagaggaggaagtaaagaaattgaaacccaaaggcacaaaaaattttagtttactttcatttggagaggaagctgaggaagaagaggaggaagtaaatcgagttagtcagagcatgaagggcaaaagcaaaagtagtcatgacttgcttaaggatgatccacatctcagttctgttccagttgtagaaagtgaaaaaggtgatgcascagatttagttgatgatggagaagatgaaagtgcagagcatgatgaatatattgatggtgatgaaaagaacctgatgagagaaagaattgccaaaaaattaaaaaaggacacaagtgcgaatgttaaatcagctggagaaggagaagtggagaagaaatcagtcagccgyagtgaagagctcagaaaagaagcaagacaattaaaacgggaactcttagcagcaaaacaaaaaaaagtagaaaatgcagcaaaacaagcagaaaaaagaagtgaagaggaagaagcccctccagatggtgctgttgccgaatacagaagagaaaagcaaaagtatgaagctytgaggaagcaacagtcaaagaagggaacttcccgggaagatcagacccttgcactgctgaaccagtttaaatctaaactcactcaagcaattgctgaaacrcctgaaaatgacattcctgaaacagaagtagaagatgatgaaggatggatgtcacatgtacttcagtttgaggataaaagcagaaaagtgaaagatgcaagcatgcaagactcagatacatttgaaatctatgatcctcggaatccagtgaataaaagaaggagggaagaaagcaaaaagctgatgagagagaaaaaagaaagaagataaaatgagaataatgataaccagaacttgctggaaatgtgcctacaatggccttgtaacagccattgttcccaacagcatcacttaggggtgtgaaaagaagtatttttgaacctgttgtctggttttgaaaaacaattatcttgttttgcaaattgtggaatgatgtaagcaaatgcttttggttactggtacatgtgttttttcctagctgaccttttatattgctaaatctgaaataaaataactttccttccacattacatgttaaccattgcagactgcaagcctgtttgtgtccttttaccctaaaatatatgaaggcttccttttcaagatttttttataagaagttcctacagaaagaatatttgtgggaaacctccctttcactaacttcagaatataataaaatattataaataaaatatagaatataaatatg

SEQ ID NO: 1580 - DNA, 755 bp, Homo sapiens
ggctttgcagacgccgccgccgaggaaaaccgtgtrctattagccatggtcaaccccaccatgttcttcgacattgccgtcgacggtgagcccttgggccgcrtctcctttgagctgtttgcagacaaggtcccaaagacagcagaaaattttcgtgctctgagcactggagagaaaggatttggttataagggttcctgctttcacagaattattccagggtttatgtgtcagggtggtgacttcacacgccataatggcactggtggcaagtcaccactgggagaaatttgaagatgagaacttcatcctaaagcatacaggtcctgaaatcttgtccatggcaaatgctggacccaacacaaatggwtcccagtttttcatctgcactgccaagactgagtggttggatggcaagcatgtggtstttggcaaagtgaaagaaggcatgaatattgtggaggccatggagcgctttgggtccaggaatggcaagaccagcaagaagatcaccattgctgactgtggacaartcgaataagtttgacttgtgttttatcttaaccaccagatcattccttctgtagctcaggagagcacccctccaccccatttgcttgcagtatcccagtatctttgtgctcttgctgcagttccctttgggttccatgttttccttgttccctcccatgcctagctggattgcagagttaagtttatgattatgaaataaaaactaaataacaacaacaaca

SEQ ID NO: 1581 - DNA, 670 bp, Homo sapiens
ggctttgcagacgccgccgccgaggaaaaccgtgtrctattagccatggtcaaccccaccatgttcttcgacattgccgtcgacggtgagcccttgggccgcrtctcctttgagctgtttgcagacaaggtcccaaagacagcagaaaattttcgtgctctgagcactggagagaaaggatttggttataagggttcctgctttcacagaattattccagggtttatgtgtcagggtggtgacttcacacgccataatggcactggtggcaagtcaccactgggagaaatttgaagatgagaacttcatcctaaagcatacaggtcctgaaatcttgtccatggcaaatgctggacccaacacaaatggwtcccagtttttcatctgcactgccaagactgagtggttggatggcaagcatgtggtstttggcaaagtgaaagaaggcatgaatattgtggaggccatggagcgctttgggtccaggaatggcaagaccagcaagaagatcaccattgctgactgtggacaartcgaataagtttgacttgtgttttatcttaaccaccagatcattccttctgtagctcaggagagcacccctcctttgggttccatgttttccttgttccctcccatgcctagctggattgcagagttaagtttatga

SEQ ID NO: 1582 - DNA, 819 bp, Homo sapiens
gctttgcagacgccgccgccgaggaaaaccgtgtrctattagccatggtcaaccccaccatgttcttcgacattgccgtcgacggtgagcccttgggccgcrtctcctttgaggtaaggggcctggaaaccaagaastgactgctcatctaatccataaagctatgttaacagattggagctgtttgcagacaaggtcccaaagacagcagaaaattttcgtgctctgagcactggagagaaaggatttggttataagggttcctgctttcacagaattattccagggtttatgtgtcagggtggtgacttcacacgccataatggcactggtggcaagtcaccactgggagaaatttgaagatgagaacttcatcctaaagcatacaggtcctgaaatcttgtccatggcaaatgctggacccaacacaaatggwtcccagtttttcatctgcactgccaagactgagtggttggatggcaagcatgtggtstttggcaaagtgaaagaaggcatgaatattgtggaggccatggagcgctttgggtccaggaatggcaagaccagcaagaagatcaccattgctgactgtggacaartcgaataagtttgacttgtgttttatcttaaccaccagatcattccttctgtagctcaggagagcacccctccaccccatttgcttgcagtatcccagtatctttgtgctcttgctgcagttccctttgggttccatgttttccttgttccctcccatgcctagctggattgcagagttaagtttatgattatgaaataaaaactaaataacaacaacaa

SEQ ID NO: 1583 - DNA, 1290 bp, Homo sapiens
gccccgagtggttcactgagccatgaagacagattccaggcaccaggaattgcacctccaatcccagatgctatgttcagcaaaggctccatggttctggcctacagtgccggcctggacacctcctgcatcctcgtgtggctraaggaacaaggctatgacattattgcctacctggccaatgttggccagaaggaagacttcaaggaagccaggaagaaggcactgaaccttgggtccaaaaaggtgttcattgaggacgtcagcaaggagttcgtggaggagttcatctggcctgtatgaggactgctacctcctgggcccctctcttcccaggccttacatcacccgcaaacaagtggaaattgctcagtgggagggggcaaagtatgtgtcccacagtgccatgggaaaggggaacgatcaggtctggtttgagctcgcctgctactcgctggccccccagattaaggtcattgctcccgggaggatccctgagttctacaaccagtccaagggccgcagtgatctgatggaatatgcagagaaacatgggattcccatcccagtcactctgaagcacccatggaacatggacgagaacctcatgcacatcagccacgaggctggaatcttggagaaccccaagaaccaascaccttcaggtctctacatgaagattcaggacctggccaaagcccccaacacccccaacattttcaagactgagtaaaaaaggggtccctgtgaaggtgaccagcatcaaggatggcaccacccaccagacctccttggtgctcttcatgtacctgaatgaagtcgcaggcaagcacagcgtgggccatattgacatcgtggagaaccgcttcattgaaatgaagtcctgaggtatctgcaagaccccagcaggcaccatcctttaccaccctcatttagacattgagggctttgccatggaacaggaagtgcgcaaaatcaaacaaggcctgggcttgaaatttgctgagttggtgtacaccggtttctggcacaaccctcagtgtgactttgcccacyactgcattgccaagtcccaggaccgagtggaagggaaagtgcaggtatccatcttcaagggccaggtgtacatcctctgccaggagcccccactgtctctctacagtggagagcaggtgagcatgaacgtggagggcaatgatgagccagccagtcggtgacaccagtctcatcaacatcaattccctcaggatgaaggaatatcatcatctccagagcaaggtcactgccaaa

SEQ ID NO: 1584 - DNA, 1556 bp, Homo sapiens
cagtgagatgcttaaatctgcagtggagggcaagagacacgaccccaggagacagcaactggtctctgaggcggtggaaccagctccctgttggagtctgaggccttggtcctactcccagtttcactcctggtttgctgaatgatctggagatctctgggccccacggctttccatctgcagagcggaaagagtggatgggaagtttctaggttccctccacttctcatcattgccggcattcgcttataacaggggtcggactcctctctgtgcacctgtcctgcgggcagacctaggaaggatgccaggaccatgcccggtagagggctcagttggagtttcagggatgagcacctgcctcgggggcctgaaggaagcccatggaaggccatggccaaagaagctcatcgccctggggccagaagaatctgcccagcagatggtcctgtggaggatccaggagctttctgactgagtatggagggaggaccagcaagaccccttcatactggctgacctggacatactggccagctgccatcaggccttctgccaagccctgccacaggtctcgcccttctatgcagtgaagtgcaacagtagcccttgggtgctgcgtgtcctggccgccctgggcaccggctttgactgtgccagccaggtggaactggagcaggtgctgggcctgggtgtggccccctcgcgcatcgtctatgccaacccctgcaaacctgcctcccacatccggtatgctgcccagcacggggtgcagctcctgacctttgacagcgaggaggagctcaccaaggtggcccagcaccaccccagggccagactgctcctccggctgaggacccaggacagtcagagcaccttccctctgagcaccaagttcggggccagcctggaagcctgtgggcacctgctcacgtctgccagagacctggggttggccgtggtcggagccagcttccacctgggctccaactgccagacccccccagagcttcacacaagctatcgctgactgccggtgcatgttggaaatgggccacagggctgggcatgatatgagctgcctggacattggagggggcttccccggaatggagggctccgggcccaagtttgaggagttggcgagagtgatcagtgctgccctggcccaggacctccctgaggagcgtggtgtcaaggtcatcgcagagcctggctgcttctatgtggagtctgtctgcatggccgctgtcaacatcattgccaagagggctgtgctggagcccggtgggtgggccaggatggcactgggtggggatrccmctgtccaggtgtccccaggccctggaggagaggaagggcagagggttgggctctgtcccaggagctggggagccrcccctcttcccctgcaccctctatgtcccatgtgcgatgcctttgacaggctcttcttggaggatgtgcggctgcccgagctggatgtaggcgattggctggtcttcccctccatgggtgcctacatgtcctccatgagctccagcttcaatggcttc

SEQ ID NO: 1585 - DNA, 2997 bp, Homo sapiens
gggctccgagccggatgcgccttcctttcctctccagagcaggctgcccgcccgcggaatcccgcacgtagagcaacctcgcagcaccctcagaacagccccgctggggcgcgccgggctgccgcggtgacctttccgacgcccctgaccccgcatccggaggcggccggaagtgtcgccggcctcctcccggcgcagcctccgggcctcccgtgcaatcactacgccctggggcccggaaaccgttttccggtctttcgctttcggctggggcgtggaggccgcggtgctgcgtaggccgggccgggcgcaggaacagccccgtggcgccctctctggccgccgcccgggcgggraacgtygttccggggaccgggcgaccccgcagcggggagcgcgccaggtccgcgcggggaagtgggcggtgtgcggccggcaccgcctcgcaccacgcccccgcgggcccgcactttcccggagtgcaccccgcggccgccagccggggcgatggcggggctctggctggggctcgtgtggcagaagctgctgctgtggggcgcggcgagtgccstttccctggccggcgccagtctggtcctgagcctgctgcagagggtggcgagctacgcgcggaaatggcagcagatgcggcccatccccacggtggcccgcgcctacccactggtgggccacgcgctgctgatgaagccggacgggcgagaattttttcagcagatcattgagtacacagaggaataccgccacatgccgctgctgaagctctgggtcgggccagtgcccatggtggccctttataatgcagaaaatgtggagaatcctggctcagagaagagagcaagaagggcagacaggatttctgccgctgttggcctagtgttaatagaagttggtgtggtggatgcagatggagatctgtccagagtaattttaactagttcaaagcaaattgacaaatcctctatgtacaagtttttagaaccatggcttggcctaggacttcttacaaggactgttctctcagaaaggaggagaaaggctggaaaggaaggtccagctggcagctggcctttgcccgtcaagaggccaagagtccaggtgaacagttatcttcagctgtggtattcaatagcgactgtcgccagtgttcaggaagactcaggagatatattttttgtaaccacatattttatttctagtactggaaacaaatggcgctccaggagaaagatgttaacacccactttccattttaccattctggaagatttcttagatatcatgaatgaacaagcaaatatattggttaagaaacttgaaaaacacattaaccaagaagcwtttaactgctttttttacatcactctttgtgccttagatatcatctgtggaaatcacactccacygggaaggcaaatggggggacgggaaagggtgacgggctcttcagcgcggttctacgaccgcactggccttctgaggagcagcagccacgcccagggctgtgagtggggcaggcatggagcaactgcccagggaggcgaagggaaggaagaacaggaacagggagtagaagtggaccgtacaagagaagaggaaacarctatggggaagaatattggtgctcaaartaatgatgattccgagtatgtccgtgcagtttatagaatgagtgagatgatatttcgaagaataaagatgccctggctttggcttgatctctggtaccttatgtttaaagaaggatgggaacacaaaaagagccttmagatcctacatacttttaccaacagtgtcatcgckgaacgggccaatraaatgaacgccaatgaagactgyagaggtgatggcaggggctctgccccctccaaaaataaacgcagggcctttcttgacttgcttttaagtgtgactgatgacgaagggaacaggctaagtcatgaagatattcgagaagaagttgacaccttcatgtttgaggggcacgatacaactgcagctgcaataaactggtccttatacctgttgggttctaacccagaagtccagaaaaaagtggatcatgaattggatgaygtgtttggtcrtcttatcwacttgctttcawcagggaagtctgaccgtcccgctacartagaagacctgaagaaacttcggtatctggaatgtgttattaaggagacccttcgcctttttccttctgttcctttatttgcccgtagtgttagtsaagattgtgaagtggcaggttacagagttctaaaaggcactgaagccgtcatcattccctatgcattgcacagagatccgagatacttccccaaccccgaggagttccagcctgagcggttcttcccsgagaatgcacaagggcgccatccatatgcctacgtgcccttctctgctggccccaggaactgtataggtcaaaagtttgctgtgatggaagaaaagaccattctttcrtgcatcctgaggcacttttggatagaatccaaccagaaaagagaagagcttggtctagaaggacagttgattcttcgtccaactgcaattgaagaagagatacagtccatctctgtggtggaaactccaggttgtgaaactcaagatcaatcagcaatagaacctctggagcagctgctgggtgatgagaagaagcaggcagaagaaatggacagaatcctggaggaacctgagtcccacatggcagtctgccaagttctattgagggagctggggaaagacagcaagcaagccccaatcctaccagcaaggtgttacagacagtgggcgtctgaaaaacaacagagaaatggacaaggaggtaacagaatggcagggagtgagaagcgttacgcagaaagacaaagaatggtgaagagacaggaggtggaagagatggaaggtgccttttcagatgagatgcttgctggaggatggtatcctgaggagatgatgtttgagcagtggtctgat

SEQ ID NO: 1586 - DNA, 1457 bp, Homo sapiens
gagggagcctcactgaaacgaactccggtctcaggggacagaatcctgaaaccctggctctggggtccggggcaggggtgcgctgcctcaggacagacggkgaaactgaggtccagagccggacatccaccgcctgcggagggaacgagaacgcggcgcgtcctgccttgcgggccgagcggcgccagagccgcctcctcccgccccccgcgctagatccccccgccccgtctttgccctcgcgacgccgccacctccggaacaagccatggtggcggcgacggtggcagcggcgtggctgctcctgtgggctgcggcctgcgcgcagcaggagcaggacttctacgacttcaaggcggtcaacatccggggcaaactggtgtcgctggagaagtaccgcggatcggtgtccctggtggtgaatgtggccagcgagtgcggcttcacagaccagcactaccgagccctgcagcagctgcagcgagacctgggcccccaccacttyaacgtgctcgccttcccctgcaaccagtttggccaacaggagcctgacagcaacaaggagattgagagctttgcccgccgcacctacagtgtctcattccccatgtttagcaagattgcagtcaccggtactggtgcccatcctgccttcaagtacctggcccagacttctgggaaggagcccacctggaacttctggaagtacctagtagccccagatggaaaggtggtaggggcttgggacccaactgtgtcagtggaggaggtcagaccccagatcacagcgctcgtgaggaagctcatcctactgaagcgagaagacttataaccaccgcgtctcctcctccaccacctcatcccgcccacctgtgtggggctgaccaatgcaaactcaaatggtgcttcaaagggagagacccactgactctccttcctttactcttatgccattggtcccatcattcttgtgggggaaaaattctagtattttgattatttgaatcttacagcaacaaataggaactcctggccaatgagagctcttgaccagtgaatcaccagccgatacgaacgtcttgccaacaaaaatgtgtggcaaatagaagtatatcaagcaataatctcccacccaaggcttctgtaractgggaccaatgattacctcatagggctgttgtgaggattaggatgaaatacctgtgaaagtgcctaggcagtgccagccaaataggaggcattcaatgaacattttttgcatataaamcaaaaaataacttgttatcaataaaaacttgcatccaacatgaatttccagccgatgataatccaggccaaaggtttagttgttgttatttcctctgtattattttcttcattacaaaagaaatgcaagttcattgtaacaatccaaacaatacctcacgatataaaataaaaatgaaagtatcctcctc

SEQ ID NO: 1587 - DNA, 1053 bp, Homo sapiens
aaatgcgcagctcttagtcgcrggcygactggtgtttatccgtcactcgccgaggttccttgggtcatggtgccagcctgactgagaagaggacgctcccgggagacgaatgaggaaccacctcctcctactgttcaagtacaggggcctggtccgcaaagggaagaaaagcaaaagacgaaaatggctaaattcgtgatccgcccagccactgccgccgactgcagtgacatactgcggctgatcaaggagctggctraatatgaatacatggaagaacaagtaatcttaactgaaaaagatctgctagaagatggttttggagagcaccccttttaccactgcctggttgcagaagtgccgaaagagcactggactccggaaggacacagcattgttggttttgccatgtactattttacctatgacccgtggattggcaagttattstatcttgaggacttcttcgtgatgagtgattatagaggctttggcataggatcagaaattctgaagaatctaagccaggttgcaatgaggtgtcgctgcagcagcatgcacttcttggtagcagaatggaatgaaccatccatcaacttctataaaagaagaggtgcttctgatctgtccagtgaagagggttggagactgttcaagatcgacaaggagtacttgctaaaaatggcaacagaggagtgaggagtgctgctgtagatgacaacctccattctattttagaataaattcccaacttctcttgctttctatgctgtttgtagtgaaataatagaatgagcacycattccaaagctttattaccagtggcgttgttgcatgtttgaaatgaggtctgtttaaagtggcaatctcagatgcagtttggagagtcagatctttctcctygaatatctttcgataaacaacaaggtggtgtgatcttaatrtatttgaaaaaaacttcattctcgtgagtcatttaaatgtgtacaatgtacacactggtacttagagtttctgtttgattcttttttaataaactactctttgatttaa

SEQ ID NO: 1588 - DNA, 1163 bp, Homo sapiens
aaatgcgcagctcttagtcgcrggcygactggtgtttatccgtcactcgccgaggttccttgggtcatggtgccagcctgactgagaagaggacgctcccgggagacgaatgaggaaccacctcctcctactgttcaagtacaggggcctggtccgcaaagggaagaaaagcaaaagacgaaaatggctaaattcgtgatccgcccagccactgccgccgactgcagtgacatactgcggctgatcaaggagctggctraatatgaatacatggaagaacaagtaatcttaactgaaaaagatctgctagaagatggttttggagagcaccccttttaccactgcctggttgcagaagtgccgaaagagcactggactccggaaggttacagtctctagcttcgccatgtacatggcccttccgtgtacatggatgggcggggaggtaactaaaagatcctttacacaataaagtagatgatcatgataaatgaggacacagcattgttggttttgccatgtactattttacctatgacccgtggattggcaagttattstatcttgaggacttcttcgtgatgagtgattatagaggctttggcataggatcagaaattctgaagaatctaagccaggttgcaatgaggtgtcgctgcagcagcatgcacttcttggtagcagaatggaatgaaccatccatcaacttctataaaagaagaggtgcttctgatctgtccagtgaagagggttggagactgttcaagatcgacaaggagtacttgctaaaaatggcaacagaggagtgaggagtgctgctgtagatgacaacctccattctattttagaataaattcccaacttctcttgctttctatgctgtttgtagtgaaataatagaatgagcacycattccaaagctttattaccagtggcgttgttgcatgtttgaaatgaggtctgtttaaagtggcaatctcagatgcagtttggagagtcagatctttctcctygaatatctttcgataaacaacaaggtggtgtgatcttaatrtatttgaaaaaaacttcattctcgtgagtcatttaaatgtgtacaatgtacacactggtacttagagtttctgtttgattcttttttaataaactactctttgatttaa

SEQ ID NO: 1589 - DNA, 3582 bp, Homo sapiens
ggcttggaagacacacycagtccatggggattggctcgaccagcccagcccagcctcgcctcccacagccttccggaaatcaggggccagaggcaaagacctcctagcagagggggagaggagggatgccgcagctgagcctgtcctggctgggcctcgggcccgtggcagcatccccgtggctgcttctgctgctggttggrggctcctggctcctggcccgcgtcctggcctggacctacaccttctatgacaactgccgccgcctccagtgttttcctcaacccccgaaacagaactggttttggggacaccagggcctggtcactcccacggaagagggcatgaagacattgacccagctggtgaccacatatccccagggctttaagttgtggctgggtcctaccttccccctcctcattttatgccaccctgacatyatccggcctatcaccagtgcctcagctgctgtcgcacccaaggatatgattttctatggcttcctgaagccctggctgggggatgggctcctgctgagtggtggtgacaagtggagcygccaccgtcggatgttgacgcctgccttccatttcaacatcttgaagccttatatgaagattttcaacaagagtgtgaacatcatgcacgacaagtggcagcrcctggcctcagagggcagcgccagactggacatgtttgaacacatcagcctcatgaccttggacagtctgcagaaatgtgtcttcagctttgaaagcaattgtcaggagaagcccagtgaatatattgccgccatcttggagctcagtgcctttgtagaaaagagaaaccagcagattctcttgcacacggacttcctgtattatctcactcctgatgggcagcgcttccgcagggcctgccacctggtgcacgacttcacagatgccgtcatccaggagcggcgcygcaccctccccactcagggtattgatgatttcctcaagaacaaggcaaagtccaagactttagacttcattgatgtgcttctgctgagcaaggatgaagatgggaaggaattgtctgatgaggacataagagcagaagctgacaccttcatgtttgagggccatgacactacagccagtggtctctcctgggtcctataccaccttgcaaagcacccagaataccaggaacagtgccggcaagaagtgcaagagcttctgaaggaccgtgaacctatagagattgaatgggacgacctggcccagctgcccttcctgaccatgtgcattaaggagagcctgcggttgcatcccccagtcccggtcatctcccgatgttgcacgcaggactttgtgctcccagacggccgcgtcatccccaaaggcattgtctgcctcatcaatattatcgggatccattacaacccaactgtgtggccagaccctgaggtctacgaccccttccgtttcraccaagagaacatcaaggagaggtcacctctggcttttattcccttctcggcagggcccagaaactgcatcgggcaggcgttcgccatggctgagatgaaggtggtcctggcgctcacsctgctgcacttccgcatcctgccgacccacactgaaccccgcaggaaacccgagctgatattgcgcgcagagggtggactttggctgcgggtggagcccctgggtgcgaactcacagtgactgycctacccacccacccacctctgtagagtcccagaaacaaaactatgctgacacctctgcttgagcctcgttgacagccagcatggggctcctggggactggwgggatctaagaaagggaggtgagtgggtggaggcagggtgacgtctctgaacccaaaaccctgacggcctctctggctgagcacagggcatctaggcccttagtgggttctcccagagcccaagtaaaaactttatcctgtgggcagtagggagccctgggaggtgtttgagcaggagagggaacaggattaagaatgggtttaaggagcaagactgagactctgattcagcgagaaacaaccataggggcagatcccttcatctgtcctgggaatgtcctcccaagactggagtcctcagctcagaacaaagggaaaggggtgcagcttccaccctggcaggctctcagaaatttttagttcctttttccaccaacttcccacccctgtttctccccctcccagtgcgttctctctgtgactctcttcccttactttcagaggcataggatctggagccagactgcttgggctcaagtcctggctctgctgcgtgacttgagcaagttaattcctctctctgtgcctcggttccctcaaccatataatggagacaacagcattacctatatcagggttttcctgaggtctcaatataagggactcagagctgtgcctggcacacaatgaatgctaaatatatggagccattattatttcctgtctcagaaagtctggctgttaaagaatgttgtctttcaagatcgttatttctaccacgactttaaaggctgtgttttggaactcaaaggcaaaaattctaatatctgtgctccttgaacaacctcttctcctagagggctgtgcatataagatatgtatatatatatatatattatatatatatatatatacacacacacacacacacacacacacatatatacatatacacacacacacacacacacacacacacacacacacatatatatatatatatatttttttttttttcctgaggatggtgaaggtacctgactgtgtgaggtggtaggagaatgagagaaacctcagtcagtgtctcaaaataaaatcctgctacaaacattgatctcttttcatagcctaagggatgttgcatcgctaaaccctgttgacttctctaatctcttctgtagctgatctccttcccttgctacactcggttactctggccttgattctgatctccaaatacattatattttttatttgggaccatcgtattgcctttgcacctttatcaaatataagttgcctatatttatttggatctattttttgggcttttaatattctgttccattgacctatttctcttttcttttaccaataccgcaacatcttggttactgtagcttcacggtaagtcttaaaacttggatattgtcagtcctccaactatgttctactccttcaatattgtgttggttattctgagtcttttgtctctccatataaattgtagaattagattgctgatatccataaaaaaactttctggagggccccagggagcgcggggcgccgctgctgctgctgctgctcctcggctgggttgtgtctactgggcccgcggctgcggcggcagaggggcctgagccgggagccgcgctcagccgagagttgggcagagggagtgcccgcgccgccgcggcgtcatgggccccctcccctcacctcagcgggcaccagccgcgggaacccccgggcctcctcgcgcccgagcctgagcgacccctgggttctccggcgccccctccctccccctatttttcttttcctgctcttgct

SEQ ID NO: 1590 - DNA, 3561 bp, Homo sapiens
ggcttggaagacacacycagtccatggggattggctcgaccagcccagcccagcctcgcctcccacagccttccggaaatcaggggccagaggcaaagacctcctagcagagggggagaggagggatgccgcagctgagcctgtcctggctgggcctcgggcccgtggcagcatccccgtggctgcttctgctgctggttggrggctcctggctcctggcccgcgtcctggcctggacctacaccttctatgacaactgccgccgcctccagtgttttcctcaacccccgaaacagaactggttttggggacaccagggcctggtcactcccacggaagagggcatgaagacattgacccagctggtgaccacatatccccagggctttaagttgtggctgggtcctaccttccccctcctcattttatgccaccctgacatyatccggcctatcaccagtgcctcagctgctgtcgcacccaaggatatgattttctatggcttcctgaagccctggctgggggatgggctcctgctgagtggtggtgacaagtggagcygccaccgtcggatgttgacgcctgccttccatttcaacatcttgaagccttatatgaagattttcaacaagagtgtgaacatcatgcacgtgagtcccttgaactctgggtcccagctggagccttgggctgctggtgagaggtgctcctgggactttgcatatgttaagttgttacctccttcatgcaggaagcccagtgaatatattgccgccatcttggagctcagtgcctttgtagaaaagagaaaccagcagattctcttgcacacggacttcctgtattatctcactcctgatgggcagcgcttccgcagggcctgccacctggtgcacgacttcacagatgccgtcatccaggagcggcgcygcaccctccccactcagggtattgatgatttcctcaagaacaaggcaaagtccaagactttagacttcattgatgtgcttctgctgagcaaggatgaagatgggaaggaattgtctgatgaggacataagagcagaagctgacaccttcatgtttgagggccatgacactacagccagtggtctctcctgggtcctataccaccttgcaaagcacccagaataccaggaacagtgccggcaagaagtgcaagagcttctgaaggaccgtgaacctatagagattgaatgggacgacctggcccagctgcccttcctgaccatgtgcattaaggagagcctgcggttgcatcccccagtcccggtcatctcccgatgttgcacgcaggactttgtgctcccagacggccgcgtcatccccaaaggcattgtctgcctcatcaatattatcgggatccattacaacccaactgtgtggccagaccctgaggtctacgaccccttccgtttcraccaagagaacatcaaggagaggtcacctctggcttttattcccttctcggcagggcccagaaactgcatcgggcaggcgttcgccatggctgagatgaaggtggtcctggcgctcacsctgctgcacttccgcatcctgccgacccacactgaaccccgcaggaaacccgagctgatattgcgcgcagagggtggactttggctgcgggtggagcccctgggtgcgaactcacagtgactgycctacccacccacccacctctgtagagtcccagaaacaaaactatgctgacacctctgcttgagcctcgttgacagccagcatggggctcctggggactggwgggatctaagaaagggaggtgagtgggtggaggcagggtgacgtctctgaacccaaaaccctgacggcctctctggctgagcacagggcatctaggcccttagtgggttctcccagagcccaagtaaaaactttatcctgtgggcagtagggagccctgggaggtgtttgagcaggagagggaacaggattaagaatgggtttaaggagcaagactgagactctgattcagcgagaaacaaccataggggcagatcccttcatctgtcctgggaatgtcctcccaagactggagtcctcagctcagaacaaagggaaaggggtgcagcttccaccctggcaggctctcagaaatttttagttcctttttccaccaacttcccacccctgtttctccccctcccagtgcgttctctctgtgactctcttcccttactttcagaggcataggatctggagccagactgcttgggctcaagtcctggctctgctgcgtgacttgagcaagttaattcctctctctgtgcctcggttccctcaaccatataatggagacaacagcattacctatatcagggttttcctgaggtctcaatataagggactcagagctgtgcctggcacacaatgaatgctaaatatatggagccattattatttcctgtctcagaaagtctggctgttaaagaatgttgtctttcaagatcgttatttctaccacgactttaaaggctgtgttttggaactcaaaggcaaaaattctaatatctgtgctccttgaacaacctcttctcctagagggctgtgcatataagatatgtatatatatatatatattatatatatatatatatacacacacacacacacacacacacacatatatacatatacacacacacacacacacacacacacacacacacacatatatatatatatatatttttttttttttcctgaggatggtgaaggtacctgactgtgtgaggtggtaggagaatgagagaaacctcagtcagtgtctcaaaataaaatcctgctacaaacattgatctcttttcatagcctaagggatgttgcatcgctaaaccctgttgacttctctaatctcttctgtagctgatctccttcccttgctacactcggttactctggccttgattctgatctccaaatacattatattttttatttgggaccatcgtattgcctttgcacctttatcaaatataagttgcctatatttatttggatctattttttgggcttttaatattctgttccattgacctatttctcttttcttttaccaataccgcaacatcttggttactgtagcttcacggtaagtcttaaaacttggatattgtcagtcctccaactatgttctactccttcaatattgtgttggttattctgagtcttttgtctctccatataaattgtagaattagattgctgatatccataaaaaaactttctggagggccccagggagcgcggggcgccgctgctgctgctgctgctcctcggctgggttgtgtctactgggcccgcggctgcggcggcagaggggcctgagccgggagccgcgctcagccgagagttgggcagagggagtgcccgcgccgccgcggcgtcatgggccccctcccctcacctcagcgggcaccagccgcgggaacccccgggcctcctcgcgcccgagcctgagcgacccctgggttctccggcgccccctccctccccctatttttcttttcctgctcttgct

SEQ ID NO: 1591 - DNA, 3874 bp, Homo sapiens
gggacaagctgcttctgataggagccaggctggcagtggcagggctggagggtcctggcctgggatggggaggggactgcccaaggttggggtgggtcaaggctgctggcctgggagactggtgatttcctggtaactggacccstggcaacctcccagtgattcaggctgggcctttttggattctaatcagcctctctctctctttccctttctgtgtaactggaggccacttggctgctggttttcattgggcatttctggactttagatctcagctcttgtttacccatctcagagccttccctgatctgcctccagcactgcccatccttgcccctytccactgtccttggagcttcctgggcccttccctgggcctcaggatcccaccctccatcccgtctgccctgcaggatgccgcagctgagcctgtcctggctgggcctcgggcccgtggcagcatccccgtggctgcttctgctgctggttggrggctcctggctcctggcccgcgtcctggcctggacctacaccttctatgacaactgccgccgcctccagtgttttcctcaacccccgaaacagaactggttttggggacaccagggcctggtcactcccacggaagagggcatgaagacattgacccagctggtgaccacatatccccagggctttaagttgtggctgggtcctaccttccccctcctcattttatgccaccctgacatyatccggcctatcaccagtgcctcagctgctgtcgcacccaaggatatgattttctatggcttcctgaagccctggctgggggatgggctcctgctgagtggtggtgacaagtggagcygccaccgtcggatgttgacgcctgccttccatttcaacatcttgaagccttatatgaagattttcaacaagagtgtgaacatcatgcacgacaagtggcagcrcctggcctcagagggcagcgccagactggacatgtttgaacacatcagcctcatgaccttggacagtctgcagaaatgtgtcttcagctttgaaagcaattgtcaggagaagcccagtgaatatattgccgccatcttggagctcagtgcctttgtagaaaagagaaaccagcagattctcttgcacacggacttcctgtattatctcactcctgatgggcagcgcttccgcagggcctgccacctggtgcacgacttcacagatgccgtcatccaggagcggcgcygcaccctccccactcagggtattgatgatttcctcaagaacaaggcaaagtccaagactttagacttcattgatgtgcttctgctgagcaaggatgaagatgggaaggaattgtctgatgaggacataagagcagaagctgacaccttcatgtttgagggccatgacactacagccagtggtctctcctgggtcctataccaccttgcaaagcacccagaataccaggaacagtgccggcaagaagtgcaagagcttctgaaggaccgtgaacctatagagattgaatgggacgacctggcccagctgcccttcctgaccatgtgcattaaggagagcctgcggttgcatcccccagtcccggtcatctcccgatgttgcacgcaggactttgtgctcccagacggccgcgtcatccccaaaggcattgtctgcctcatcaatattatcgggatccattacaacccaactgtgtggccagaccctgaggtctacgaccccttccgtttcraccaagagaacatcaaggagaggtcacctctggcttttattcccttctcggcagggcccagaaactgcatcgggcaggcgttcgccatggctgagatgaaggtggtcctggcgctcacsctgctgcacttccgcatcctgccgacccacactgaaccccgcaggaaacccgagctgatattgcgcgcagagggtggactttggctgcgggtggagcccctgggtgcgaactcacagtgactgycctacccacccacccacctctgtagagtcccagaaacaaaactatgctgacacctctgcttgagcctcgttgacagccagcatggggctcctggggactggwgggatctaagaaagggaggtgagtgggtggaggcagggtgacgtctctgaacccaaaaccctgacggcctctctggctgagcacagggcatctaggcccttagtgggttctcccagagcccaagtaaaaactttatcctgtgggcagtagggagccctgggaggtgtttgagcaggagagggaacaggattaagaatgggtttaaggagcaagactgagactctgattcagcgagaaacaaccataggggcagatcccttcatctgtcctgggaatgtcctcccaagactggagtcctcagctcagaacaaagggaaaggggtgcagcttccaccctggcaggctctcagaaatttttagttcctttttccaccaacttcccacccctgtttctccccctcccagtgcgttctctctgtgactctcttcccttactttcagaggcataggatctggagccagactgcttgggctcaagtcctggctctgctgcgtgacttgagcaagttaattcctctctctgtgcctcggttccctcaaccatataatggagacaacagcattacctatatcagggttttcctgaggtctcaatataagggactcagagctgtgcctggcacacaatgaatgctaaatatatggagccattattatttcctgtctcagaaagtctggctgttaaagaatgttgtctttcaagatcgttatttctaccacgactttaaaggctgtgttttggaactcaaaggcaaaaattctaatatctgtgctccttgaacaacctcttctcctagagggctgtgcatataagatatgtatatatatatatatattatatatatatatatatacacacacacacacacacacacacacatatatacatatacacacacacacacacacacacacacacacacacacatatatatatatatatatttttttttttttcctgaggatggtgaaggtacctgactgtgtgaggtggtaggagaatgagagaaacctcagtcagtgtctcaaaataaaatcctgctacaaacattgatctcttttcatagcctaagggatgttgcatcgctaaaccctgttgacttctctaatctcttctgtagctgatctccttcccttgctacactcggttactctggccttgattctgatctccaaatacattatattttttatttgggaccatcgtattgcctttgcacctttatcaaatataagttgcctatatttatttggatctattttttgggcttttaatattctgttccattgacctatttctcttttcttttaccaataccgcaacatcttggttactgtagcttcacggtaagtcttaaaacttggatattgtcagtcctccaactatgttctactccttcaatattgtgttggttattctgagtcttttgtctctccatataaattgtagaattagattgctgatatccataaaaaaactttctggagggccccagggagcgcggggcgccgctgctgctgctgctgctcctcggctgggttgtgtctactgggcccgcggctgcggcggcagaggggcctgagccgggagccgcgctcagccgagagttgggcagagggagtgcccgcgccgccgcggcgtcatgggccccctcccctcacctcagcgggcaccagccgcgggaacccccgggcctcctcgcgcccgagcctgagcgacccctgggttctccggcgccccctccctccccctatttttcttttcctgctcttgct

SEQ ID NO: 1592 - DNA, 970 bp, Homo sapiens
ggcttggaagacacacycagtccatggggattggctcgaccagcccagcccagcctcgcctcccacagccttccggaaatcaggggccagaggcaaagacctcctagcagagggggagaggagggatgccgcagctgagcctgtcctggctgggcctcgggcccgtggcagcatccccgtggctgcttctgctgctggttggrggctcctggctcctggcccgcgtcctggcctggacctacaccttctatgacaactgccgccgcctccagtgttttcctcaacccccgaaacagaactggttttggggacaccagggcctggtcactcccacggaagagggcatgaagacattgacccagctggtgaccacatatccccagggctttaagttgtggctgggtcctaccttccccctcctcattttatgccaccctgacatyatccggcctatcaccagtgcctcaggtacccgtgcagagcttgtggtagtgggggctgggaaacatcaaaggccttctagcctctcccctccccaagcttctgtgtggcccctgcagggcccaggcccctcttcctgcttctctctcagccatgttcctctttccttcatgtattcacgaaccccccatgtcagcgtctcctccctccactgccatctctctctgcctttgtgttctgggcaccactggggctccaaraagcctcaatttagggccctgtcctcgagaaagccccrtgcttgaggaaatggatctggacagagacatctcaaacttcgtggagtcaggaattggcaagaaggagatgggtgtgacaactgggagaacaaggtctttcctgggggcagattggaaggcttcctggaggaggagttgctggaaaaatgagtaaaaagattttaaagcaaggggaagggtgatgcagtggatatcattagtatccaggtaccgctgccaggcctggcatc

SEQ ID NO: 1593 - DNA, 2360 bp, Homo sapiens
agcagacagagagaggaggttgtctgggacagactgctcctgacagaaggatgtcccagctgagcctgtcctggctgggcctckgscsagtggcagcatccccttggctgctcctcctgctggtcggggcctcctggctcctggcccatgtcctggcctggacctacgccttctatgacaactgccgccgccttcggtgtttcccacaacccccragacggaactggttttggggacaccagggcatggtcaaccccacagaggagggcatgagagttctgactcagctggtggcyacctacccccagggctttaaggtctggatgggacccatctcccccctcctcagtttgtgccaccccgacatcatccggtctgtcatcaacgcctcagctgccattgcaccaaaggacaagttcttctacagcttcctggagccctggctgggggatgggctcctgctgagtgctggtgacaagtggagccrccaccgtcggatgctgacgcctgccttccatttcaacatcctgaagccctatatgaagattttcaatgagagtgtgaacatcatgcacgccaagtggcagctcctggcctcagaggdtagtgcctgtttggatatgtttgagcacatcagcctcatgaccttggacagtctacagaaatgtgtcttcagctttgacagccattgtcaggagaaacccagtgaatatattgccgccatcttggagctcagtgcccttgtatcaaaaagacaccatgagatcctcctgcatattgacttcctgtattatctcacccctgatgggcagcgtttccgcagggcctgccgcctggtgcacgacttcacagatgccgtcatccaggagcggcgcygcacyctccctagccagggtgttgatgacttcctccaagccaaggccaaatccaagactttggacttcattgatgtactcctgctgagcaaggatgaagacgggaagaagttatctgatgaggacataagagcagaagctgacacctttatgtttgagggccatgacaccacggccagtggtctctcctgggtcctgtaccaycttgcaaagcacccagaataccaggagcgctgccggcaggaggtgcaagaacttctgaaggaccgtgagcctaaagagattgaatgggacgacctggcccatttgcccttcctgaccatgtgcatgaaggagagcctgcggctgcatcccccagtcccggtcatctcccgccatgtcacccaggacattgtgctcccagacggccgggtcatccccaaaggcattatctgcctcatcagtgttttcggaacccatcacaacccagctrtgtggccggaccctgaggtctacgacccctttcgctttgacccagagaacatcaaggagaggtcacctctggcttttattcccttctcggcagggcccaggaactgcatcgggcagacgttcgcgatggcggagatgaaggtggtcctggsgctcacgctgctgcgcttccgcgtcctgcctgaccacaccgagccccgcaggaagccggagctggtcctgcgcgcagagggcggactttggctgcgggtggagcccctgagctgagttctgcagagacccactctgaccccactaaaatgacccctgattcatcaaaagtgargcctagaattaccctaagaccctgttccacagtcctgtattccatcctagatatctactcaaaataattgagacaagtgttcaaacagaaagacgcttgtgcgtgaatgttcatggcrgccctattcacagtagccaaacgatgaaaacaaccccaagctatatattaccagatgaaaggataaacaaaatgtggtccatccatacaatggagtattacacagccataaaaaggaatgaagcagtgatccctactacactgtggatgaaccttgaatgcatgatactgaatgaaagacgtcagatgcaaaaggtcacatagtgtactgtccttttatacgaaatttccagaacaggccaatctgaagagatgcatagcggattggtggctttcagcagctgtggggaggtgggactgaggagcgactgctaatcagtatggggtttcctcccgggatggtgaaaatgttccggacctagatastgacgaaggtagcacgacactgtgagtgcactaaatgctattgaattggacactttgaaatggtgaatttcgtggtatgtgaattctacctcaatcaaaaaaatttgctattttatctcacatacattttttttctgtccaggttgttcatataataatatgctgtgagcatctttccatgacattaaatcatcttaggaaacatt

SEQ ID NO: 1594 - DNA, 2364 bp, Homo sapiens
gagaggaggttgtctgggacagactgctcctgacagaaggtgccaggctgggggatgtcccagctgagcctgtcctggctgggcctckgscsagtggcagcatccccttggctgctcctcctgctggtcggggcctcctggctcctggcccatgtcctggcctggacctacgccttctatgacaactgccgccgccttcggtgtttcccacaacccccragacggaactggttttggggacaccagggcatggtcaaccccacagaggagggcatgagagttctgactcagctggtggcyacctacccccagggctttaaggtctggatgggacccatctcccccctcctcagtttgtgccaccccgacatcatccggtctgtcatcaacgcctcagctgccattgcaccaaaggacaagttcttctacagcttcctggagccctggctgggggatgggctcctgctgagtgctggtgacaagtggagccrccaccgtcggatgctgacgcctgccttccatttcaacatcctgaagccctatatgaagattttcaatgagagtgtgaacatcatgcacgccaagtggcagctcctggcctcagaggdtagtgcctgtttggatatgtttgagcacatcagcctcatgaccttggacagtctacagaaatgtgtcttcagctttgacagccattgtcaggagaaacccagtgaatatattgccgccatcttggagctcagtgcccttgtatcaaaaagacaccatgagatcctcctgcatattgacttcctgtattatctcacccctgatgggcagcgtttccgcagggcctgccgcctggtgcacgacttcacagatgccgtcatccaggagcggcgcygcacyctccctagccagggtgttgatgacttcctccaagccaaggccaaatccaagactttggacttcattgatgtactcctgctgagcaaggatgaagacgggaagaagttatctgatgaggacataagagcagaagctgacacctttatgtttgagggccatgacaccacggccagtggtctctcctgggtcctgtaccaycttgcaaagcacccagaataccaggagcgctgccggcaggaggtgcaagaacttctgaaggaccgtgagcctaaagagattgaatgggacgacctggcccatttgcccttcctgaccatgtgcatgaaggagagcctgcggctgcatcccccagtcccggtcatctcccgccatgtcacccaggacattgtgctcccagacggccgggtcatccccaaaggcattatctgcctcatcagtgttttcggaacccatcacaacccagctrtgtggccggaccctgaggtctacgacccctttcgctttgacccagagaacatcaaggagaggtcacctctggcttttattcccttctcggcagggcccaggaactgcatcgggcagacgttcgcgatggcggagatgaaggtggtcctggsgctcacgctgctgcgcttccgcgtcctgcctgaccacaccgagccccgcaggaagccggagctggtcctgcgcgcagagggcggactttggctgcgggtggagcccctgagctgagttctgcagagacccactctgaccccactaaaatgacccctgattcatcaaaagtgargcctagaattaccctaagaccctgttccacagtcctgtattccatcctagatatctactcaaaataattgagacaagtgttcaaacagaaagacgcttgtgcgtgaatgttcatggcrgccctattcacagtagccaaacgatgaaaacaaccccaagctatatattaccagatgaaaggataaacaaaatgtggtccatccatacaatggagtattacacagccataaaaaggaatgaagcagtgatccctactacactgtggatgaaccttgaatgcatgatactgaatgaaagacgtcagatgcaaaaggtcacatagtgtactgtccttttatacgaaatttccagaacaggccaatctgaagagatgcatagcggattggtggctttcagcagctgtggggaggtgggactgaggagcgactgctaatcagtatggggtttcctcccgggatggtgaaaatgttccggacctagatastgacgaaggtagcacgacactgtgagtgcactaaatgctattgaattggacactttgaaatggtgaatttcgtggtatgtgaattctacctcaatcaaaaaaatttgctattttatctcacatacattttttttctgtccaggttgttcatataataatatgctgtgagcatctttccatgacattaaatcatcttaggaaacatt

SEQ ID NO: 1595 - DNA, 2402 bp, Homo sapiens
cygcccgtccctgcctctccactgtccctggaggtccctgggccgttctctgggcctcaggatctcaccgtccatcccgtctgccctgcaggatgtcccagctgagcctgtcctggctgggcctckgscsagtggcagcatccccttggctgctcctcctgctggtcggggcctcctggctcctggcccatgtcctggcctggacctacgccttctatgacaactgccgccgccttcggtgtttcccacaacccccragacggaactggttttggggacaccagggcatggtcaaccccacagaggagggcatgagagttctgactcagctggtggcyacctacccccagggctttaaggtctggatgggacccatctcccccctcctcagtttgtgccaccccgacatcatccggtctgtcatcaacgcctcagctgccattgcaccaaaggacaagttcttctacagcttcctggagccctggctgggggatgggctcctgctgagtgctggtgacaagtggagccrccaccgtcggatgctgacgcctgccttccatttcaacatcctgaagccctatatgaagattttcaatgagagtgtgaacatcatgcacgccaagtggcagctcctggcctcagaggdtagtgcctgtttggatatgtttgagcacatcagcctcatgaccttggacagtctacagaaatgtgtcttcagctttgacagccattgtcaggagaaacccagtgaatatattgccgccatcttggagctcagtgcccttgtatcaaaaagacaccatgagatcctcctgcatattgacttcctgtattatctcacccctgatgggcagcgtttccgcagggcctgccgcctggtgcacgacttcacagatgccgtcatccaggagcggcgcygcacyctccctagccagggtgttgatgacttcctccaagccaaggccaaatccaagactttggacttcattgatgtactcctgctgagcaaggatgaagacgggaagaagttatctgatgaggacataagagcagaagctgacacctttatgtttgagggccatgacaccacggccagtggtctctcctgggtcctgtaccaycttgcaaagcacccagaataccaggagcgctgccggcaggaggtgcaagaacttctgaaggaccgtgagcctaaagagattgaatgggacgacctggcccatttgcccttcctgaccatgtgcatgaaggagagcctgcggctgcatcccccagtcccggtcatctcccgccatgtcacccaggacattgtgctcccagacggccgggtcatccccaaaggcattatctgcctcatcagtgttttcggaacccatcacaacccagctrtgtggccggaccctgaggtctacgacccctttcgctttgacccagagaacatcaaggagaggtcacctctggcttttattcccttctcggcagggcccaggaactgcatcgggcagacgttcgcgatggcggagatgaaggtggtcctggsgctcacgctgctgcgcttccgcgtcctgcctgaccacaccgagccccgcaggaagccggagctggtcctgcgcgcagagggcggactttggctgcgggtggagcccctgagctgagttctgcagagacccactctgaccccactaaaatgacccctgattcatcaaaagtgargcctagaattaccctaagaccctgttccacagtcctgtattccatcctagatatctactcaaaataattgagacaagtgttcaaacagaaagacgcttgtgcgtgaatgttcatggcrgccctattcacagtagccaaacgatgaaaacaaccccaagctatatattaccagatgaaaggataaacaaaatgtggtccatccatacaatggagtattacacagccataaaaaggaatgaagcagtgatccctactacactgtggatgaaccttgaatgcatgatactgaatgaaagacgtcagatgcaaaaggtcacatagtgtactgtccttttatacgaaatttccagaacaggccaatctgaagagatgcatagcggattggtggctttcagcagctgtggggaggtgggactgaggagcgactgctaatcagtatggggtttcctcccgggatggtgaaaatgttccggacctagatastgacgaaggtagcacgacactgtgagtgcactaaatgctattgaattggacactttgaaatggtgaatttcgtggtatgtgaattctacctcaatcaaaaaaatttgctattttatctcacatacattttttttctgtccaggttgttcatataataatatgctgtgagcatctttccatgacattaaatcatcttaggaaacatt

SEQ ID NO: 1596 - DNA, 3902 bp, Homo sapiens
tttgrtggattcctcagtccctgccgccgcggggcgccctgggatagcggcggggcctcctgaacagatctcggcccctttccaaacactcctgatgcctcatttgcctctcgcytcttttcgaccaccattttgggggctgaggcactcacggggcctccccaggtttyactccgtttctacacagtcggagccccatggatctcccatctcccggaggaaccgtgaagccaaacagaagcgcctgcgagagaagcaggckactctggaggctgagatagcargggagagcaagtcacctgcagaatccattaaggcctggaggcctaaggagttagtattgtatgaaatccctacgaaacccggtgaaaagaaagatgtctctgggcccctgcctcctgcatacagcccccgatatgttgaggctgcctggtacccgtggtgggtacgagagggcttcttcaaaccagaatatcaggcccggctgccccaagctacaggggagaccttttccatgtgtatcccacctcccaatgtcactggctccctgcacattggccacgcactcacggtggccatacaggatgccctcgtgcgctggcaccggatgcgtggggatcaagtgctgtgggtccctggttcagatcatgcaggaattgctacacaagctgtggtggagaaacaactgtggaaggaacggggagtgaggagacatgagctgagccgggaggccttccttagggaggtgtggcagtggaaggaggcgaaaggtggagagatctgtgagcagctgcgagctctgggtgcctccctggactgggatcgagagtgttttaccatggatgttggctcctcagtggctgtgactgaagcttttgtgcggctctacaaggcggggttgctgtaccggaaccatcagcttgtcaactggtcatgtgctttaagatcagccatctcggacattgaggtggagaaccggcccctgcctggccacacacagcttcgactgcctggctgccccacccccgtgtcttttggcctcctattttctgttgccttccccgtggatggagagcctgttctactgcctttagctatgttggcagtgagagatgcagaggttgtggtaggaaccacaaggccagagacgctgcctggagatgtggctgtggccgttcatccagacgactcgcgatacacacatctacacgggcgacagcttcgtcaccccttgatggggcagcctcttcccctcatcacagactatgctgttcagccacatgtgggcacgggggcagtgaaggtgactccagctcacagtcctgccgatgctgagatgggggcccgacatggcttgagccccttgaatgtcattgcggaggatgggaccatgacctcyctctgcggggactggytgcaggtgggtcttcaccggtttgtggcccgggaaaagataatgtctgtgctgagtgaayggggcctrttccggggcctccagaaccaccccatggtactgcccatctgcagccgttctggggatgtgatagaatacctgctgaagaaccagtggtttgtccgctgccaggaaatgggggcccgagctgccaaggctgtggagtcgggggccctggagctcagtccctycttccaccagaagaactggcagcactggttttcccatattggggactggtgtgtctcccggcagctgtggtggggccatcagattccagcctacctggttgtagaggaccatgcgcagggagaagaggactgttgggtggtygggcggtcagaggctgaggccagagaggtagcagcggaactgacagggaggccaggggcagagctgaccctggagagggatcctgatgtcctagacacatggttttcttctgccctgttccccttttctgccctgggctggccccaagagaccccagaccttgctcgtttctaccccctgtcacttttggaaacgggcagcgaccttctgctgttctgggtgggccgcatggtcatgttggggacccagctcacagggcagctgcccttcagcaaggtgcttcttcatcccatggttcgggacaggcagggccggaagatgagcaagtccctggggaatgtgctggacccaagagacatcatcagtggggtggagatgcagktgctgcaggaaaagctgagaagcggaaatttggaccctgcagagctggccattgtggctgcagcacagaaaaaggactttcctcacgggatccctgagtgtgggacagatgccctgagattcacactctgctcccatggagttcaggcgggcgacttgcacctgtcagtctctgaggtccagagctgccgacatttctgcaacaagatctggaatgctcttcgctttatcctcaatgctttaggggagaaatttgtgccacagcctgctgaggagctgtctccctcctccccgatggatgcctggatcctgagccgccttgccctggctgcccaggagtgtgagcggggcttcctcacccgagagctctcgctygtcactcatgccctgcaccacttctggcttcacaacctctgtgacgtctacctggaggctgtgaagcccgtgctgtggcactcgccccgccccctggggccccctcaggtcctgttctcctgcgctgacctcggcctccgcctcctggccccactgatgcccttcctggctgaagagctctggcagaggctgccccccaggcctggttgcccccctgcccccagcatctcggttgccccctacccyagcgcctgcagcttggagcactggcgccagccagagctggagcggcgcttctcccgggtccaagaggtcgtgcaggtgctaagggctctccragccacgtaccagctcaccaaagcccggccccgagtgctgctgcagagctcagagcctggggaccagggcctcttcgaggccttcttggagcccctgggcaccctgggctactgtggggctgtgggcctgttacccccaggcrcagcagctccctccggctgggcccaggctccactcagtgacacggctcaagtctacatggagctgcagggcctggtggacccgcagatccagctacctctgttagccgcccgaaggtacaagttgcagaagcagcttgayagcctcacagccaggaccccatcagaaggggaggcagggactcagaggcaacaaaagctttcttccctccagctggaattgtcaaaactggacaaggcagcctctcacctccrgcagctgatggatgagcctccagccccagggagcccggagctctaactcatcatccccatcagttttcctccctctcagacctgtctttgaggacaaacagatttgtcagctgtcagggtgcagtgggacgtcagagactatgtggtccatcgccttcattgtgtaaatgaggacacagactggcttggtcgcagtgactgtggtgtccttgagatgctcacattactgcccggcctgcctcccacctggaagtctgggaatgaggagattgagataaacttttgaaatcccaaacatgtctgtttatggctctttggtcccctttgctcccagtggtgacttttgtgcttctgagttgtcccctgagagcttggtctgggaaaagaggaggaggggtcctcrctggaggaagaggaactttctagtcatgggtagggtatgggcacagtggttccggttctacctmctttctggactaactgacagtgccctggcttttgcaggctctttctcctccacttctcactaaatggaagcttccccgctccttggctgtatccctagaggtgctgagagaagtaggacttcctccagacctgatgggctgcaggctgtgctgcagatg

SEQ ID NO: 1597 - DNA, 3877 bp, Homo sapiens
agacrggaaagatggaacaaggggagtgacccttctccacccccatatcctaatgtgctctctctctatccagaacagatctcggcccctttccaaacactcctgatgcctcatttgcctctcgcytcttttcgaccaccattttgggggctgaggcactcacggggcctccccaggtttyactccgtttctacacagtcggagccccatggatctcccatctcccggaggaaccgtgaagccaaacagaagcgcctgcgagagaagcaggckactctggaggctgagatagcargggagagcaagtcacctgcagaatccattaaggcctggaggcctaaggagttagtattgtatgaaatccctacgaaacccggtgaaaagaaagatgtctctgggcccctgcctcctgcatacagcccccgatatgttgaggctgcctggtacccgtggtgggtacgagagggcttcttcaaaccagaatatcaggcccggctgccccaagctacaggggagaccttttccatgtgtatcccacctcccaatgtcactggctccctgcacattggccacgcactcacggtggccatacaggatgccctcgtgcgctggcaccggatgcgtggggatcaagtgctgtgggtccctggttcagatcatgcaggaattgctacacaagctgtggtggagaaacaactgtggaaggaacggggagtgaggagacatgagctgagccgggaggccttccttagggaggtgtggcagtggaaggaggcgaaaggtggagagatctgtgagcagctgcgagctctgggtgcctccctggactgggatcgagagtgttttaccatggatgttggctcctcagtggctgtgactgaagcttttgtgcggctctacaaggcggggttgctgtaccggaaccatcagcttgtcaactggtcatgtgctttaagatcagccatctcggacattgaggtggagaaccggcccctgcctggccacacacagcttcgactgcctggctgccccacccccgtgtcttttggcctcctattttctgttgccttccccgtggatggagagcctgatgcagaggttgtggtaggaaccacaaggccagagacgctgcctggagatgtggctgtggccgttcatccagacgactcgcgatacacacatctacacgggcgacagcttcgtcaccccttgatggggcagcctcttcccctcatcacagactatgctgttcagccacatgtgggcacgggggcagtgaaggtgactccagctcacagtcctgccgatgctgagatgggggcccgacatggcttgagccccttgaatgtcattgcggaggatgggaccatgacctcyctctgcggggactggytgcagggtcttcaccggtttgtggcccgggaaaagataatgtctgtgctgagtgaayggggcctrttccggggcctccagaaccaccccatggtactgcccatctgcagccgttctggggatgtgatagaatacctgctgaagaaccagtggtttgtccgctgccaggaaatgggggcccgagctgccaaggctgtggagtcgggggccctggagctcagtccctycttccaccagaagaactggcagcactggttttcccatattggggactggtgtgtctcccggcagctgtggtggggccatcagattccagcctacctggttgtagaggaccatgcgcagggagaagaggactgttgggtggtygggcggtcagaggctgaggccagagaggtagcagcggaactgacagggaggccaggggcagagctgaccctggagagggatcctgatgtcctagacacatggttttcttctgccctgttccccttttctgccctgggctggccccaagagaccccagaccttgctcgtttctaccccctgtcacttttggaaacgggcagcgaccttctgctgttctgggtgggccgcatggtcatgttggggacccagctcacagggcagctgcccttcagcaaggtgcttcttcatcccatggttcgggacaggcagggccggaagatgagcaagtccctggggaatgtgctggacccaagagacatcatcagtggggtggagatgcagktgctgcaggaaaagctgagaagcggaaatttggaccctgcagagctggccattgtggctgcagcacagaaaaaggactttcctcacgggatccctgagtgtgggacagatgccctgagattcacactctgctcccatggagttcaggcgggcgacttgcacctgtcagtctctgaggtccagagctgccgacatttctgcaacaagatctggaatgctcttcgctttatcctcaatgctttaggggagaaatttgtgccacagcctgctgaggagctgtctccctcctccccgatggatgcctggatcctgagccgccttgccctggctgcccaggagtgtgagcggggcttcctcacccgagagctctcgctygtcactcatgccctgcaccacttctggcttcacaacctctgtgacgtctacctggaggctgtgaagcccgtgctgtggcactcgccccgccccctggggccccctcaggtcctgttctcctgcgctgacctcggcctccgcctcctggccccactgatgcccttcctggctgaagagctctggcagaggctgccccccaggcctggttgcccccctgcccccagcatctcggttgccccctacccyagcgcctgcagcttggagcactggcgccagccagagctggagcggcgcttctcccgggtccaagaggtcgtgcaggtgctaagggctctccragccacgtaccagctcaccaaagcccggccccgagtgctgctgcagagctcagagcctggggaccagggcctcttcgaggccttcttggagcccctgggcaccctgggctactgtggggctgtgggcctgttacccccaggcrcagcagctccctccggctgggcccaggctccactcagtgacacggctcaagtctacatggagctgcagggcctggtggacccgcagatccagctacctctgttagccgcccgaaggtacaagttgcagaagcagcttgayagcctcacagccaggaccccatcagaaggggaggcagggactcagaggcaacaaaagctttcttccctccagctggaattgtcaaaactggacaaggcagcctctcacctccrgcagctgatggatgagcctccagccccagggagcccggagctctaactcatcatccccatcagttttcctccctctcagacctgtctttgaggacaaacagatttgtcagctgtcagggtgcagtgggacgtcagagactatgtggtccatcgccttcattgtgtaaatgaggacacagactggcttggtcgcagtgactgtggtgtccttgagatgctcacattactgcccggcctgcctcccacctggaagtctgggaatgaggagattgagataaacttttgaaatcccaaacatgtctgtttatggctctttggtcccctttgctcccagtggtgacttttgtgcttctgagttgtcccctgagagcttggtctgggaaaagaggaggaggggtcctcrctggaggaagaggaactttctagtcatgggtagggtatgggcacagtggttccggttctacctmctttctggactaactgacagtgccctggcttttgcaggctctttctcctccacttctcactaaatggaagcttccccgctccttggctgtatccctagaggtgctgagagaagtaggacttcctccagacctgatgggctgcaggctgtgctgcagatg

SEQ ID NO: 1598 - DNA, 1694 bp, Homo sapiens
akatcctgtgctgggcctcccaactggtgcatggacaggctgaggaagcacaggccgggcagagccctggccaagaggggcgtcttgcgcccacactcacttggcaagtttctgcagcacctgctcgcactccagctgcttccgctcaagctgctcagcatagggcactgtccatagaggggtcaccacgtcggccactcgtgttactggtggctcactctcaccctcctgtcgcctcctcctggccatggggtcggccttgggccgggccaggcgcacactgagtgggcggcctttccagagggcaccatgcaaaacgcgcagggccttgtccctctctgcagcrctgcggaatgtcacaaaggcgcagggtggttgcccaaagagtttggttttgtggggctgcagaccaaagcggcccaggaagcgccggacgtcgctgaagctggcgtggcgaggacactcatgaggaccatgatacttccactgagaatacagacgagtccaaccatgaccctcagtttgagccaatagtttctcttcctgagcaagaaattaaaacactggaagaagatgaagaggaactttttaaaatgcgggcaaaactgttccgatttgcctctgagaacgatctcccagaatggaaggagcgaggcactggtgacgtcaagctcctgaagcacaaggagaaaggggccatccgcctcctcatgcggagggacaagaccctgaagatctgtgccaaccactacaacgtgcctctgaactcagagcaggcccgcagcgaagcttagagcacacgggggtgtggagtcagccagacgggccctgatgggaggacgcagcgcccaggctgggctcgggacgaggatcacgccgatgatggagctgaagcccaacgcaggtagcgaccgtgcctgggtctggaacacccacgctgacttygccgacgagtgccccaagccagagctgctggccatccgcttcctgaatgctgagaatgcacagaaattcaaaacaaagtttgaagaatgcaggaaagagatcgaagagagagaaaagaaagcaggatcaggcaaaaatgatcatgccgaaaaagtggcggaaaagctagaagctctctcggtgaaggaggagaccaaggaggatgctgaggagaagcaataaatcgtcttattttattttcttttcctctctttcctttcctttttttaaaaaattttaccctgcccctctttttcggtttgtttttattctttcatttttacaagggacgttatataaagaactgaactcaacattcaggttgttttttttttttgtttctaagtttttgccctattgaagatgacttcagaaaatccattccccagtcatgaaaatgtactgtgctaactttcttttccatagtggaaacacttatttatagtcatcaaaaatagtgaataaaaaacacatttggaacctgggccagatggcaggactgtgtgtgtacaggcccctgcgctgtgagcgccgctcgcctaagcctcccgggtgtatgtccaggcctgtccgcagcacaggtgggtgctgcacctcacggtagcctgggttcctgggagagacgccctggtgtctgaggtcgtgcatgtatcttgctgtgggccttgaagctgaggtgtctgagctggcgctggtgagggagcctggcc

SEQ ID NO: 1599 - DNA, 1557 bp, Homo sapiens
aggccgggcagagccctggccaagaggggcgtcttgcgcccacactcacttggcaagtttctgcagcacctgctcgcactccagctgcttccgctcaagctgctcagcatagggcactgtccatagaggggtcaccacgtcggccactcgtgttactggtggctcactctcaccctcctgtcgcctcctcctggccatggggtcggccttgggccgggccaggcgcacactgagtgggcggcctttccagagggcaccatgcaaaacgcgcagggccttgtccctctctgcagcrctgcggaatgtcacaaaggcgcagggtggttgcccaaagagtttggttttgtggggctgcagaccaaagcggcccaggaagcgccggacgtcgctgaagctggcgtggcgaggcacgttctgcagctccagtttaaagatctcagargacactcatgaggaccatgatacttccactgagaatacagacgagtccaaccatgaccctcagtttgagccaatagtttctcttcctgagcaagaaattaaaacactggaagaagatgaagaggaactttttaaaatgcgggcaaaactgttccgatttgcctctgagaacgatctcccagaatggaaggagcgaggcactggtgacgtcaagctcctgaagcacaaggagaaaggggccatccgcctcctcatgcggagggacaagaccctgaagatctgtgccaaccactacatcacgccgatgatggagctgaagcccaacgcaggtagcgaccgtgcctgggtctggaacacccacgctgacttygccgacgagtgccccaagccagagctgctggccatccgcttcctgaatgctgagaatgcacagaaattcaaaacaaagtttgaagaatgcaggaaagagatcgaagagagagaaaagaaaggatcaggcaaaaatgatcatgccgaaaaagtggcggaaaagctagaagctctctcggtgaaggaggagaccaaggaggatgctgaggagaagcaataaatcgtcttattttattttcttttcctctctttcctttcctttttttaaaaaattttaccctgcccctctttttcggtttgtttttattctttcatttttacaagggacgttatataaagaactgaactcaacattcaggttgttttttttttttgtttctaagtttttgccctattgaagatgacttcagaaaatccattccccagtcatgaaaatgtactgtgctaactttcttttccatagtggaaacacttatttatagtcatcaaaaatagtgaataaaaaacacatttggaacctgggccagatggcaggactgtgtgtgtacaggcccctgcgctgtgagcgccgctcgcctaagcctcccgggtgtatgtccaggcctgtccgcagcacaggtgggtgctgcacctcacggtagcctgggttcctgggagagacgccctggtgtctgaggtcgtgcatgtatcttgctgtgggccttgaagctgaggtgtctgagctggcgctggtgagggagcctggcc

SEQ ID NO: 1600 - DNA, 4477 bp, Homo sapiens
gggtctcgggttgcgcgctgggcctggagggagggggcggcccccgcaccggtccgagttgcggccgcgtggactgcgacccgcgccgcgccgcaccgcgccgcgccctgggaacgccgctccccgcgcgccaacggacccggggaagcccttctggggtccgaggccgcgctgcggggccgcccacgctgcgctccaggagccagagcctgcagggtgggtgtcgggacatgctgatcttccctcaagacagctggcgggcgctctggtcatggaggactgcaatgtgcactcggccgccagcatcctggcctcggtgaaggagcaggaggcccgcttcgagaggctgacacgggcactggagcaggagcggcgccatgttgccctacagctggagcgtgcccagcagcctggcatggtcagtggtggcatgggcagtgggcagcccctgccaatggcctggcaacagctggtcctccaggagcagagcccaggcagccaggcctcactggccacgatgccggaggcacctgatgtgctggaggagaccgtgacggtggaggaggaccccggcacacccacttcccatgtgtctattgtmacatccgaagatggcacaacccggcgcaccgagaccaaggtcaccaagactgtcaagacggtgaccactcggacagtacgccaggtgcccgtgggcccagatggactccccctgctggatggcggccccccactaggcccttttgcagatggtgccctggaccggcatttcctgctgcgtggtggtggcccagyggccacactctctcgagcctacctcagcagygggggtggctttcccgaaggccccgagccccgggacagccccagctatggcagcctgtcccgagggctgggcatgcggcccccacgtgctggcccccttggccyargccctggtgatggctgcttcacactgcctggccaccgggaagccttcccggtgggtcctgagcctgggccaccaggtggccgctccctgcccgagcgcttccaggcagagccgtatggcttggaggatgacacgcgcagcctggccgctgatgacgagggtggccctgagctggagcctgactatggcacggccacaaggaggaggcctgagtgtgggcggggccttcataccagggcctacgaggacacagcagatgatggcggcgagctggcggacgagcggcctgcgttcccaatggtgacggcgcccctggcccagcctgaacggggcagcatgggcagcctggaccggctggtgcggcgctcgccctcagtggatagcgcccgcaaggagccgcgctggcgggaccctgagctgcctgaggtgctggcyatgctgcggcaccccgtggacccygtgaaggccaatgcggccgcctacctgcagcatctgtgctttgagaacgagggtgtcaagcggcgtgtacggcagttgcgggggctgccgctgcttgtggcactgctggaccacccgcgggctgaggtgcggcgccgggcctgtggggcactgcgcaacctctcctatggccgcgacactgacaacaaggccgccatccgggactgcggtggtgtgcctgccctggtgcgcctgctgagggctgcccgggacaacgaggtccgtgagcttgtcactggcaccctgtggaacctgtcatcctatgagcccctgaagatggtcatcattgaccatggcctgcagacgctgacccacgaggtgatcgtgccccactcaggatgggagcgtgagcccaacgaggactccaagccacgggacgccgagtggacaactgtcttcaagaacacgtcgggctgcctgaggaatgtgagctccgatggtgctgaggcccggcggcgactccgggagtgtgaagggctggtggacgcgctcctgcatgccctgcagtcggctgtgggccggaaggacactgacaacaagtcggtggagaactgcgtgtgcatcatgcggaacctgtcctaccacgtgcacaaggaggtgcccggggccgacaggtaccaggaggccgagcccgggcccctgggcagtgctgtaggctcccagcgccggaggcgggatgatgccagctgctttggaggcaagaaggccaaaggtggcacctttcccttccaggaaagaaggatggtgagatggaccggaactttgacacgctagacctgcccaagcgaactgaggccgcyaaaggctttgagctgctgtaccagcccgaggtggtacgtctctacctctccctcctcacggagagccggaacttcaacaccctggaggctgccgccggcgctctgcagaacctcagtgccggcaactggatgtgggccaygtacatccgcgccacagtgcgcaaagagcgcgggctgccggtgcttgtggaactgctgcagtctgagaccgacaaggtggtgcgcgccgtcgccatcgctctgcgcaacctctcgctggaccggcgcaacaaagacctcatcgggagctacgccatggctgagcttgtgcggaatgtgcgcaatgcacaggctccgccgcgaccgggggcctgcctggaggaagacaccgtggtggcggtgctcaacaccatccacgaaatcgtgtccgacagcctggataacgcgcgctcgctcctgcaggcacgcggggtgccagcgttggtggctctcgtggcctccagccaatcggtacgcgaagcgaaggcggcgtcacacgtgctgcagacagtgtggagctacaaggagctgcgtggtaccttgcagaaagatggttggaccaaggcgcgcttccagtcagctgctgctactgccaaggggcctaagggagcactgagtcctgggggcttcgatgacagcacgctgccactggtggacaagagccttgagggcgagaaaactggcagccgggatgtgatccccatggatgcgctgggcccagacggatactccacggtggaccrgagggagcggaggccacggggcgccagctctgcaggagaggcctctgagaaggaacccttgaaactcgaccccagcaggaaggcccctcccccygggcccagcaggcccgcrgtcaggctggtggacgccgtaggggacgctaagcctcagcccgttgattcctgggtctagcttgcatgcctgggcccaggcccagcctcttgttcttagggcttggatcgtggaagaagggccaccctgagcagatcgtgccgtggagcttggagccccctggcggcaggggttggcagcgcctcgccccagccaagcctgactttggggacaccctcctgcccccccaccccactccccccatcctacctaactccctaggcctgagttagctgtttactgacatggtgctgtgtgtgagcgagtgacagaaggcccgaggaggccgactgggctgctggggcagggcccagggaggtggcagggaagggtgcctggctgggctttggggctggtgggataggagggtgcccctgggaacacagtgccccagtggtgcgggccaggtctggcgccaggggcaggcagctaggcagggagggggctgggaaagaacttggacttctaaaggcggagggtctccctgggcaccctgcaggcaggcagaccacrgtgtggggggtgccccacaaggcycagccctgggcaaggaagctttggaagcagcaaggtgggggtcaggctacaggtgccccacctccccagagccctgcagtcacgtgaggcccctgtgcagtagagagcctttctccagcccatgctggctgkggccggggctgccgcatctgcctggagcctgggcagcacctccgggactgaccttcggcagtggctgggggactgctttcagtgcctgctgttcgtgactcagaaacagaagaaaaacactgagaaaaagcattaaaaataagccaaaataagactattggtaaacacctaaatttttgtaagaaaatttaaaaattaaagcagcaaaggaactttttgctttctgccactcaggtctggcacaagtggctggcttctcccttgtgtcgggcctctgcgcgtctggggcagggccctgggtggaggtggtcccaggtgcccatctgctgtgtcctgcagaggctctgtttctggtccctgggtggccccaaacttgtccacttgggctcactggtctgtctatccataggagtgggctggctgggggctagccaggccttgagcccaggagtagaatcttggctaggggctggtctcggtgcaggtgaactcagctagcacagggttgattcctgtcctgggcctgggaactgggcccttggagcctctgaggtggctagcagtctgaccccttggaggagatggggacagctctaggtgtaggtggrcagaaaccagcactgcatcctcactcatgggccagggaggcaactacagggatgcggga

SEQ ID NO: 1601 - DNA, 4475 bp, Homo sapiens
gggtctcgggttgcgcgctgggcctggagggagggggcggcccccgcaccggtccgagttgcggccgcgtggactgcgacccgcgccgcgccgcaccgcgccgcgccctgggaacgccgctccccgcgcgccaacggacccggggaagcccttctggggtccgaggccgcgctgcggggccgcccacgctgcgctccaggagccagagcctgcagggtgggtgtcgggacatgctgatcttccctcaagacagctggcgggcgctctggtcatggaggactgcaatgtgcactcggccgccagcatcctggcctcggtgaaggagcaggaggcccgcttcgagaggctgacacgggcactggagcaggagcggcgccatgttgccctacagctggagcgtgcccagcagcctggcatggtcagtggtggcatgggcagtgggcagcccctgccaatggcctggcaacagctggtcctccaggagcagagcccaggcagccaggcctcactggccacgatgccggaggcacctgatgtgctggaggagaccgtgacggtggaggaggaccccggcacacccacttcccatgtgtctattgtmacatccgaagatggcacaacccggcgcaccgagaccaaggtcaccaagactgtcaagacggtgaccactcggacagtacgccaggtgcccgtgggcccagatggactccccctgctggatggcggccccccactaggcccttttgcagatggtgccctggaccggcatttcctgctgcgtggtggtggcccagyggccacactctctcgagcctacctcagcagygggggtggctttcccgaaggccccgagccccgggacagccccagctatggcagcctgtcccgagggctgggcatgcggcccccacgtgctggcccccttggccyargccctggtgatggctgcttcacactgcctggccaccgggaagccttcccggtgggtcctgagcctgggccaccaggtggccgctccctgcccgagcgcttccaggcagagccgtatggcttggaggatgacacgcgcagcctggccgctgatgacgagggtggccctgagctggagcctgactatggcacggccacaaggaggaggcctgagtgtgggcggggccttcataccagggcctacgaggacacagcagatgatggcggcgagctggcggacgagcggcctgcgttcccaatggtgacggcgcccctggcccagcctgaacggggcagcatgggcagcctggaccggctggtgcggcgctcgccctcagtggatagcgcccgcaaggagccgcgctggcgggaccctgagctgcctgaggtgctggcyatgctgcggcaccccgtggacccygtgaaggccaatgcggccgcctacctgcagcatctgtgctttgagaacgagggtgtcaagcggcgtgtacggcagttgcgggggctgccgctgcttgtggcactgctggaccacccgcgggctgaggtgcggcgccgggcctgtggggcactgcgcaacctctcctatggccgcgacactgacaacaaggccgccatccgggactgcggtggtgtgcctgccctggtgcgcctgctgagggctgcccgggacaacgaggtccgtgagcttgtcactggcaccctgtggaacctgtcatcctatgagcccctgaagatggtcatcattgaccatggcctgcagacgctgacccacgaggtgatcgtgccccactcaggatgggagcgtgagcccaacgaggactccaagccacgggacgccgagtggacaactgtcttcaagaacacgtcgggctgcctgaggaatgtgagctccgatggtgctgaggcccggcggcgactccgggagtgtgaagggctggtggacgcgctcctgcatgccctgcagtcggctgtgggccggaaggacactgacaacaagtcggtggagaactgcgtgtgcatcatgcggaacctgtcctaccacgtgcacaaggaggtgcccggggccgacaggtaccaggaggccgagcccgggcccctgggcagtgctgtaggctcccagcgccggaggcgggatgatgccagctgctttggaggcaagaaggccaaagaggagtggttccaccaaggaaagaaggatggtgagatggaccggaactttgacacgctagacctgcccaagcgaactgaggccgcyaaaggctttgagctgctgtaccagcccgaggtggtacgtctctacctctccctcctcacggagagccggaacttcaacaccctggaggctgccgccggcgctctgcagaacctcagtgccggcaactggatgtgggccaygtacatccgcgccacagtgcgcaaagagcgcgggctgccggtgcttgtggaactgctgcagtctgagaccgacaaggtggtgcgcgccgtcgccatcgctctgcgcaacctctcgctggaccggcgcaacaaagacctcatcgggagctacgccatggctgagcttgtgcggaatgtgcgcaatgcacaggctccgccgcgaccgggggcctgcctggaggaagacaccgtggtggcggtgctcaacaccatccacgaaatcgtgtccgacagcctggataacgcgcgctcgctcctgcaggcacgcggggtgccagcgttggtggctctcgtggcctccagccaatcggtacgcgaagcgaaggcggcgtcacacgtgctgcagacagtgtggagctacaaggagctgcgtggtaccttgcagaaagatggttggaccaaggcgcgcttccagtcagctgctgctactgccaaggggcctaagggagcactgagtcctgggggcttcgatgacagcacgctgccactggtggacaagagccttgagggcgagaaaactggcagccgggatgtgatccccatggatgcgctgggcccagacggatactccacggtggaccrgagggagcggaggccacggggcgccagctctgcaggagaggcctctgagaaggaacccttgaaactcgaccccagcaggaaggcccctcccccygggcccagcaggcccgcrgtcaggctggtggacgccgtaggggacgctaagcctcagcccgttgattcctgggtctagcttgcatgcctgggcccaggcccagcctcttgttcttagggcttggatcgtggaagaagggccaccctgagcagatcgtgccgtggagcttggagccccctggcggcaggggttggcagcgcctcgccccagccaagcctgactttggggacaccctcctgcccccccaccccactccccccatcctacctaactccctaggcctgagttagctgtttactgacatggtgctgtgtgtgagcgagtgacagaaggcccgaggaggccgactgggctgctggggcagggcccagggaggtggcagggaagggtgcctggctgggctttggggctggtgggataggagggtgcccctgggaacacagtgccccagtggtgcgggccaggtctggcgccaggggcaggcagctaggcagggagggggctgggaaagaacttggacttctaaaggcggagggtctccctgggcaccctgcaggcaggcagaccacrgtgtggggggtgccccacaaggcycagccctgggcaaggaagctttggaagcagcaaggtgggggtcaggctacaggtgccccacctccccagagccctgcagtcacgtgaggcccctgtgcagtagagagcctttctccagcccatgctggctgkggccggggctgccgcatctgcctggagcctgggcagcacctccgggactgaccttcggcagtggctgggggactgctttcagtgcctgctgttcgtgactcagaaacagaagaaaaacactgagaaaaagcattaaaaataagccaaaataagactattggtaaacacctaaatttttgtaagaaaatttaaaaattaaagcagcaaaggaactttttgctttctgccactcaggtctggcacaagtggctggcttctcccttgtgtcgggcctctgcgcgtctggggcagggccctgggtggaggtggtcccaggtgcccatctgctgtgtcctgcagaggctctgtttctggtccctgggtggccccaaacttgtccacttgggctcactggtctgtctatccataggagtgggctggctgggggctagccaggccttgagcccaggagtagaatcttggctaggggctggtctcggtgcaggtgaactcagctagcacagggttgattcctgtcctgggcctgggaactgggcccttggagcctctgaggtggctagcagtctgaccccttggaggagatggggacagctctaggtgtaggtggrcagaaaccagcactgcatcctcactcatgggccagggaggcaactacagggatgcggga

SEQ ID NO: 1602 - DNA, 3936 bp, Homo sapiens
gggtctcgggttgcgcgctgggcctggagggagggggcggcccccgcaccggtccgagttgcggccgcgtggactgcgacccgcgccgcgccgcaccgcgccgcgccctgggaacgccgctccccgcgcgccaacggacccggggaagcccttctggggtccgaggccgcgctgcggggccgcccacgctgcgctccaggagccagagcctgcagggtgggtgtcgggacatgctgatcttccctcaagacagctggcgggcgctctggtcatggaggactgcaatgtgcactcggccgccagcatcctggcctcggtgaaggagcaggaggcccgcttcgagaggctgacacgggcactggagcaggagcggcgccatgttgccctacagctggagcgtgcccagcagcctggcatggtcagtggtggcatgggcagtgggcagcccctgccaatggcctggcaacagctggtcctccaggagcagagcccaggcagccaggcctcactggccacgatgccggaggcacctgatgtgctggaggagaccgtgacggtggaggaggaccccggcacacccacttcccatgtgtctattgtmacatccgaagatggcacaacccggcgcaccgagaccaaggtcaccaagactgtcaagacggtgaccactcggacagtacgccaggtgcccgtgggcccagatggactccccctgctggatggcggccccccactaggcccttttgcagatggtgccctggaccggcatttcctgctgcgtggtggtggcccagyggccacactctctcgagcctacctcagcagygggggtggctttcccgaaggccccgagccccgggacagccccagctatggcagcctgtcccgagggctgggcatgcggcccccacgtgctggcccccttggccyargccctggtgatggctgcttcacactgcctggccaccgggaagccttcccggtgggtcctgagcctgggccaccaggtggccgctccctgcccgagcgcttccaggcagagccgtatggcttggaggatgacacgcgcagcctggccgctgatgacgagggtggccctgagctggagcctgactatggcacggccacaaggaggaggcctgagtgtgggcggggccttcataccagggcctacgaggacacagcagatgatggcggcgagctggcggacgagcggcctgcgttcccaatggtgacggcgcccctggcccagcctgaacggggcagcatgggcagcctggaccggctggtgcggcgctcgccctcagtggatagcgcccgcaaggagccgcgctggcgggaccctgagctgcctgaggtgctggcyatgctgcggcaccccgtggacccygtgaaggccaatgcggccgcctacctgcagcatctgtgctttgagaacgagggtgtcaagcggcgtgtacggcagttgcgggggctgccgctgcttgtggcactgctggaccacccgcgggctgaggtgcggcgccgggcctgtggggcactgcgcaacctctcctatggccgcgacactgacaacaaggccgccatccgggactgcggtggtgtgcctgccctggtgcgcctgctgagggctgcccgggacaacgaggtccgtgagcttgtcactggcaccctgtggaacctgtcatcctatgagcccctgaagatggtcatcattgaccatggcctgcagacgctgacccacgaggtgatcgtgccccactcaggatgggagcgtgagcccaacgaggactccaagccacgggacgccgagtggacaactgtcttcaagaacacgtcgggctgcctgaggaatgtgagctccgatggtgctgaggcccggcggcgactccgggagtgtgaagggctggtggacgcgctcctgcatgccctgcagtcggctgtgggccggaaggacactgacaacaagtcggtggagaactgcgtgtgcatcatgcggaacctgtcctaccacgtgcacaaggaggtgcccggggccgacaggtaccaggaggccgagcccgggcccctgggcagtgctgtaggctcccagcgccggaggcgggatgatgccagctgctttggaggcaagaaggccaaagaggagtggttccaccaaggaaagaaggatggtgagatggaccggaactttgacacgctagacctgcccaagcgaactgaggccgcyaaaggctttgagctgctgtaccagcccgaggtggtacgtctctacctctccctcctcacggagagccggaacttcaacaccctggaggctgccgccggcgctctgcagaacctcagtgccggcaactggatgtgggccaygtacatccgcgccacagtgcgcaaagagcgcgggctgccggtgcttgtggaactgctgcagtctgagaccgacaaggtggtgcgcgccgtcgccatcgctctgcgcaacctctcgctggaccggcgcaacaaagacctcatcgggagctacgccatggctgagcttgtgcggaatgtgcgcaatgcacaggctccgccgcgaccgggggcctgcctggaggaagacaccgtggtggcggtgctcaacaccatccacgaaatcgtgtccgacagcctggataacgcgcgctcgctcctgcaggcacgcggggtgccagcgttggtggctctcgtggcctccagccaatcggtacgcgaagcgaaggcggcgtcacacgtgctgcagacagtgtggagctacaaggagctgcgtggtaccttgcagaaagatggttggaccaaggcgcgcttccagtcagctgctgctactgccaaggggcctaagggagcactgagtcctgggggcttcgatgacagcacgctgccactggtggacaagagccttgagggcgagaaaactggcagccgggatgtgatccccatggatgcgctgggcccagacggatactccacggtggaccrgagggagcggaggccacggggcgccagctctgcaggagaggcctctgagaaggaacccttgaaactcgaccccagcaggaaggcccctcccccygggcccagcaggcccgcrgtcaggctggtggacgccgtaggggacgctaagcctcagcccgttgattcctgggtctagcttgcatgcctgggcccaggcccagcctcttgttcttagggcttggatcgtggaagaagggccaccctgagcagatcgtgccgtggagcttggagccccctggcggcaggggttggcagcgcctcgccccagccaacctgggcagcacctccgggactgaccttcggcagtggctgggggactgctttcagtgcctgctgttcgtgactcagaaacagaagaaaaacactgagaaaaagcattaaaaataagccaaaataagactattggtaaacacctaaatttttgtaagaaaatttaaaaattaaagcagcaaaggaactttttgctttctgccactcaggtctggcacaagtggctggcttctcccttgtgtcgggcctctgcgcgtctggggcagggccctgggtggaggtggtcccaggtgcccatctgctgtgtcctgcagaggctctgtttctggtccctgggtggccccaaacttgtccacttgggctcactggtctgtctatccataggagtgggctggctgggggctagccaggccttgagcccaggagtagaatcttggctaggggctggtctcggtgcaggtgaactcagctagcacagggttgattcctgtcctgggcctgggaactgggcccttggagcctctgaggtggctagcagtctgaccccttggaggagatggggacagctctaggtgtaggtggrcagaaaccagcactgcatcctcactcatgggccagggaggcaactacagggatgcggga

SEQ ID NO: 1603 - DNA, 2067 bp, Homo sapiens
  misc_feature (1)...(2067): n = A,T,C or G
attccccacaccctatcccagtgttccaccctaggtctgaaggcccccgccccgaatccggccgcattcggccccggtctagccascgctctcacctctcccgcgacggcccgcccgggactggacccgccccggtccggcgcaggcagcgcggcgggcagccctagctgccccagaagccscacgacgatggcggcaatggcggtggcgctgcggggattaggagggcgcttccggtggcggacgcaggccgtggcgggcggggtgcggggcgcggcgcggggcgcagcagcaggtcagcgggactatgatctcctggtggtcggcgggggatctggtggcctggcttgtgccaaggaggaggcacccggtggggcctyggcggcacctgcgtcaacgtgggctgcatccccaagaagctgatgcaccaggcggcactgctgggaggcctgatccaagatgcccccaactatggctgggaggtggcccagcccgtgccrcatgactggaggaagatggcagaagctgttcaaaatcacgtgaaatccttgaactggggccaccgtgtccagcttcaggacagaaaagtcaagtactttaacatcaaagccagctttgttgacgagcacacggtttgcggcgttgccaaaggtgggaaasagattctgctgtcagccgatcacatcatcattgctactggagggcggccgagataccccacgcacatcgaaggtgccttggaatatggaatcacaagtgatgacatcttctggctgaaggaatcccctggaaaaacgtaaggcctgcgcrtgcccacagatgtggccctggagtgtgctggcttcctcaccgggattgggctggacaccaccatcatgatgcgcagcatccccctccgcggcttcgaccagcaaatgtcctccatggtcatagagcacatggcatctcatggcacccggttcctgaggggctgtgccccctcgcgggtcaggaggctccctgatggccagctgcaggtcacctgggaggacmgcaccacmggcaaggaggacacgggcacctttgacaccgtcctgtgggccataggtcgagtcccagacaccagaagtctgaatttggagaaggctggggtagatactagccccgacactcagaagatcctggtggactccygggaagccacctctgtgccccacatctacgccattggtgacgtggtggaggggcggcctgagytgacacccanagcgatcatggccgggaggctcctggtgcagcggctcttcggcgggtcctcagatctgatggactacgacaatgttcccacgaccgtcttcaccccrctggagtatggctgtgtggggctgtcygaggaggaggcagtggctcgccacgggcaggagcatgttgaggtctatcacgcccattataaaccactggagttcacggtggctggacgagatgcatcccagtgttatgtaaagatggtgtgcctgagggagcccccacagctggtgctgggcctgcatttccttggccccaacgcaggcgaagttactcaaggatttgctctggggatcaagtgtggggcttcctatgcgcaggtgatgcggaccgtgggtatccatcccacatgctctgaggaggtagtcaagctgcgcatctccaagcgctcaggcctggaccccacggtgacaggctgctgagggtaagcgccatccctgcaggccagggcacacggtgcgcccgccgccagctcctcggaggccagacccaggatggctgcaggccaggtttggggggcctcaaccctctcctggagcgcctgtgagatggtcagcgtggagcgcaagtgctggacaggtggcccgtgtgccccacagggatggctcaggggactgtccacctcacccctgcacctytcagcctytgccgccgggcaccccccccaggctcctggtgccrgatgatgacgacctgggtggaaacctaccctgtgggcacccatgtccgagccccctggcatttctgcaatgcaaataaagagggtactttttctgaagtgtg

SEQ ID NO: 1604 - DNA, 2062 bp, Homo sapiens
  misc_feature (1)...(2062): n = A,T,C or G
attccccacaccctatcccagtgttccaccctaggtctgaaggcccccgccccgaatccggccgcattcggccccggtctagccascgctctcacctctcccgcgacggcccgcccgggactggacccgccccggtccggcgcaggcagcgcggcgggcagccctagctgccccagaagccscacgacgatggcggcaatggcggtggcgctgcggggattaggagggcgcttccggtggcggacgcaggccgtggcgggcggggtgcggggcgcggcgcggggcgcagcagcaggtcagcgggactatgatctcctggtggtcggcgggggatctggtggcctggcttgtgccaaggagggcacccggtggggcctyggcggcacctgcgtcaacgtgggctgcatccccaagaagctgatgcaccaggcggcactgctgggaggcctgatccaagatgcccccaactatggctgggaggtggcccagcccgtgccrcatgactggaggaagatggcagaagctgttcaaaatcacgtgaaatccttgaactggggccaccgtgtccagcttcaggacagaaaagtcaagtactttaacatcaaagccagctttgttgacgagcacacggtttgcggcgttgccaaaggtgggaaasagattctgctgtcagccgatcacatcatcattgctactggagggcggccgagataccccacgcacatcgaaggtgccttggaatatggaatcacaagtgatgacatcttctggctgaaggaatcccctggaaaaacgttggtggtcggggccagctatgtggccctggagtgtgctggcttcctcaccgggattgggctggacaccaccatcatgatgcgcagcatccccctccgcggcttcgaccagcaaatgtcctccatggtcatagagcacatggcatctcatggcacccggttcctgaggggctgtgccccctcgcgggtcaggaggctccctgatggccagctgcaggtcacctgggaggacmgcaccacmggcaaggaggacacgggcacctttgacaccgtcctgtgggccataggtcgagtcccagacaccagaagtctgaatttggagaaggctggggtagatactagccccgacactcagaagatcctggtggactccygggaagccacctctgtgccccacatctacgccattggtgacgtggtggaggggcggcctgagytgacacccanagcgatcatggccgggaggctcctggtgcagcggctcttcggcgggtcctcagatctgatggactacgacaatgttcccacgaccgtcttcaccccrctggagtatggctgtgtggggctgtcygaggaggaggcagtggctcgccacgggcaggagcatgttgaggtctatcacgcccattataaaccactggagttcacggtggctggacgagatgcatcccagtgttatgtaaagatggtgtgcctgagggagcccccacagctggtgctgggcctgcatttccttggccccaacgcaggcgaagttactcaaggatttgctctggggatcaagtgtggggcttcctatgcgcaggtgatgcggaccgtgggtatccatcccacatgctctgaggaggtagtcaagctgcgcatctccaagcgctcaggcctggaccccacggtgacaggctgctgagggtaagcgccatccctgcaggccagggcacacggtgcgcccgccgccagctcctcggaggccagacccaggatggctgcaggccaggtttggggggcctcaaccctctcctggagcgcctgtgagatggtcagcgtggagcgcaagtgctggacaggtggcccgtgtgccccacagggatggctcaggggactgtccacctcacccctgcacctytcagcctytgccgccgggcaccccccccaggctcctggtgccrgatgatgacgacctgggtggaaacctaccctgtgggcacccatgtccgagccccctggcatttctgcaatgcaaataaagagggtactttttctgaagtgtg

SEQ ID NO: 1605 - DNA, 714 bp, Homo sapiens
atgcctccggtgatcaagagccagcctttcaacattttctgggcagccccaacaatgtattgtatgccttccttcaacgtggatataaatcttcaagtatttaacattatatcaaatcctttagagactcagagtgggtcaaaaattgccatattttatccaaatgaattagggtattacccttacttatctcaagatggaaaatcctttaatggaggaataccgcagaatgtgagcctttctgaacaccttaggaaaactgctgatgacattggagaaggtgtcccttggtggagatcagaagaacttgttgttattgactgggaaagttggaaaccccaatgggatagaaatcagggcagcagaataatatataaaaaccactctttagccttcactagaaaccatcatccttattggtyagaaatgaaagtggaaacagttgcccgagaggaatttgaaaatgctggaaaaaatttcatgaacattactctcacattggctttagaaatgagaccaaaatgtttatggggcttttatctctatccagactgctacaattatgattacagaataaatccagagacaccattttatttgcatagtactgaagctctgtcacaggaggacttagtgcatgcaattggcgaaagtgcagcattgggggcagcaggagtaatattgtggggaggatatgaatattctgcttcaaag

SEQ ID NO: 1606 - DNA, 2805 bp, Homo sapiens
cctggccaccgccgcgcggacaccctcacgaggacaccccggccgcgcggacacctaccgcggggacgccccgaccccatcctacctgctgcgccccgcgccgcgccccgcaccccgcccgccacggcctgcgtccgccaccggaagcgccctcctaatccccgcagcgccaccgccattgccgccatcgtcgtgsggcttctggggcagctagggctgcccgccgcgctgcctgcgccggaccggggcgggtccagtcccgggcgggccgtcgcgggagagaaataacatctgctttgctgccgagctcagaggagaccccagacccctcccgcagccagagggctggagcctgctcagaggtgctttgaagatgccggagsccccgcctctgctgttggcagctgtgttgctgggcctggtgctgctggtggtgctgctgctgcttctgaggcactggggctggggcctgtgccttatcggctggaacgagttcatcctgcagcccatccacaacctgctcatgggtgacaccaaggagcagcgcatcctgaaccatgtgctgcagcatgcggagcccgggaacgcacagagcgtgctggaggccattgacacctactgcgagcagaaggagtgggccatgaacgtgggcgacaagaaaggcaagatcgtggacgccgtgattcaggagcaccagccctccgtgctgctggagctgggggcctactgtggctactcagctgtgcgcatggcccgcctgctgtcaccaggggcgaggctcatcaccatcgagatcaaccccgactgtgccgccatcacccagcggatggtggatttcgctggcatgaaggacaaggtcacccttgtggttggagcgtcccaggacatcaycccccagctgaagaagaagtatgatgtggacacactggacatggtcttcctcgaccactggaaggaccggtacctgccggacacgcttctcttggaggaatgtggcctgctgcggaaggggacagtgctactggctgacaacgtgatctgcccaggtgcgccagacttcctagcacacgtgcgcgggagcagctgctttgagtgcacacactaccaatcgttcctggaatacagggaggtwgtggacggcctggagaaggccatctacaagggcccaggcagcgaagcagggccctgactgccccccccggcccccctctcgggctctctcacccagcctggtactgaaggtgccagacgtgctcctgctgaccttctgcgyctccgggctgtgtcctaaatgcaaagcacacctcggccgaggcctgcgccctgacatgctaacctctctgaactgcaacactggattgttcttttttaagactcaatcatgacttctttactaacactggctagctatattatcttatatactaatatcatgttttaaaaatataaaatagaaattaagaatctaaatatttagatataactcgacttagtacatccttctcaactgccattcccctgctgcccttgacttgggcaccaaacattcaaagctccccttgacggacgctaacgctaagggcggggcccctagctggctgggttctgggtggcacgcctrgcccactggcctcccagccacagtggtgcagaggtcagccctcctgcagctaggccaggggcacctgttagccccatggggacgactgccagcctgggaaacgaagaggagtcagccagcattcacacctttctgaccaagcaggcgctggggacaggtggaccccgcagcagcaccagcccctctgggccccatgtggcacagagtggaagcatctccttccctactccccactgggcctygcttacagaagaggcaatggctcagaccagctcccgcatccctgtagttgcctccctggcccatgagtgaggatgcagtgctggtttctgtccacctacacctagagctgtccccatctcctccaaggggtcagactgctagccacctcagaggctccaagggcccagttcccaggcccaggacaggaatcaaccctgtgctagctgagttcacctgcaccgagaccagcccctagccaagattctactcctgggctcaaggcctggctagcccccagccagcccactcctatggatagacagaccagtgagcccaagtggacaagtttggggccacccagggaccagaaacagagcctctgcaggacacagcagatgggcacctgggaccacctccacccagggccctgccccagacgcgcagaggcccgacacaagggagaagccagccacttgtgccagacctgagtggcagaaagcaaaaagttcctttgctgctttaatttttaaattttcttacaaaaatttaggtgtttaccaatagtcttattttggcttatttttaatgctttttctcagtgtttttcttctgtttctgagtcacgaamagcaggcactgaaagcagtcccccagccactgccgaaggtcagtcccggaggtgctgcccaggctccaggcagatgcggcagccccggccacagccagcatgggctggagaaaggctctctactgcacaggggcctcacgtgactgcagggctctggggaggtggggcacctgtagcctgacccccaccttgctgcttccaaagcttccttgcccagcagcccagtcggcctcctcgggccttctgtcactcgctcacacacagcaccatgtcagtaaacagctaactcaggcctagggagttaggtaggatggggggagtggggtgggggggc

SEQ ID NO: 1607 - DNA, 2688 bp, Homo sapiens
cctggccaccgccgcgcggacaccctcacgaggacaccccggccgcgcggacacctaccgcggggacgccccgaccccatcctacctgctgcgccccgcgccgcgccccgcaccccgcccgccacggcctgcgtccgccaccggaagcgccctcctaatccccgcagcgccaccgccattgccgccatcgtcgtgsggcttctggggcagctagggctgcccgccgcgctgcctgcgccggaccggggcgggtccagtcccgggcgggccgtcgcgggagagaaataacatctgctttgctgccgagctcagaggagaccccagacccctcccgcagccagagggctggagcctgctcagaggtgctttgaagatgccggagsccccgcctctgctgttggcagctgtgttgctgggcctggtgctgctggtggtgctgctgctgcttctgaggcactggggctggggcctgtgccttatcggctggaacgagttcatcctgcagcccatccacaacctgctcatgggtgacaccaaggagcagcgcatcctgaaccatgtgctgcagcatgcggagcccgggaacgcacagagcgtgctggaggccattgacacctactgcgagcagaaggagtgggccatgaacgtgggcgacaagaaaggcaagatcgtggacgccgtgattcaggagcaccagccctccgtgctgctggagctgggggcctactgtggctactcagctgtgcgcatggcccgcctgctgtcaccaggggcgaggctcatcaccatcgagatcaaccccgactgtgccgccatcacccagcggatggtggatttcgctggcatgaaggacaaggtcacccttgtggttggagcgtcccaggacatcaycccccagctgaagaagaagtatgatgtggacacactggacatggtcttcctcgaccactggaaggaccggtacctgccggacacgcttctcttggaggaatgtggcctgctgcggaaggggacagtgctactggctgacaacgtgatctgcccaggtgcgccagacttcctagcacacgtgcgcgggagcagctgctttgagtgcacacactaccaatcgttcctggaatacagggaggtwgtggacggcctggagaaggccatctacaagggcccaggcagcgaagcagggccctgactgccccccccggcccccctctcgggctctctcacccagcctggtactgaaggtgccagacgtgctcctgctgaccttctgcgyctccgggctgtgtcctaaatgcaaagcacacctcggccgaggcctgcgccctgacatgctaacctctctgaactgcaacactggattgttcttttttaagactcaatcatgacttctttactaacactggctagctatattatcttatatactaatatcatgttttaaaaatataaaatagaaattaagaatctaaatatttagatataactcgacttagtacatccttctcaactgccattcccctgctgcccttgacttgggcaccaaacattcaaagctccccttgacggacgctaacgctaagggcggggcccctagctggctgggttctgggtggcacgcctrgcccactggcctcccagccacagtggtgcagaggtcagccctcctgcagctaggccaggggcacctgttagccccatggggacgactgccagcctgggaaacgaagaggagtcagccagcattcacacctttctgaccaagcaggcgctggggacaggtggaccccgcagcagcaccagcccctctgggccccatgtggcacagagtggaagcatctccttccctactccccactgggcctygcttacagaagaggcaatggctcagaccagctcccgcatccctgtagttgcctccctggcccatgagtgaggatgcagtgctggtttctgtccacctacacctagagctgtccccatctcctccaaggggtcagactgctagccacctcagaggctccaagggcccagttcccaggcccaggacaggaatcaaccctgtgctagctgagttcacctgcaccgagaccagcccctagccaagattctactcctgggctcaaggcctggctagcccccagccagcccactcctatggatagacagaccagtgagcccaagtggacaagtttggggccacccagggaccagaaacagagcctctgcaggacacagcagatgggcacctgggaccacctccacccagggccctgccccagacgcgcagaggcccgacacaagggagaagccagccacttgtgccagacctgagtggcagaaagcaaaaagttcctttgctgctttaatttttaaattttcttacaaaaatttaggtgtttaccaatagtcttattttggcttatttttaatgctttttctcagtgtttttcttctgtttctgagtcacgaamagcaggcactgaaagcagtcccccagccactgccgaaggtcagtcccggaggtgctgcccaggctccaggcagatgcggcagccccggccacagccagcatgggctggagaaaggctctctactgcacaggggcctcacgtgactgcagggctctggggaggtggggcacctgtagcctgacccccaccttgctgcttccaaagcttccttgcccag

SEQ ID NO: 1608 - DNA, 2512 bp, Homo sapiens
ggggcgggtccagtcccgggcgggccgtcgcgggagaggtgctaacggatggaagggttgtttctacctgttggccattgtggatgatgttgctatgcatattgggaaataacatctgctttgctgccgagctcagaggagaccccagacccctcccgcagccagagggctggagcctgctcagaggtgctttgaagatgccggaggccccgcctctgctgttggcagctgtgttgctgggcctggtgctgctggtggtgctgctgctgcttctgaggcactggggctggggcctgtsccttatcggctggaacgagttcatcctgcagcccatccacaacctgctcatgggtgacaccaaggagcagcgcatcctgaaccaygtgctgcagcatgcggagcccgggaackcacaragcgtgctggaggccattgacacctactgcgagcagaaggagtgggccatgaacgtgggcgacaagaaaggcaagatcktggacgccgtgattcaggagcaccagccctccgtgctgctggagctgggggcctactgtggctactcagctgtgcgcatggcccgcctgctgtcaccaggggcraggctsatcaccatcgagatcaaccccgactgtgycgccatcacccagcggatggtggatttcgctggcrtgaaggacaaggtcacccttgtggttggagcgtcccaggacatcatcccccagctgaagaagaagtatgatgtggacacactggacatggtcttcctcgaccactggaaggaccggtacctgccrgacacgcttctyttggaggaatgtggcctgctgcggaaggggacagtgctactggctgacaacgtgatctgcccaggtgcgccagacttcctagcacacgtgcgcgggagcagctgctttgagtgcacacactaccaatcgttcctggaatacagggaggtggtggacggcctggagaaggccatctacaagggcccaggcagcgaagcagggccctgactgccccccccggccccctgacatgctaacctctctgaactgcaacactggattgttyttttttaagactcaatcatgacttctttactaacactggctagctatattatcttatatactaatatcatgttttaaaaatataaaatagaaattaagaatctaaatatttagatataactcgacttagtacatccttctcaactgccattcccctgctgcccttgacttgggcaccaaacattcaaagctccccttgacggacgctaacgctaagggcggggcccctagctggctgggttctgggtggcacgcctggcccactggcctcccagccacagtggtgcagaggtcagccctcctgcagctaggccaggggcacctgttagccccatggggacgactgccrgcctgggaaacgaagaggagtcagccagcattcacacctttctgaccaagcaggcgctggggacaggtggaccccgcagcagcaccagcccctctgggccccatgtggcacagagtggaagcatctccttccctactccccactgggccttgcttacagaagaggcaatggctcagaccagctcccgcatccctgtagttgcctccctggcccatgagtgaggatgcagtgctggtttctgyccacctacacctagagctgtccccatctcctccaaggggtcagactgctagccacctcagaggctccaagggcccagttcccaggcccaggacaggaatcaaccctgtgctagctgagttcacctgcaccgagaccagcccctagccaagattctactcctgggctcaaggcctggctagcccccagccagcccactcctatggatagacagaccagtgagcccaagtggacaagtttggggccacccagggaccagaaacagagcctctgcaggacacagcagatgggcacctgggaccacctccacccagggccctgccccagacgcgcagaggcccgacacaagggagaagccagccacttgtgccagacctgagtggcagaaagcaaaaagttcctttgctgctttaatttttaaattttcttacaaaaatttaggtgtttaccaatagtcttattttggcttatttttaatgctttttctcagtgtttttcttctgtttctgagtcacgaacagcaggcactgaaagcagtcccccagccactgccgaaggtcagtcccggaggtgctgcccaggctccaggcagatgcggcagccccggccmcagccagcatgggctggagaaaggctctctactgcacaggggcctcacgtgactgcagggctctggggaggtggggcacctgtagcctgacccccaccttgctgcttccaaagcttccttgcccagcagcccagtcggcctcctcgggccttctgtcactcgctcacacacagcaccatgtcagtaaacagctaactcaggcctagggagttaggtaggatggggggagtggggtgggggggc

SEQ ID NO: 1609 - DNA, 1083 bp, Homo sapiens
atggagctgggaggggctgtcaccatctttctggcactccgcttgtcttgcctgctcatcctcattgcctggaaacgaatggataaggcaggaaagctgcccccaggtcctacaccaattcttttcctggggcacctgctgcaagttcgaactgatgctacgtttcagtctttcatgaagggagaaatacagccctgtgttcactgtgtacatgggtcccggccagtggtggttttatgtggacacgaagcagtgaaggaagccttgrtagaccaagcggatgagttcagtggccgtggagaactggcttcaataaagcaaaacttccaaggtcatggtgtagctctggccaatggagaacgatggaggattctccgacgcttctccytgaccatccttcgggacttcgggatgggaaagcagagcattaaggagcgaattcaggaggaggccagctacctactggaggagttccagaagaccaagattcacgaagagattaaccaggtgattggaccacaccggctcccaagggtggatgaccgggtcaagatgccctacacagatgtcgttatccatgaaatacagagactggtagacatcgtgcccatgggtgtcccccacaacatcatccaggacactcagtttcgaggttaccttctgcccaagggcacagacgtatttcccctgcttggctctgtcctcaaagaccccaaatacttccgctacccagatgccttctatccccagcactttctggatgagcagggccgcttcaagaagaatgaagcctttgtgcctttttcctctgtcacagtcatgagccctgatgtgcggatgaggcagctgaggcccagtggggtggtcagtccagacacccctggcacccccatgacctgtgcaggaaagcgcatctgcttgggcgaggccatggcccgcatggaactctttctctacttcacctccacccttcagaacttctctctakgctcgctggtgccacttgtggacatcgatatcacccccaagctctcaggctttggcaacatcaccccgacctatgagctctgccttgtggcccgc

SEQ ID NO: 1610 - DNA, 2850 bp, Homo sapiens
gtctgcgcaggaaggtgcgttgagatggcagttgccggagttggaggccgggcggcgacgaaattccatggaattatagttggtctactctgcaatgtctctatttaaaagcccaagtgaggacagacaagatgaacaacatgagagatatctgcaagccaacaacaaagaattcaacagtatttttggatatccgaacaatgccatcaagacctcaaaatatagtgtctttaatttcctgcccctgaacctatttgaacagttccagagacttgcaaatgcatatttcctcattttgctatttttacagttgattccccagatctcctccttgacatggtatacaactataacacccctgatggtggtgctgtccattaacagctgtgaaagatgccatcgatgacctgaaaagrcatcaaagtgacgatcgagtcaacaaccagcctgttctgctactggtgaatggcaagataaaggaggacaaatggatgaatgttcaagtgggagatataataaaactagaaaataatcagcctgtcatggcagatatactattactctctagcagtgagccatatagtctgacatacatagagacagcagacctggatggtgaaaccaacctgaaagtgaagcaggccatctcagttaccagtgacatggaagatcgcctggagcttctgtctacctttaatggagaagtgagatgtgaggctcccaataacaaattggacaaattctcaggaatactgacctataaggggaaaaactacttcctggaccatgacaagctgctactctgaggctgcaacatcaggaatacagattggtgctatggcttggtgatctacactgggccagataccaaattaatgcagaatagtggaaagtccacttttaaacgaacacagatagaccatctcatgaatgtccttgtactctgggcatcgtgtgttttgtcctagcagttgggcatggcatttggcagaacaagaaatgctaccacttccagatttttctgccatgggtaaaatatgtctcttcatcagctgtctctgccatcctcatattctggtcctacttcattattctcaataccatggtgcccatttccctctatgtcagtgttgaaataataagattgggcaacagtttatatatcaactgggatcggaagatgttttatgcaccaaggaacacaccagcacaggtgatacttatgrcaaggatggacagagggtgacggtctctgagacagtttatgagacctggtttatcacatgctacagtctggtctacacttccctccctgtcctgtgcatgagtctgtttgatcagtaacccataaggaagctcctaggcagcctggcagcagacctggtgaggggagaagcctctactctgatggagatgggaccttctatggagagaccctgagcctccctccttaccctcgggtgcttccaggatgtgaatgagacatggagcctccatttcccagagctgtatgagccaggccagcacaacctctatttcaacaagaaagaatttgtgaagtgtttaatgcatgggatctacagttccttcgtgttgttctttgtccccatgggggctctttacaatgcagaacgaaatgatgggaaggacatctccgactaccagtccttctccctggtggtgcagacctccttgatctgggtggtcgcaatgcaggtgtggtcaggaattctctgaaccagccgcaaatgctgctgagcattatcctcagtgtggtcctctgtatgttgcctgtgattgggcaccaatttcttaaaccactattctggcctatcagcatggacaaagtttttgacagaattcaagagtgcaggagacttccacagcagtccccagtcyggaccaaactgaaacactcaagcactcgacgttctgcctatgcattctcccataaacaaggctttggggccctyatcacttctggcaagatagtgaagcccaggatgtccaagagaaacaccctttttttgaaaaagatagaggccctagggaaattccaaaggaggcagtcagtgctcttcctccctcgtactcatgcaacttaggaagaattagagtccctgggaaaccagcataaacctgctccttcattctcactagggactaagcctcttaattgtccagaaggctattcccagaaaggcaaggaggggtaaggaaagagcccccagatatctgccagagttgcagcatttcaagaaaaagaaaaaaaaagcaacctcaggcctgcctcccaccatctcttgcaagttttaatccagacaagcatatgtagaggtagggggtgacaagagacagtatggggaagggaaaagaagatggaacctaagaattttactttgggccctatctcctatactcagagcaagcataaaccttcccagggccctacacaaacatattcccatcgaggcatcacataaaataaaatcaaccatttaaaaaggtataatttagtgacaattacttcccatttataagcaagggatgcatgagtgctacccatagaccggatatgggccatgtckttagcgtttcttgatctcgttagataaattatctgaaattttgaggagacttcagcagaaagaagcaggggatatgctgtcaaatgcctgtggatttatactaagaaagaaagaaggggcataaggaaaattttctttatctcgattttggaggtggttacatgggtatgtatttgtcaaaattcattgacctgtatacttaagatttatacattttattttatgtaaactatatctcaataaagttgagttttttaatgtc

SEQ ID NO: 1611 - DNA, 2498 bp, Homo sapiens
gggtctctagggcgtctgcgcaggaaggtgcgttgagatggcagttgccggagttggaggccgggcggcgacgaaattccatggaattatagttggtctactctgcaatgtctctatttaaaagcccaagtgaggacagacaagatgaacgtagaacatgagagatatctgcaagccaacaacaaagaattcaacagtatttttggatatccgaacaatgccatcaagacctcaaaatatagtgtctttaatttcctgcccctgaacctatttgaacagttccagagacttgcaaatgcatatttcctcattttgctatttttacagttgattccccagatctcctccttgacatggtatacaactataacacccctgatggtggtgctgtccattaacagctgtgaaagatgccatcgatgacctgaaaagrcatcaaagtgacgatcgagtcaacaaccagcctgttctgctactggtgaatggcaagataaaggaggacaaatggatgaatgttcaagtgggagatataataaaactagaaaataatcagcctgtcatggcagatatactattactctctagcagtgagccatatagtctgacatacatagagacagcagacctggatggtgaaaccaacctgaaagtgaagcaggccatctcagttaccagtgacatggaagatcgcctggagcttctgtctacctttaatggagaagtgagatgtgaggctcccaataacaaattggacaaattctcaggaatactgacctataaggggaaaaactacttcctggaccatgacaagctgctactctgaggctgcaacatcaggaatacagattggtgctatggcttggtgatctacactgggccagataccaaattaatgcagaatagtggaaagtccacttttaaacgaacacagatagaccatctcatgaatgtccttgtactctgggtaagttaaatacttttttttctttgtttctttacaaatagacatacttcccttcctttcacaggagaaatggtatttccagttcagaatttagctgtttgaaagtctcaagcacagcttcaagtgaagttaatctgaggtgaagcaaacagaaaattgtggaggttttgttggtgtgcaatggaggaacatggctcaagaaactaatcacagccaagtacctatgctttgttccactggctgcggattttatggaaaccctcgtacaaatggcacgtgttcagtatgctataaagaacatcttcaaagactgaatagtagtaatggtagaataagccaamctgcaacctctgaatctttaccagttcaatgcacagatggcagtgtcccagaagcccagtcaacattagactctacrtcttcatctatgcagccaagccctgtatcaaatcagtcacttttatcagaatctgtagcatcttctcaattggacagtacatctgtggacaagcagtacctgaaacagaagatctgcaggcttcrgtatcagacatggcacagcagccatctgaagagcaaagcaagtctcttgaaaaaccaaaacaaaaaaagaatctctgtttcatgtgcaggaagaaagtgggacttactaggtttgaatgcggtgtagaaatgtttactgtggtgtayactgttactcagatctacacaattgctcttaaaattacaaagctgatgccgctgagaaaatcagaaaagaaaatccagtagttgttggcgagaagatccaaaagatttgaactcctgctggaatacaaaattcttgatcatctgcaaactaaaaattgacttgaggtttttttttccctagtcattgggaaagtagagcagtgtatcttgcatgtcatcggatgaatagatttttgttttgattttgttttgaaaatgactctgaacatttatttccattgcaatttctgtggctgagaagacttaaactttacaagtattatccttataagatcattttaattttagttgagtgcagagggcttttataacaaacgtgcagaaattttggtggactgtgatttttccagtattaaatatgcatgcattaatcttgcagtttattttctcattgtgtacatatatattgcttttctttgcagcacgatttctcttttgataatgccctttggggcacaactagttatcggtaactgaatgtatcttaatcattatggctgcttctgttttttcattaacaaaggttattcatatgttagcatatagtttctttgcacccactatttatgtctgaatcatttgtcacgagagtgtgtgctgatgagattctaagtttgtgtgtttaaacttttttttgagcgagggaagaaaaagctgtatgcatttcattgctgtctacaggtttctttcagattatgttcatgggtttgtgtgtatacgatatgaagaatgatctgaagtaattgtgctgtatttatgtttattcaccagtctttgattaaat

SEQ ID NO: 1612 - DNA, 751 bp, Homo sapiens
aacaggaggaaggagcagcaccaaatccaagatggcggccagcaggaggctgatgaaggagcttgaagaaatccgcaaatgtgggatgaaaaacttcygtaacatccaggttgatgaagctaatttattgacttggcaagggcttattgttcctgacaaccctccatatgataagggggccttcagaatagaaatcaactttccagcagagtacccattcaaaccaccgaagatcacatttaaaacaaagatctatcacccaaacatcgacgaaaaggggcaggtctgtctgccagtaattagtgctgaaaactggaagccagcaaccaaaaccgaccaagtaatccagtccctcatagcactggtgaatgacccccagcccaagcacccgcttcgggctgacctagctgaagaatactctaaggaccgtaaaaaattctgtaagaatgctgaagagtttacaaagaaatatggggaaaagcgacctgtggactaaaatctgccacgattggttccagcaagtgtgagcagagaccccgtgcagtgcattcagacaccccgcaaagcaggactctgtggaaattgacacgtgccaccgcctggcgttcgcttgtggcagttactaactttctacagttttcttaatcaaaagtggtctaggtaacctgtaaagaaaggattaaaaatttaagatgttctagttctgctctctttgttttaaaaatcactgcttcaatctacttcaaaagaa

SEQ ID NO: 1613 - DNA, 901 bp, Homo sapiens
ggccgttaccacgatgcattctgggaaagaagcagcaccaaatccaagatggcggccagcaggaggctgatgaaggagcttgaagaaatccgcaaatgtggaatggaaaacttccgtaacatccaggttgatgaagctaatttattgacttggcaagggcttattgttcctgacaaccctccgtataataagggggccttcagaatcgaaatcaactttccagcagagtacccattcaaaccaccgaggatcacatttaaaacaaagatctatcacccgaacatcgacgaaaargggcaggtctgtctgccagtaattagtgcsgaaaactggaagccagcaaccaaaaccgaccaagtaatccagtccctcatagcactggtgaatgacccgcagcccgagcacccgcttcgggctgacctagctgaagaatactctaacgaccgtaaaaaattctgtaagaatgctgaagagtttacaaagaaatatggggaaaagcgacctgtggactaaaatgtgccacgattggttccagcaagtgtgagcagagaccccgtgcagtacattcagacaccccgcaaagcaggactctgtggaaattgatacgtgccaccgtctggcgttcgcttgcagcagttactaactttctacagttttcttaattaaaagtggtctaggtaacctgtaaagaaaggattaaaaatttaagatgttcttaaaaaaaaaaaaagtggccattaatagacggaactatacactggactagttgttgttttaaaaacataaaatctggctaccctaacgggataagagttcagacatcaggatgttgacacagtgtcctaccagaacccagggtttacttagagaacataaaagaaaagagattgtatgctatatt

SEQ ID NO: 1614 - DNA, 528 bp, Homo sapiens
atggagtccatccccctggctgctggctgcagctggaggggaggctggttcctgactgggattgggaaggatgatggatgmttgcttttcggccaagtgtctttggttgaaatggatggaatggtgctgacgcagactagagccatcctcaactatcttgytgagaagtacaacttctatgggaaggacctgagggaaaaagtcagaggcaaccactatcagaaatttgatatcctggtagatgatctggttttctttattcccaacttttcttctatggttcagaagattttgaaagaccatggagaggattttcttgttggcaacaaattcagctgggcagacatacagctgttagaagctattttaatggtggaagaactcaaagcttctgttctttctgacttccctctgctaaaggcatttaaaayaagaatcagcaacatccctacaattaagaagttcctgcagcctgggagtcagaggaagccacccccgatacccactatgttgaacttgccaggaaga

SEQ ID NO: 1615 - DNA, 606 bp, Homo sapiens
atggcaaaagacatcaagaccaaaatcaagaactacaggactgcyccttttgacaggcgcttccccaaccagaaccagaccaggaatggctggcagaaatacctggacctccaccacttcaagaaggcaatgactgctaaaggagggggtgatgtctctgtttgtgaatggtaccagcatgtgtacaagtctctctgccctataccctgggcctcagcctgggatgaccatgggcagaaggcacatttcttgggaagatctgaactggctccaccccacctctgtccttctcccaggatggtaaagaagaacctgggtatatggtgatccctaccctgggaccctgaatcatgtcttaataataaaaattcactggaaaagtgagagaggcggggaagaaaactgcagcagcagggagtaaaagaacctcacttagatcattgtgacaggcctgggaggttgttgcccaatatcctctctcactccttcttcccagtaaaagaatacataagtkttagctaaatacatatcagaaggaagactatgttttccagcctcccttgcagctaagtggggtcatgtgactagttcaagccaaaggacatg

SEQ ID NO: 1616 - DNA, 2212 bp, Homo sapiens
gcttccggcgcggccagggccyaacttccggcgtccgtcgggcagcagcggggctgtctatcccggctgaggacccgcggccagtgcgggtggctggctttgccattagcgggggcctttcctgaggacggcgtacggagtgtggggaatgaaggatggcagcatgccgtgcattaaaasctgttttggtagatctcagtggcacacttcacattgaagatgcagctgtgccaggcgcacaggaagctcttaaaaggttacgtggtgcttctgtaatcattaggtttgtgaccaatacaaccaaagagagcaagcaagacctgttagaaaggttgagaaaattggaatttgatatctctgaagatgaaatattcacatctctgactgcagccagaagtttactagagcrgaaacaagtcagrcccatgctgctagttgatgatcgggcactacctgatttcaaaggaatacaaacaagtgatcctaatgctgtggtcatgggattggcaccagaacattttcattatcaaattctgaatcaagcattccggttactcctggatggagcacctctgatagcaatccacaaagccaggtattacaagaggaaagatggcttagccctggggcctggaccatttgtgactgctttagagtatgccacagataccaaagccacagtcgtggggaaaccagagaagacgttctttttggaagcattgcrgggcactggctgtgaacctgaggaggctgtcatgataggagatgattgcagggatgatgttggtggggctcaagatgtcggcatgctgggcatcttagtaaagactgggaaatatcgagcatcagatgaagaaaaaattaatccacctccttacttaacttgtgagagtttccctcatgctgtggaccacattctgcagcacctattgtgaagcartgtgtgcatctgaagcaacttgaaatgcagcttcttattgtctggaatgaatcccttaccaactcagtgccagcatcggtagacaccagtcagtgctgatcgctttttaaccctcttttgttgtgcattaattagaaagaaaggtattgaattgcggctagccagtaagccttgctaatctcttttattttgtaactgaagatgagacccaaagaaagggaaagctgagattttgtgccattccttttaaaatattcatcaggttaggtggggctgtgggggaaaagctacyacagggaagagtgttctctgctgtctcttcactggaaaacagggaggggggatttcagactgtgaagaaagttgaatggtggtttttaaattataaagtaatgtattaaaaggtgcattaggctgtagttctaatattgagttcaactgtgaaatccatcagatgtgccaaatggagaagacagaaagcaacaaagtgaattgttctttagcccaagtggtacagtgaatttgctttaacagatgttgaaaactaaattttctactgtattcccagcacgggtgacttctttttctcttcattagccagagatgactaatttaaatttagaaccagattttaatttaaattaatatttccattaataacctattcattgcagatacctattatactgtgtaacagttgttttggaaattttatgtaaaattaaaactatcagtattttacagatgttttaattaracattgttattaacaggaacagtgcagaaactagaatcaagccttataatatcttatagaccatgcatttttgaagttagtgtccactagggtcctattaactgtacatttgcaagatttcattatttttgcctctgacactatgggaaaaattttttagaagctattgggacagattcaagcttttatgcacttggttactacagctgtaaaatgaaatctcgtcttgtagcatggattattcttctcatgttaaacccmccaaaataaaggggactaaataggtaatgattttcctagtgcatttgcatactgtgataatcctgggccttgcaatagttctacagggctcttgggcattgaattattaggatgtaattgtacatcattgtagtgttcaccttattgaagctcactctgatgttaatgagcttcgggttttgatgcttgtttagagatcagcagtcttggatgggagggaacaaagctaaataaatgttagtttggtgagcact

SEQ ID NO: 1617 - DNA, 1038 bp, Homo sapiens
atggccacccgatgtgcattcccgattccttttggtttgaagtccaatatggcaattctcaaggatcagctgattcataatcttctaaaggaagaacagaccccccagaatatgattatagttgttgaggttggtgctgttcacatggcctgtgccatcagtatcttagtgaaggacttggcagatgaacttgctcttgttgatgtcatggaggacaaattgaagggagagatgatgaatctccaacatggcagccttttccttggaatgccaaagattgtcctggcaaagactataatgtaactgcaaattccaagctggtcattatcacagctggggcacatcagcaagaaggagaaagctctcttaattgggtccagtgtaatgtaaacrtctttaaattcatcatttctaatgttgtaaaatacagcccaactgcaagttgcttattgttttaaatccagtggatatcttgacctrtgtggcttggaagataagtggctttcccaaaagccgtgttattggaagtggctgcagtctggattcagcccaattccgttacctgatggaggaaaggctgggtgttcacccattaagctgtcataggtgagtycttggggaacatggatactctactgtgtctgtatggagtggagtgaacgttgctggtgtctccctgaggactctgcatccagatttagggactgatacagayaaggaatggtggaaagaggttcaaaagcaggtggtcaagaatgcttatgaggtgattaaactgaaaggctacacttcctgggcctttggactctctgtggcagatttggcagagagtatgatgaatcttaggtgggacacccaatttccatcatgattaagggtctctatggaataaaggatgatgtcttccttagtgttccttgcatcttgggacagaatggaatctcagaccttgtgaaggtgactctgactcctgaggaagaggcctgtttgaataagagtgcagatactttgggggatccaaaaagagctgcaatttta

SEQ ID NO: 1618 - DNA, 1651 bp, Homo sapiens
gccgagatggggctgccccagccagggctgtggctgaagaggctytgggtgctcttggaggtggctgtgcatgtggtcgtgggtaaagtgcttctgatattgtttccagacagagtcaagcggaacatcctggccatgggcgagaagacgggtaataggccactggtgctgaattttggaagttgtacctgaccttcatttatgttcaaatttgaccagttcaagaggcttattgaagactttagttccatagcagattttcttgtcatttacattgaagaagcacatgcatcagatggctgggcttttaagaacaacatggacatcagaaatcaccagaaccttcaggatcgcctgcaggcagcccatctactgctggccaggagcccccagtgccctgtggtggtggacaccatgcagaaccagagcagccagctctacgcagcactgcctgagaggctctacataatccaggagggcaggatcctctacaagggtaaatctggcccttggaactacaacccagaggaagttcgtgctgttctggaaaagctccacagttaatctggacagatacctcaattctaggtgaycaacgggagggcttctcaaggcttagctctccctgagacccagctggcttttacccttgacctgtgtccctagctgaatcactagctcagatttttctgatctaagcaaacaactcccagctgaggaatgcaggccacagcacccaatcaagacaaattgttattatcagaaaatgaagcaacacttgagctgttcaggccagttccctgttgaagaaacagttccctgttgaagaaagtagagcctgacactgctcccactttggagaccacattccctgcacacggtctttgagagagcagttgcacwctacaggcacacttctgaggtacggtatctctctccagccactctgataccaagtaattcaagctggcattccttctattagggaaattcattttacccaatttgcatttatggaattgatcatttaagacactaaattagtttttagaaccaattatgggaagaattccagttgttaggaagagatgaggagttggaagaggagggattagaaacaggaggaggcagtcatcctctccttgccaaaagatttaaacctgtccacattggtggtgatgatgggtgagtttccatggtaacacatccctaattttaccagggaagaggagagtactcactttaccatctttgaatatatttcatagaaatctagctctctgtaccctgaaatcttccactagcctcacttttcaacagagtcatctagaagggagggttggcttcccaaaagcataaccttgaccaaaccaaacaataggcaccagcaatgctgtcattcagttatgcagaagctcatttgtgaaattctgtttctctgatttcttcgcaagtctcttaatggtcatttgtgttagattacatcaaactgatggatagccattggtattcatctattttaactctgtgtctttacatatttgtttatgatggccacagcctaaagtacacacggctgtgacttgattcaaaagaaaatgttataagatgcagtaaactaataacagaattattaaaatatatcaggcta

SEQ ID NO: 1619 - DNA, 1861 bp, Homo sapiens
agagcttactctggctttgccgagatggggctgccccagccagggctgtggctgaagaggctytgggtgctcttggaggtggctgtgcatgtggtcgtgggtaaagtgcttctgatattgtttccagacagagtcaagcggaacatcctggccatgggcgagaagacgggtatgaccaggaacccccatttcagccacgacaactggataccaacctttttcagcacccagtatttctggttcgtcttgaaggtccgttggcagcgactagaggacacgactgagctagggggtctggccccaaactgcccrgtggtccgcctctcaggacagaggtgcaacatttgggagtttatgcaaggtaataggccactggtgctgaattttggaagttgtacctgaccttcatttatgttcaaatttgaccagttcaagaggcttattgaagactttagttccatagcagattttcttgtcatttacattgaagaagcacatgcatcagatggctgggcttttaagaacaacatggacatcagaaatcaccagaaccttcaggatcgcctgcaggcagcccatctactgctggccaggagcccccagtgccctgtggtggtggacaccatgcagaaccagagcagccagctctacgcagcactgcctgagaggctctacataatccaggagggcaggatcctctacaagggtaaatctggcccttggaactacaacccagaggaagttcgtgctgttctggaaaagctccacagttaatctggacagatacctcaattctaggtgaycaacgggagggcttctcaaggcttagctctccctgagacccagctggcttttacccttgacctgtgtccctagctgaatcactagctcagatttttctgatctaagcaaacaactcccagctgaggaatgcaggccacagcacccaatcaagacaaattgttattatcagaaaatgaagcaacacttgagctgttcaggccagttccctgttgaagaaacagttccctgttgaagaaagtagagcctgacactgctcccactttggagaccacattccctgcacacggtctttgagagagcagttgcacwctacaggcacacttctgaggtacggtatctctctccagccactctgataccaagtaattcaagctggcattccttctattagggaaattcattttacccaatttgcatttatggaattgatcatttaagacactaaattagtttttagaaccaattatgggaagaattccagttgttaggaagagatgaggagttggaagaggagggattagaaacaggaggaggcagtcatcctctccttgccaaaagatttaaacctgtccacattggtggtgatgatgggtgagtttccatggtaacacatccctaattttaccagggaagaggagagtactcactttaccatctttgaatatatttcatagaaatctagctctctgtaccctgaaatcttccactagcctcacttttcaacagagtcatctagaagggagggttggcttcccaaaagcataaccttgaccaaaccaaacaataggcaccagcaatgctgtcattcagttatgcagaagctcatttgtgaaattctgtttctctgatttcttcgcaagtctcttaatggtcatttgtgttagattacatcaaactgatggatagccattggtattcatctattttaactctgtgtctttacatatttgtttatgatggccacagcctaaagtacacacggctgtgacttgattcaaaagaaaatgttataagatgcagtaaactaataacagaattattaaaatatatcaggcta

SEQ ID NO: 1620 - DNA, 1552 bp, Homo sapiens
agagcttactctggctttgccgagatggggctgccccagccagggctgtggctgaagaggctytgggtgctcttggaggtggctgtgcatgtggtcgtgggtaaagtgcttctgatattgtttccagacagagtcaagcggaacatcctggccatgggcgagaagacgggtatgaccaggaacccccatttcagccacgacaactggataccaacctttttcagcacccagtatttctggttcgtcttgaaggtccgttggcagcgactagaggacacgactgagctagggggtctggccccaaactgcccrgtggtccgcctctcaggacagaggtgcaacatttgggagtttatgcaaggtaataggccactggtgctgaattttggaagttgtacctgaccttcatttatgttcaaatttgaccagttcaagaggcttattgaagactttagttccatagcagattttcttgtcatttacattgaagaagcacatgcatcagatggctgggcttttaagaacaacatggacatcagaaatcaccagaaccttcaggatcgcctgcaggcagcccatctactgctggccaggagcccccagtgccctgtggtggtggacaccatgcagaaccagagcagccagctctacgcagcactgcctgagaggctctacataatccaggagggcaggatcctctacaagggtaaatctggcccttggaactacaacccagaggaagttcgtgctgttgggagggcttctcaaggcttagctctccctgagacccagctggcttttacccttgacctgtgtccctagctgaatcactagctcagatttttctgatctaagcaaacaactcccagctgaggaatgcaggccacagcacccaatcaagacaaattgttattatcagaaaatgaagcaacacttgagctgttcaggccagttccctgttgaagaaacagttccctgttgaagaaagtagagcctgacactgctcccactttggagaccacattccctgcacacggtctttgagagagcagttgcacwctacaggcacacttctgaggtacggtatctctctccagccactctgataccaagtaattcaagctggcattccttctattagggaaattcattttacccaatttgcatttatggaattgatcatttaagacactaaattagtttttagaaccaattatgggaagaattccagttgttaggaagagatgaggagttggaagaggagggattagaaacaggaggaggcagtcatcctctccttgccaaaagatttaaacctgtccacattggtggtgatgatgggtgagtttccatggtaacacatccctaattttaccagggaagaggagagtactcactttaccatctttgaatatatttcatagaaatctagctctctgtaccctgaaatcttccactagcctcacttttcaacagagtcatctagaagggagggttggcttcccaaaagcataaccttgaccaaaccaaacaataggcaccagcaatgctg

SEQ ID NO: 1621 - DNA, 1051 bp, Homo sapiens
taaaacttccttacatagcacttccgccagggaggtcccccatctgcagtcatgagtcatttcaagtttatcgatattgttatcaacttgactgacaccatgttcagaggaatttataggggggttcaaaagcatcaagatgatttacaggatgtaacagggagagctgtcgagattggtgttaaaaagtttatgattacaggtggaaatctacaagacagtaaagatgcactgcatttggcacaaacaaatcatatgtttttcagtacagctggatgtcatcctacaagatgtggtaaatttgaaaakaataaccctgatctttacttaaaggagttgctaaatcttgatgaaaacaataaagggaaagttgtggcagtaggagaatgtggacttgattttgactgactgcacttttgtcccaaagatactcaactcaaatactgtgaaaaacagttwgaactgtcagaacaaacaaaattaccaatgtttcttcattgtcgaaactcacatgctgaatttttggacataattaaaagaaatagagatcggtgtgtagagggagtggtgcattcatttgatggtaccaaagaagcagcagctgctttgattgacttggatctttatataggatttaatggttgctcactgaaaactgaaactaatttggaagttttgaagtcaattcctagtgaaaaattaatgattgagacagatgcaccttggtgtggagtcaaaagtacacatgctggatcaaaatatataaaaactgcatttcctaccaaaaagaagtgggaaagtgggcactgcttaaaagacagaaatgaaccctgccatataattcaaatattggagataatgtcagcagtgagagacgaggatccactggaatcagccaatacactatataacaatactattaaagtattttttcctggaatataattggtatatgtcttccactttccatcatgtatgtaaaatttcatagtaaaacttaccgatagtttcartaaagaaattatctgcaaaaaaaaaaaaaacccaaaca

SEQ ID NO: 1622 - DNA, 596 bp, Homo sapiens
gacatcaccatcaacagcaagcccttgggccacgtctccttcaagctaattattccagggtttatgtgtcagggtggtgacttcacacaccataatggcactggtgtcaagtccatctatggggagaaatttgatgatgagaacttcattctgaagcatacaggtcctggcatcttttccatggcaaatgctggacccaacacaaatggttcccagttttgcaactgcactgccaagactgcgtggttggatggcatgcatgtggtccttggcaaagtgaaagaaggcatgaatattgcggaggctatggagcgctttgggtccaggaatggcaagaccagcaagaagatcaccattgccgactgtggacaactctactaagtttgacttgtgttttatcttaaccaccagatcattccttttgtagctcaggagagcaccctccacctcatttgctcacagtagcctctaatctttgtgctatctctcagttccctttgggttccatgtttgccttattctcctccatgcctagctgkatttcagagttaagtttatgattatgagataaaaactaaataacaattgcaaaaaaa

SEQ ID NO: 1623 - DNA, 731 bp, Homo sapiens
gggtattcacaggacaaatgatgcgaaggttggtacattagtgggggaagacaaatatggaaacaaatactatgaagacaacaagcaattttttgatgaagaaactgaggcccaaggaagtatctttaccaaagagacttaatcatgtaattaatggcagaacctggggccgtcaccgatgggttgtatatactactgaaatgaatggcaaaaacacattctgggatgtggatggaagcatggtgcctcctgaatggcatcgttggcttcacagtatgactgatgatcctccaacaacaaaaccacttactgctcgtaaattcatttggacgaaccataaattcaacgtgactggcaccccagaacaatatgtaccttattctaccactagaaagaagattcaggagtggatcccaccttcaacaccttacaagtaaagacaatgaagaacagttgaaacrtgcaaaatatggagcttttcatgtaattactcttttactgtttaccattcactataattcacaattaaaattgtgtgactaaacaatgtctttcgtgcctttttgcccttcactttgttgttttccaactgcaaaatagatgcttccaaacatggtgattgaagtagacttgtattggggtagctgcctggtttacagttcccttttctggaaacagcctctgtggtcctgtttgtgctttgggaccgtaccttactaccatagctcatt

SEQ ID NO: 1624 - DNA, 822 bp, Homo sapiens
ttctgggcgtgggcttcctgcggctgagtggcagcttccatccggtgggttttgctcggcgcacccgggaggcggggccagcgaggcaagatggagttagtgcaggtcctgaaacgcgggctgcagcagatcaccggccacggcggtctccgaggctatctacgggtttttttcaggacaaatgatgcgaaggttggtacattagtgggggaagacaaatatggaaacaaatactatgaagacaacaagcaattttttggccgtcaccgatgggttgtatatactactgaaatgaatggcaaaaacacattctgggatgtggatggaagcatggtgcctcctgaatggcatcgttggcttcacagtatgactgatgatcctccaacaacaaaaccacttactgctcgtaaattcatttggacgaaccataaattcaacgtgactggcaccccagaacaatatgtaccttattctaccactagaaagaagattcaggagtggatcccaccttcaacaccttacaagtaaagacaatgaagaacagttgaaacrtgcaaaatatggagcttttcatgtaattactcttttactgtttaccattcactataattcacaattaaaattgtgtgactaaacaatgtctttcgtgcctttttgcccttcactttgttgttttccaactgcaaaatagatgcttccaaacatggtgattgaagtagacttgtattggggtagctgcctggtttacagttcccttttctggaaacagcctctgtggtcctgtttgtgctttgggaccgtaccttactaccatagctcatt

SEQ ID NO: 1625 - DNA, 6238 bp, Homo sapiens
gctggacggagctggcaggaggggccttgccagcttccgccgccgcgtcgtttcaggacccggacggcggattcgcgctgcctccgccgccgcggggcagccggggggcagggagcccagcgaggggcgcgcgtgggcgcggccatgggactgcgccggatccggtgacagcagggagccaagcggcccgggccctgagcgcgtcttctccggggggcctcgccctcctgctcgcggggccggggctcctgctccggttgctggcgctgttgctggctgtggcggcggccaggatcatgtcgggtcgccgctgcgccggcgggggagcggcctgcgcgagcgccgcggccgaggccgtggagccggccgcccgagagctgttcgaggcgtgccgcaacggggacgtggaacgagtcaagaggctggtgacgcctgagaaggtgaacagccgcgacacggcgggcaggaaatccaccccgctgcacttcgccgcaggttttgggcggaaagacgtagttgaatatttgcttcagaatggtgcaaatgtccaagcacgtgatgatgggggccttattcctcttcataatgcatgctcttttggtcatgctgaagtagtcaatctccttttgcgacatggtgcagaccccaatgctcgagataattggaattatactcctctccatgaagctgcaattaaaggaaagattgatgtttgcattgtgctgttacagcatggagctgagccaaccatccgaaatacagatggaaggacagcattggatttagcagatccatctgccaaagcagtgcttactggtgaatataagaaagatgaactcttagaaagtgccaggagtggcaatgaagaaaaaatgatggctctactcacaccattaaatgtcaactgccacgcaagtgatggcagaaagtcaactccattacatttggcagcaggatataacagagtaaagattgtacagctgttactgcaacatggagctgatgtccatgctaaagataaaggtgatctggtaccattacacaatgcctgttcttatggtcattatgaagtaactgaacttttggtcaagcatggtgcctgtgtaaatgcaatggacttgtggcaattcactcctcttcatgaggcagcttctaagaacagggttgaagtatgttctcttctcttaagttatggtgcagacccaacactgctcaattgtcacaataaaagtgctatagacttggctcccacaccacagttaaaagaaagattagcatatgaatttaaaggccactcgttgctgcaagctgcacgagaagctgatgttactcgaatcaaaaaacatctctctctggaaatggtgaatttcaagcatcctcaaacacatgaaacagcattgcattgtgctgctgcatctccatatcccaaaagaaagcaaatatgtgaactgttgctaagaaaaggagcaaacatcaatgaaaagactaaagaattcttgactcctctgcacgtggcatctgagaaagctcataatgatgttgttgaagtagtggtgaaacatgaagcaaaggttaatgctctggataatcttggtcagacttctctacacagagctgcatattgtggtcatctacaaacctgccgcctactcctgagctatgggtgtgatcctaacattatatcccttcagggctttactgctttacagatgggaaatgaaaatgtacagcaactcctccaagagggtatctcattaggtaattcagaggcagacagacaattgctggaagctgcaaaggctggagatgtcgaaactgtaaaaaaactgtgtactgttcagagtgtcaactgcagagacattgaagggcgtcagtctacaccacttcattttgcagctgggtataacagagtgtccgtggtggaatatctgctacagcatggagctgatgtgcatgctaaagataaaggaggccttgtacctttgcacaatgcatgttcttatggacattatgaagttgcagaacttcttgttaaacatggagcagtagttaatgtagctgatttatggaaatttacacctttacatgaagcagcagcaaaaggaaaatatgaaatttgcaaacttctgctccagcatggtgcagaccctacaaaaaaaaacagggatggaaatactcctttggatcttgttaaagatggagatacagatattcaagatctgcttaggggagatgcagctttgctagatgctgccaagaagggttgtttagccagagtgaagaagttgtcttctcctgataatgtaaattgccgcgatacccaaggcagacattcaacacctttacatttagcagctggttataataatttagaagttgcagagtatttgttacaacacggagctgatgtgaatgcccaagacaaaggaggacttattcctttacataatgcagcatcttacgggcatgtagatgtagcagctctactaataaagtataatgcatgtgtcaatgccacggacaaatgggctttcacacctttgcacgaagcagcccaaaagggacgaacacagctttgtgctttgttgctagcccatggagctgacccgactcttaaaaatcaggaaggacaaacacctttagatttagtttcagcrgatgatgtcagcgctcttctgacagcagccatgcccccatctgctctgccctcttgttacaagcctcaagtgctcaatggtgtgagaagcccaggagccactgcagatgctctctcttcaggtccatctagcccatcaagcctttctgcagccagcagtcttgacaacttatctgggagtttttcagaactgtcttcagtagttagttcaagtggaacagagggtgcttccagtttggagaaaaaggaggttccaggagtagattttagcataactcaattcgtaaggaatcttggacttgagcacctaatggatatatttgagagagaacagatcactttggatgtattagttgagatggggcacaaggagctgaaggagattggaatcaatgcttatggacataggcacaaactaattaaaggagtcgagagacttatctccggacaacaaggtcttaacccatatttaactttgaacacctctggtagtggaacaattcttatagatctgtctcctgatgataaagagtttcagtctgtggaggaagagatgcaaagtacagttcgagagcacagagatggaggtcatgcaggtggaatcttcaacagatacaatattctcaagattcagaaggtttgtaacaagaaactatgggaaagatacactcaccggagaaaagaagtttctgaagaaaaccacaaccatgccaatgaacgaatgctatttcatgggtctccttttgtgaatgcaattatccacaaaggctttgatgaaaggcatgcgtacataggtggtatgtttggagctggcatttattttgctgaaaactcttccaaaagcaatcaatatgtatatggaattggaggaggtactgggtgtccagttcacaaagacagatcttgttacatttgccacaggcagctgctcttttgccgggtaaccttgggaaagtctttcctgcagttcagtgcaatgaaaatggcacattctcctccaggtcatcactcagtcactggtaggcccagtgtaaatggcctagcattagctgaatatgttatttacagaggagaacaggcttatcctgagtatttaattacttaccagattatgaggcctgaaggtatggtcgatggataaatagttattttaagaaactaattccactgaacctaaaatcatcaaagcagcagtggcctctacgttttactcctttgctgaaaaaaaatcatcttgcccacaggcctgtggcaaaaggataaaaatgtgaacgaagtttaacattctgacttgataaagctttaataatgtacagtgttttctaaatatttcctgttttttcagcactttaacagatgccattccaggttaaactgggttgtctgtactaaattataaacagagttaacttgaaccttttatatgttatgcattgattctaacaaactgtaatgccctcaacagaactaattttactaatacaatactgtgttctttaaaacacagcatttacactgaatacaatttcatttgtaaaactgtaaataagagcttttgtactagcccagtatttatttacattgctttgtaatataaatctgttttagaactgcagcggtttacaaaattttttcatatgtattgttcatctatacttcatcttacatcgtcatgattgagtgatctttacatttgattccagaggctatgttcagttgttagttgggaaagattgagttatcagatttaatttgccgatgggagcctttatctgtcattagaaatctttctcatttaagaacttatgaatatgctgaagatttaatttgtgatacctttgtatgtatgagacacattccaaagagctctaactatgataggtcctgattactaaagaagcttctttactggcctcaatttctagctttcatgttggaaaattttctgcagtccttctgtgaaaattagagcaaagtgctcctgttttttagagaaactaaatcttgctgttgaacaattattgtgttcttttcatggaacataagtaggatgttacatttccagggtgggaagggtaatcctaaatcatttcccaatctattctaattaccttaaatctaaaggggaaaaaaaaaatcacaaacaggactgggtagttttttatcctaagtatattttttcctgttctttttacttggttttattgctgtatttatagccaatctatacatcatgggtaaacttaacccagaactataaaatgtagttgtctcagtcccctccaggcctcctgaatgggcaagtgcagtgaaacaggtgcttcttgctcctgggttttctctccatgatgttatgcccaattggaaatatgctgtcagtttgtgcaccatatggtgaccasgcctgtgctcagtttggcagctatagaaggaaatgctgtcccataaaatgccattcctattttctaatataaaactcttttccaggaagcatgcttaagcatcttgttacagagacatacatccattatggcttggcaatctcttttatttgttgactctagctcccttcaaagtcgaggaaagatctttactcacttaatgaggacattccccatcactgtctgtaccagttcacctttattttacgttttattcagtctgtaaattaactggccctttgcagtaacttgtacataaagtgctagaaaatcatgttccttgtcctgagtaagagttaatcagagtaaatgcatttctggagttgtttctgtgatgtaaattatgatcattatttaagaagtcaaatcctgatcttgaagtgctttttatacagctctctaataattacaaatatccgaaagtcatttcttggaacacaagtggagtatgccaaattttatatgaatttttcagattatctaagcttccaggttttataattagaagataatgagagaattaatggggtttatatttacattatctctcaactatgtagcccatattactcaccctatgagtgaatctggaattgcttttcatgtgaaatcattrtggtctatgagtttacaatactgcaaactgtgttattttatctaatccattgcttaatgagtgtgtttttccatgaatgaatataccgtggttcatatgttagcatggcagcattttcagatagctttttgtttgttgggaagttggggttttggggggagggggagtattagtacgttgcatgaaatagcttactttataatgatggaattgctttttcttttgtcttgtgatttttttttttgaagtgaaatttaactttttgtgcaagtagtactattatacccatcttcagtgtcttacttgtactgtatcacattccataccctcatttaattcttaataaaactgttcacttgtttttctgggtagcatggtaattactggaatagtataaatgtgttgaatggtctttgagaaaatgaattaagattacaataaaccacaattgcaggaaaacaatgtagttctgagtctaatagtgataaagaatgcagtttgaagtttgaaatattgaatattgta

SEQ ID NO: 1626 - DNA, 732 bp, Homo sapiens
atgttgagaaaggcaagaagagtttttgttcaaaagtgtgcccagtgccacaccgtggaaaagggaggcaagcacaagactgggcctaatctccatggtctcttcgggcagaagacaggtcaggccattgtattcacttacacagatgccaataagaacaaaggcatcacctggggagaggatacactgatggagtatttggagagtcccaagaagtacatccctagartaaaaatgatctttgccggcattaagaagaaggcagaaagggcagacttgttagcttgtcttaaaaaagcyactaaatgagtaataatttgccactgccttatttattacaaaacagaaatgtctcatgacttttttatgtataccatactttaatagatttcatacaccagaattcaggtcatgaatgactgacagaatattttgttgggcagtcctgatttaaaactaagactagcttctggttaaatgaatatgttcagtttttgaattttaatagtaattcgaattcagtaaatgctatcactgtttaccccttctaaagctatgattagacttcattaataattttcaccttttcacaaagatggtgaatgccatcttaaaacttactggtgattggttttatatttagatgtatgtaactggttatgtgaatatatttaaatactggggaaattccttcactgtctcagaaccaagcaagattcacctgtgttttgt

SEQ ID NO: 1627 - DNA, 427 bp, Homo sapiens
gtggcagttgtggcggttgctggtcagtaacagccaagatgctgtggaatctgctggctcttcatcagattgggcagaggaccataagcactgcttcccacaggcattttaaaaataaagttccagagaaacaaaaactgttccaggaggatgatggaattccactgtatctaaagggtgggatakctgatgccctccttcatagagccaccatgattcttacagttggtggaacagcatatgccatatatcagctggctgtggcttcatttcccaataaaggagtgacttcaatcatcccagcaatcacttggttcacattcattcagctctctatggaccagaaatctgataaatgagttcktcyttggggatcaatatttattgacttgtagtaactgccrccaataaagcagtctttaccatg

SEQ ID NO: 1628 - DNA, 650 bp, Homo sapiens
atgggttttagtgagagctggaagaagtacctcagtgaagttcaggaaacagtattttataaaggtaatgagatttgtgcagaataaagcagacattacattgtttattcgcccccacaccaagttttcacctagacccataagagatgggaaggttctaattcccagacaggatccatatcatggacccagtcaagctcacaggctctgctttcatgtgcaaagacatgttccacctccgcccagctcagaaagtgtttaaaaattgttgtctgcagacatagatggtttgctcaccttcagcatggagatttatctgggtgggccaaacaaggggttcttttactcaatgctgtctcactattctggcccatcaagccagttctcataaggagagaggctgggagcaactcactgacrcagttgtgtcctggctaaatcagaactcgatctggcttgtcttcttgctctggggctcttatgctcagaaraagggcagtgccatggataggaaacagcaccacattctgcagctggctcatccctccctgttgtctgcatatagagacccgactgcatgtagacacttttctaaaaccaatgagctgtctcagaagtccgacaagaagtccatcgactggaaggagctg

SEQ ID NO: 1629 - DNA, 613 bp, Homo sapiens
aagtagaaagagcagaagggaaacatcatgggaagaaagactattttgtttctgattgcaggggtccttggggcatattatgtttatactcctctctcrgataatattgaggaactctggtgactggtgtggatagctacacctgtgaaaatggtaacaaatttggctttgttagttgaactcttgggaatcaatcatttcatgaatactgcaacgttctttgtgagctttcaagaagtcccacctacatctgatgaaaatgtcaccatgatagagacaactttcagtaacattcctgyccgtgtatacatgccaacactaaagtcagagatactaagaacgggcttagtttatattcatggtggtggttggtgtatgggggatgctggtatgtgttccatattaaaagttttagtttatcatataacatacattttactgaaatgttgactccatcatatcaagacaaacatgttagataacaaaacacttcagctgtccaaaatttatttctttggagctatgtakatttaaaagaactattttaaatctcattctgaaagagggcataataaataccaaaagctgtagcaaatctcaggtaagaagagaa

SEQ ID NO: 1630 - DNA, 603 bp, Homo sapiens
aagagcagaagggaaacatcatgggaagaaagactattttgtttctgattgcaggggtccttggggcatattatgtttatactcctctctcrgataatattgaggaactctggtgactggtgtggatagctacacctgtgaaaatggtaacaaatttgctttgtttaattatgactttctgtcaagatgaacagctgatagacttratgctgttgttgtatcaaccaactcatagaagacccagatgtcaagatcaaactcaagcttcagtctttaatatatcctgcccttcagacgcttgacatggatttactatcacatcagaaaaaactagactctctagttctgtccaaaccattcatggtcaggttctgtagggaatactttaccacagacagatcacttgaaaaagtcatgttcttcaacatgtaccaatggaatcaaaccatctgttcagatttgttaattggagttccttgctcactgagaagtttaagaaaggycacttttgttatattccaactcgtggtagttctgagctagctaaaaaatatccagggttcctagatgtgagggmagcccctttgttggccaatgacaagt

SEQ ID NO: 1631 - DNA, 675 bp, Homo sapiens
gaagaaagactattttgtttctgattgcaggggtccttggggcatattatgtttatactcctctctcrgataatattgaggaactctggtgactggtgtggatagctacacctgtgaaaatggtaacaaatttgctcatagaagacccagatgtcaagatcaaactcaagcttcagtctttaatatatcctgcccttcagacgcttgacatggatttactatcacatcagaaaaaactagactctctagttctgtccaaaccattcatggtcaggttctgtagggaatactttaccacagacagatcacttgaaaaagtcatgttcttcaacatgtaccaatggaatcaaaccatctgttcagatttgttaattggagttccttgctcactgagaagtttaagaaaggycacttttgttatattccaactcgtggtagttctgagctagctaaaaaatatccagggttcctagatgtgagggmagcccctttgttggccaatgacaagttacatggtttacccctgtcctatatcatcacctgtcaatatgacatcttaagagatgatggactcatgtacatcacgcgactktagaactctggagttcaagtgacacataaccacagtgaagatggattccatggagcactttcctataatgggcttaaaattga

SEQ ID NO: 1632 - DNA, 891 bp, Homo sapiens
cagtgctaaaaggaaaaaactatcaagccacaaaaagatacagaaaaaacaaatacattttgctaagtgaaagaagccagtctgaaaagggtacatactgtgatttcaactatatgacattctgcaaaaggmcaaactataaagacagtraaaagatcagtggttatctttgcagaygccgccgtcrctgggagccctgtactatcagccatggtcaaacccatcgtgttttttgamatcgccgtcgacgccaagccctcgggccgcatctccatcaaactgtttgcagacaagattccaaagacagcagaaaagtttcatgctctgagcactggagagaaaggattttgttataagggttcctgctttcacagaattattccaaggtttatgtgtcagggtggtgacttcacaccactggtggagaaatttcatgatgagaacctcatccgaaagcatacaggttctggcatcttgtccatggcaaatgctggacccaacacaaatggttcccagtttttcatctgcactgccaagactgagtgtttggatggcaagcatgtggcctttggcaaggtgaaagaacgcatgaatattgtggaagccatggagcactttgggtacaggaatggcaagaccagcaagaagatcactattgctgactgtggacaattctaatgagtttgacttgtrttttattttaaccaccagacccattcmttctgtagctcaggagagcacccctccaccacatttgcttgcaatatcctagaatctttgtgctcttgctgcagttccctttgggttccatgtttcccttgttcccttccgtactagctggattgcagagttgagttaagtttatgattatgaaataaaaaccaagtaaca

SEQ ID NO: 1633 - DNA, 1932 bp, Homo sapiens
gtgctaggtttcctgtttaagatagcrtcccccatggcagcgcaggcctggaagcttctgcaagccctagcgctgctgccccgcttcctggtggccaggtcccgggcagttcaattaacctccagaagatggctgagcctgcaggaatgccagagcaagaaactgatgtctgataacagagtgacagttcaaagattctttgtagcagacactgcgaatgaagctctygaggccgctaagagactaaatgcaaaagaaattgttttaaaagcccagatcttagctggaggaagaggaaaaggtgtcttcaatagyggtttgaaaagaggtgttcatttaacaaaagaccctaatgttgtgggacagctggctaaacagatgattgggtacaatctagcgacaaaacaaactccaaaagaaggtgtgaaagttaacaaggtgatggttgctgaagccttggacatttccagagaaacctacctggcaattctgatggaccagtcctgcaatggccccatgctggtgggcagcccccaggagggcatcgacattgaagaggtggctgcttcaaacccagagctcatttttaaggagcaaattgacatttttgaaggaataaaggacagccaagctcagcggatggcagaaaatctaggcttcgttgggcctttgaaaagccrggttgaagccatccttgtcaatatttttggtggtatcgtcaactgtgccatcattgccaatgggatcaccaaagcctgccaggagctagaactcaaggtgccccttgtggtttggcttgaaggaaccaacgtccaagaggcccaggaaatactcaacagcagactccccattacttcagccgttgacctggaggatgcagccaagaaggctgtggccagtgtggccaagaagtgatgtctttgtcctgatccgatggagaaacaaagccatttttccataaaaagggatggttcatcattgtgaaagaaatggttatctcgttggggaggaaaagggggggtgaaggcaagaatcactgaaaaatcttaaatctgtgttttctggaataagctatctagacagcctaaatctgattttagtctttataaaaataatatctcgtattctcatacttttctgtcactgtaagcctgcccagtaggcagtgttttgcagactttggggagcggtctatgtgaccaaatattgtgtgtatagacagaatttgaaatcgggtcctgcttcatttacaagaattttggtgggcatctaatcctacataatgaaaaagaagaacagaccatttaaaaactcagacaagattatatttaatatattaattactaaaaaggcacaagattacactgaacattagctactaaaaaggcactgccaagacattcaaacaaatagctattacacactgcagcagattttacaggtttctaattccaacatatgtttgaaaaatccaygagtgttccaaaatatayttaataatggaaggtctgcattaatataccatccatgtgtttttaccatttggtttaatattgaatatactgtttacctcacactaaaaataaaaccagaaaccttatttgtgactttggagtggaagcttccatttttgggtcaaaaatgaatcctgattcttatggaaatctctgttattaagtcatttcaagatgagacaacactgaagatcaaattgtgttgggtatcagtatcttctctcctcgtttatctcttacacctcatcctcccaggatctaccagttgatggtagaaagatgggaaccttatctgaatgttttttttttccatgatgtccaattttgttgtgggaaaggatttggataaagtttttgtttaaattttggtagatttttatctatacaagtttaaataaaattatgttttgtaagttgt

SEQ ID NO: 1634 - DNA, 2335 bp, Homo sapiens
gtgctaggtttcctgtttaagatagcrtcccccatggcagcgcaggcctggaagcttctgcaagccctagcgctgctgccccgcttcctggtggccaggtcccgggcagttcaattaacctccagaagatggctgagcctgcaggaatgccagagcaagaaactgatgtctgataacagagtgacagttcaaagattctttgtagcagacactgcgaatgaagctctygaggccgctaagagactaaatgcaaaagaaattgttttaaaagcccagatcttagctggaggaagaggaaaaggtgtcttcaatagyggtttgaaaagaggtgttcatttaacaaaagaccctaatgttgtgggacagctggctaaacagatgattgggtacaatctagcgacaaaacaaactccaaaagaaggtgtgaaagttaacaaggtgatggttgctgaagccttggacatttccagagaaacctacctggcaattctgatggaccagtcctgcaatggccccatgctggtgggcagcccccaggagggcatcgacattgaagaggtggctgcttcaaacccagagctcatttttaaggagcaaattgacatttttgaaggaataaaggacagccaagctcagcggatggcagaaaatctaggcttcgttgggcctttgaaaagccrggctgcagatcaaattacgaagctgtataatctcttcctgaaaattgatgctactcaggtggaagtgaatccctttggtgaaactccagaaggacaagttgtctgttttgatgccaagataaactttgatgacaatgcagaattccaacaaaaagacatatttgctatggacgacaaatcagagaatgagcccattgaaaatgaagctgccaaatatgatctaaaatacataggactagatgggaacattgcctgctttgtgaatggtgctgggctcgccatggctacttgtgatatcattttccttaatggtaggaagccagccagcttcttggatcttggaggtggtgtaaaggaagctcaagtatatcaagcattcamattgcccacagctgatcctaaggttgaagccatccttgtcaatatttttggtggtatcgtcaactgtgccatcattgccaatgggatcaccaaagcctgccaggagctagaactcaaggtgccccttgtggtttggcttgaaggaaccaacgtccaagaggcccaggaaatactcaacagcagactccccattacttcagccgttgacctggaggatgcagccaagaaggctgtggccagtgtggccaagaagtgatgtctttgtcctgatccgatggagaaacaaagccatttttccataaaaagggatggttcatcattgtgaaagaaatggttatctcgttggggaggaaaagggggggtgaaggcaagaatcactgaaaaatcttaaatctgtgttttctggaataagctatctagacagcctaaatctgattttagtctttataaaaataatatctcgtattctcatacttttctgtcactgtaagcctgcccagtaggcagtgttttgcagactttggggagcggtctatgtgaccaaatattgtgtgtatagacagaatttgaaatcgggtcctgcttcatttacaagaattttggtgggcatctaatcctacataatgaaaaagaagaacagaccatttaaaaactcagacaagattatatttaatatattaattactaaaaaggcacaagattacactgaacattagctactaaaaaggcactgccaagacattcaaacaaatagctattacacactgcagcagattttacaggtttctaattccaacatatgtttgaaaaatccaygagtgttccaaaatatayttaataatggaaggtctgcattaatataccatccatgtgtttttaccatttggtttaatattgaatatactgtttacctcacactaaaaataaaaccagaaaccttatttgtgactttggagtggaagcttccatttttgggtcaaaaatgaatcctgattcttatggaaatctctgttattaagtcatttcaagatgagacaacactgaagatcaaattgtgttgggtatcagtatcttctctcctcgtttatctcttacacctcatcctcccaggatctaccagttgatggtagaaagatgggaaccttatctgaatgttttttttttccatgatgtccaattttgttgtgggaaaggatttggataaagtttttgtttaaattttggtagatttttatctatacaagtttaaataaaattatgttttgtaagttgta

SEQ ID NO: 1635 - DNA, 1502 bp, Homo sapiens
acaaaaaaaagacaactacagggtatgcagaggtgccccaaccacactctgtccacagactctcagttattttaggagatccctggccaaagatttatttctgttgacaaccaagggcctccgtctggatttccaaggaagaaatttcctttgaagcwctggaacttgccaccaccagcaccatgccctaccgatatccagcattgaccctggagcagaagaaggagctgtctgacatcgctcacyrcatcgtggcactgggcaagggcatcctggctgcagatgagtccactgggagcattgccaagcggctgcagtcccttaacgccgagaacaccaaagagaacyggcgcttctactgtcagctgctgctgacagctgacgactgcgtgaacccctgcatcggggacgtcatcctcttccaccagacactctaccagaagaaggatgatgggcgtcctttcccccaagttgtcatgtccaagggtggtgttgggggcagcaaggtagacaagggcgtggtctcccttgcagggacaaatggcgagaccaccacccaagggttgtatgggctgtctgagtgctgtgcccagtacaagaaggatggagctgacttcaccaagtggcattgtgttctgaagattggggaacacaccccctcagcccttgccgtcatggaaaataccaacgtcctggcctgtcatgccagcatctgctagcagagtggcattgtgcccattgcggagcctgagatcccccctaatggggaccatgacttgaagcactgccagtgtgtgaccaagaaggtgctgactgctgtctacaaggctctgagtgatcaacacatctatcttggagggcatcttgctgaaccccagcatggtcaccccaggccatccctgcatccagaagttttctcacgaggagattgccatggtgactgtcacaacgctgcaccgcacagtgccccccgctgtccctgggatcacattcctgtctggaggccagaatgaggaggaggcatccatcaacctcaacgccattaacaagtgctccctgtgaccttctcctatggccgagccctgcaggcctctgccctgaaggcctggggcaggaagaaggagaacctgaaggctgcccaggaggagtcaagtgagccgtggccaacagcctggcctgtcaaggaaagtacaccccaagcagtgagactggggctgctgctagagagtccctcttcatctctaaccatacctactaagtggaggtgttccccggctgttcccaacactccaggccccgcccctactctcttgaagagcgggccttctcctcaggtctccaggttggcttgcccgtgctcttgcctccctcgtgacagtggtgtgtggtgtcgtctgtgaatgctaactccatcaccctttccagcacactgccaataaacagctattcaaggttggaggagggggggcggggagagaactacagccagtatccccaatgaa

SEQ ID NO: 1636 - DNA, 458 bp, Homo sapiens
gtaatttcatagttattttaataaccaggtttacattaacagtcacgtgatgaacttttttctttaatgtcagctaaactcaaaacacagttttgttcacggttcaaacmaaacagctcttcacgttccagagctgcctcacagctagcacagatcacaggagattactgtctgtccatacccaccagacacagaactgaacacccacacaccagttttcaaagagggaacttacaatgaatgctggctgcccrgggcagcccatgagtgttctggtggaatggttcacttcggaagtcccaagggcagtgcggatgaccgatttggccatggaagacttatcttcatggcacagagaggttgtgcagagatgagtcagactcaggggctgagtaacagcagagcagagagtgcagaagtggacsctcagaagcgagtttatgtgtgtcttttcctct

SEQ ID NO: 1637 - DNA, 2817 bp, Homo sapiens
cagataaagacagagcagcctgtctttatcggaggttcctctgccagtaggaggggcccggagaaaaccagaaagagggccagagccagagaaacatgaagcaccccggggcctcccacaccagtgcctgagcaggaatggggaggggccatgattcacaaggccctgggaggtcactttaaagagggctgctcaactgcaaggacgctgtaagcaggaagagaagccacagcgcttcagaaaagagtgggacagggacaagcatatctaagaggctgaacatgaatccacagatcagaaacccgatgaaggcaatgtatccaggcacattctacttccaatttaaaaacctatgggaagccaacgatcggaacgaaacttggctgtgcttcaccgtggaaggtataaagcgccgctcagttgtctcctggaagacgggcgtcttccgaaaccaggtggattctgagacccattgtcatgcagaaaggtgcttcctctcttggttctgcgacgacatactgtctcctaacacaaagtaccaggtcacctggtacacatcttggagcccttgcccagactgtgcaggggaggtggccgagttcctggccaggcacagcaacgtgaatctcaccatcttcaccgcccgcctctactacttccagtatccatgttaccaggaggggctccgcagcctgagtcaggaaggggtcgctgtggagatcatggactatgaagattttaaatattgttgggaaaactttgtgtacaatgataatgagccattcaagccttggaagggattaaaaaccaactttcgacttctgaaaagaaggctacgggagagtctccagtgaggggtctccctgggcctcatggtctgtctcctctagcctcctgctcrtgctgcacgggcctcccctccaccctggacccgctctgtttctgcctggtcatcctgagcccctcctggcctcagggccattccacagtgctcccctgcctcaccgcttcctcctcgctcttccagactcttcctgcagaggctcctttctgcctccatggctatccatccacccccacagaccccgttcctccagcctgcgtgcccctaacctggcttttcccatctccccagcataaccaaatcttactaaactcatsctaggctgggcatggtgactcacgcctgtaatcccccagcaatttgggaggcaaaggtgggagaatygcgtgagcccaggagttccagaccaggctgggtcacatgacaaagccccatctctacaaaaaaaaaaaaaaaaaaaaaaaaaagccagatgtggtggcatgcatctgtagtccaagctacttgggaggctgaagtgkgaggattacttgagcccgagaggtggaggctggagtgaacagagatcgcgccactgaactcgggtctgggcaacagatagagaccctgcctgaaaataaatcgataaataaactcaacctaaacaggtgtgaatatatgtaagttgaaaacccgaagttttgagaaacatcctttgtaaatttcatcctatgaattgggtcattcatgtcctacccagctaaaacagaggccaggagccagggaggaaaagcagtcaggccacacaacattgtttccgaaatggacttctctgcaagcctgactcctgagactgtgcattgtaccctgaaaccagctttatccatagcttctgcgataaatggctgtaagtcttggactccttgctccaaacgcagcgactcagcaatagaacctcccagctcccagcccttcctagtgcccatgggctttacatagggcaagagaacatttctccttctataattgccatctctttgctctctcaacatggtgaacaccatccggactccgtgtatgtctcaaattacaattctttctttgcaaatgaaatatgaaatttagaggctcttctaaacactttaaatttgatttgacattttcaaagcagatgtaagttttagagaatgagattctccataaaaatgaccctttcatgctgtggcctccatagaagatgtcccaggccaggtgcccacatggcaggcatttattttctcacagatctggaagctgcaggtccaacttcgaggggtgggtggggttgtttcctctgaggccgctccttctggctggcagggagtctcttccagccgtgtcctctgtggcctttcctctatgcacacgcacctctgggatctctctgcctccaaatatcatcttttttttttttttttttttttttgagacagagtgttgctcctcttgtccaggctggaatgcaatggcrcaatctggactcactgcaacctccgcctcccgrgtttrrgcgattcttctgcttcagcctcccgagtaaaaggcatgcatcaccacacctggttaattttgtagttttagtagagatggggtctcaccatgttggccagactggtctcgaactcctgacctcaggtgatccgcctgtctcagcctctccaagtgctgggattacaggcatcagccactatgcccggctgggatcatatgttccacacatgtttgttcaataagcatggactgcaaccacctacatgaatattcatagctcctcctgtagcctgttgaatatgtatgtttagccaacctcttcagcataaagctcctgcccaaacccctcctgctcctaaatgtctgtctctggtgttaaccagaggctgctcttcccaggctgctggatggytaccttgcaggctgtcacccttaacaagaaataaagtgtcctttgcaaatgc

SEQ ID NO: 1638 - DNA, 843 bp, Homo sapiens
cagataaagacagagcagcctgtctttatcggaggttcctctgccagtaggaggggcccggagaaaaccagaaagagggccagagccagagaaacatgaagcaccccggggcctcccacaccagtgcctgagcaggaatggggaggggccatgattcacaaggccctgggaggtcactttaaagagggctgctcaactgcaaggacgctgtaagcaggaagagaagccacagcgcttcagaaaagagtgggacagggacaagcatatctaagaggctgaacatgaatccacagatcagaaacccgatgaaggcaatgtatccaggcacattctacttccaatttaaaaacctatgggaagccaacgatcggaacgaaacttggctgtgcttcaccgtggaaggtataaagcgccgctcagttgtctcctggaagacgggcgtcttccgaaaccaggtggattctgagacccattgtcatgcagaaaggtgcttcctctcttggttctgcgacgacatactgtctcctaacacaaagtaccaggtcacctggtacacatcttggagcccttgcccagactgtgcaggggaggtggccgagttcctggccaggcacagcaacgtgaatctcaccatcttcaccgcccgcctctactacttccagtatccatgttaccaggaggggctccgcagcctgagtcaggaaggggtcgctgtggagatcatggactatgaagattttaaatattgttgggaaaactttgtgtacaatgataatgagctgctggatggytaccttgcaggctgtcacccttaacaagaaataaagtgtcctttgcaaatgc

SEQ ID NO: 1639 - DNA, 581 bp, Homo sapiens
actgccaccgccgggagccccgtactatcagccatggtcaaccccactgtgttcattgatggtgagtccttgggccacgtctccttcaagctgtctgcagacaagtttccaaagacagcagaaaactttcgtgctatgagcactggagagaaaggatttggttataagggttcctgctttcacagaattattccagggtttatgtgtcggggtggtgacttcacgcaccataatggcactggtggcaagtccgtccaccaggagaaatttgatgatgagaacttcatcctaaaacatacaggtcctggcatcttgtccacggcaaatgctggacccaacacaaattgttcctggtttttcatctccattgmgaagactgagagtttggatggccagcacgtggtctttggcaatatgaaagaaggcatgaatgttgtggaggccatggagccctttgggttcaggaatggcaagaccagcaagaagatcaccattgctgactgtggacaactccaacaaatttgacttgtgttttatcttaaacaccagaccattccttctgtagctcaggagagcacccc

SEQ ID NO: 1640 - DNA, 912 bp, Homo sapiens
atggctttcatcaccaggcagttcatgcactctttgtcttccttgtccacaaccttgggcaagaaaaatcatcatcaagcacatgatggtcatcagcatcacacaggttgctgcagtgaccggccacacagtagtgttgctagaccagacagaggacatcttggcaaaatataaagagggaattgagaaaagccttaggaaagtgacaaagaagttgtttgtagaaaaccctaaggcttttgatgaatttgtggagaaaaccctaagcagcatatcaaccagcacagatgcaatatccgtagtccacagcacagacctagtggtagaggccattgtagaaaatctaaaggtgaaaatcaagctctccaagaggttggacaagtttgttgctgaacatacaastttgccagcagcacttcctctttgcaaattacaagcatagccaatgctaccaccaaacaagaccgatttgctggcctccatttactcaacccagtgcccctgatgaaatttgtagaggtctttaaaacaccartgaccacccgaaagacatttgaatctttggtaaacttgagcaaaaccctgggaaagcatcctgttccttgcaaggacactcctgggtttattgtcagctgtctcaggattcaacacctcatggaagcagtcaggctgcatgaatgaggtgatgtatccaaggagaacactgacactgctatgtagttaggagccaggtaccccatgggctcacttgagcttctagattacgttgggctggattctgtgcagttcatcatggatggatggcatgaaatagatacaaagaaccccatatttcagcccagcccatccttgaaaaagctgatggcagagaagaagcttggcaagaagtctggagaaggattttacaaatac

SEQ ID NO: 1641 - DNA, 698 bp, Homo sapiens
gcacggcattttggaatcaccagtgagacaattgtgaaaccagcttcaatttctgaggaagaattgttgaagttaataaataaactgagtaatgttgataattagataattagatggccaccttgttcagctgcctcttccagagcacactgatgagagaaagatctgcaatgctttttctccagacaaggatgttgatggctttcctgtaatgaatgtaggacgaaagtgtttggaccaatattccatgttaccggctaccccatggggtgtgtgggaaataattaagcgaactgacattccaaccctagggaagaatgtggttgtgactggaaggtcaaaaattgttggaatgcccattgtaatgtcactgcacatacgtggggtgcatgaacgtcccagagatgatgccrccgttagaatatctcatggatatactcccaaagagcagttgaagaaacaaaatatttgcagatattgtaacatccgctgcacgaattctaaacctgttcacaatagatataatcaaggaaagaacagcagttgttgatgtgggaataactagagttcaagatcccgtaactgctcaacccaaattggttggagacgtgggttttgaaggagtcagataaaaagccggttacatcatgccacttcctggaggtgttggcctcatgacggtggcgatgctaatgaag

SEQ ID NO: 1642 - DNA, 1234 bp, Homo sapiens
atgaaaatgtctgaccccaccacgctgtctgagctactgaaatgttattaccagaggctctttccctattctctgtactgtaactggctcaactacagcagagtgataaagaattactcccaacactgtgaattttcattcacattgaaagatgacattacattcgataccaatccttcaacaaccagagtgatctggaaaaggagatgcagaaagtgaatccatacaagattgatataggtgcagtatattcccacagacccaatcaacacaatacagtgargctgggagctttccaggctcaggaaaaagaactggtgtttgacactgacatgacagacatgacaatgtgaggagatgctgtagttctgcagatacatgttctacgtgctggaccctcatgacaagggccatacgcatcactaacacagcactgaaggaggactttggatttaagcattgtctctgggtatattctggaaggaggggtgtacattgtttggtctgtgataaatcagttagaaaactgtcttcggtggtatattctgggatagttgagtatttgagccttgtaaagcatggtcaagatgttaaaaagaaagttcacctaactgaaaaaattcacccttttgtcagaaaatctataaacataataaaaaaaactttgaagaatatgccttggttaatcaagatattctcaaaaataacaaaagctgggataagattttagcccttgttcctgaaacaattcaggatgaacttcaacaaagcttccaaaagtctcacaattcacttcagcattgggagcaccagcagatgtcagaataacatcaaaaatcaaaatgtggatcctggctgcagtgggagattatgctccaggactgtttccacgatggggtatcaatgtcaacaaagaaatcaatcatttaccgcagagcccttttagcgttcatcctaaaacaggtcgcatmtctgtgcctactgatttgcagaaactggatcggtttgatccatttactgttccaaccataagcctcatctgccatgaactggatgccatttccactaatgaagaggaaaaaaggagaattaaactgaatctgatattaaacatagaaccagagatataagaccagtctagcaccttatgtgagtttttgaacaacttcttgaaaacctgggtaaacaccgaaaaagagaacttcttaagaagagtgatttacaaaaagatttc

SEQ ID NO: 1643 - DNA, 519 bp, Homo sapiens
gccaccaggagccccatactaccagccatggtcaaccccactgtgttcttcgacatcagtgtcagtggcaagcccttgggccatgtctccttcaggatatttgcagacaagctttcaaagacagcacaaaactttcgtgctctgagcactggagagaaaggacttgattataagggttcctgctttcacagaattattccagggtttatgtgtcagggtggtgacttcacgtacaataatggcactggtggcaagtccctctatggggagaaatttgatgatgagaacttcatcctgaagcgtatacgtcctggcatcttgtccatggcaaaagctggacccaacacgaatggctcccagtttttcatctgcactgccwagactgagtggttgattggcaagcatgtggtctttggcaaggtgaaagagggcatgaatattgtggaggccatggagccctttgggtccaggaatggcaagaccagcaagaagatcaccattgctgattgtggacaactc

SEQ ID NO: 1644 - DNA, 330 bp, Homo sapiens
atggagttatctggcaagtgtgtgggagccttcactgtggtttgcaaagatacagatgaagccaaaaatgtagagtcagcagttgaagatcttgatctgtcccatactcagctggtctccaacctaaagaaggagggttctacccacatctggcaacacataactgacaaaattggcatgttttgtttcacagggctaaagcctgatcaggtggagcarctgaccaatgagttctccatctacatggtagaagatggccacatctctgtggcaggggtcaccttcagcaacatgggctaccttgcccatgcctttcatcaggtcaccaag

SEQ ID NO: 1645 - DNA, 2378 bp, Homo sapiens
ctctgtcctgtggctgcccactgccctcctactgtccagcgtggccctgctgcactccagccatgtcctctccaggatccccactgccttccacccaggcctcaccaccacagcctctgccagaggtcctggtggacctatgtggagatgggacttccagatcccatcctgggagtcaccaaagcctttaagagggacaccgatagcaaaaagatgaatctgggagtttgtgtctactgggatgataatggaaagccttacatgctgcttaatgtcaacaaggaagaggcccagattgccacaaaaaatttggacaaagaatacctgcccattgggggtctggctgaattttgcacggcatctgcagaactagccctgggtgagaatagtgaagtgttgaaaaatgtccagttattcactgtgcataccatttctggaactgcgaccttaacgatcagagcctgttttctgcaaagattttttaagctcagccaggatgtccaaaccatcctggggaaatcacacacccatcttcagggatgctggcatgcagctacaaatttattgttactatgaccccaagacttggtgtttgacttcacaggtcgtatggaggacatttcaaaaataccagagcaaagtgtttttctgcatgcctgtgcccataatcccatgggagtggaacctcgtctagagcagtgaaaagaaatagcaacagtggtgaagaaaaataatctctttgcattctttgacatggcctagcaagggtttgctagtgatgattgtaacaaggatgcctgggctgtgcaccacttcatcaaagagcattaatttttgtctctaccaatcataagccaagaacatggagttatctggcaagtgtgtgggagccttcactgtggtttgcaaagatacagatgaagccaaaaatgtagagtcagcagttgaagatcttgatctgtcccatgtattataatcctcccctcaatggagcccagattgcttctaccattcttaacaccgaaatttgcaaaaacaatggttgcaagaagtgaaaagcatggccaaccacatcattarcatgcagactcagctggtctccaacctaaagaaggagggttctacccacatctggcaacacataactgacaaaattggcatgttttgtttcacagggctaaagcctgatcaggtggagcarctgaccaatgagttctccatctacatggtagaagatggccacatctctgtggcaggggtcaccttcagcaacatgggctaccttgcccatgcctttcatcaggtcaccaagtaatatcactggtgcaaggaaacagaaacaacctttctgtcttcagtctctgctattgggagcttcacaaagaggatgacagaaggtggatggtggtgagtagatcatttctttcagctgcattgtgtaacaacattcagcaattgaatgtttctcagaaaagaacatgtagtgacatagggcagagacatccatgtttggtgtctggaacattgtggctctaaaccaaactctcccctgtccttttatctcccaacttttctcaaagagtttatacatgcaagaaagtcatcacaccaaaaaacctgtcagttatgccattgcaatatttcagaagctttaactgaagtgtaatacagtgtcagggttcctcatgagaaatagcacacattggaagctttgagagaagacctacttctatcatgaacagtcagcactgtgtctgtcctcccatgatggagcaaccttaaaaagagaccatattgcagaaattgcattttatgaaaaccaatcagtatgctgacattacagcaaggaaaataaaagatgttgttttctgtcttatttaagaaaaagagaaggctctctcttctcccttgtcattgttgtttttttccttatgcacaaagatttttaactaatgtagattttcattccattctactgcttgattgatcatcaaccccatcctgttgggatttatttaaaaataaagaacataattttctgctgatgccttaccatcacctttctcagcaaagaatagtggagagtaggtaactgcactttatctcagcatcctcttcaaggattgtatatttgtcttctgttgagatgttgtctctgcccagttggacctactctctttgttgaatgtagttgtgcagtcactcatttcacatcatgagttaggtggcacagggcagtaccaggaaataggatattctaggctttatgtgctgccagctgggatcaagctacaccctttggaaagaatcactatctgctctaatcatgtagacttattgcagcctggcttctctgttacaataaaattactgaagac

SEQ ID NO: 1646 - DNA, 1005 bp, Homo sapiens
atggcctacaggctcctcctggccgaccccctcgggagcccgggtgcctcccttcctccatgcctggtccctctgcctgaagccttcctgccctctctcctggctccaagcatcctgtgggcttcccccagcgctggtgccagcaaagcccgatctcctctctcgaggycgcctgcactcccccttgcacagaagcgtgaagaagcggkggtcactggcacggagtcctccttgagagtccggccggggatccgtaccagtggtccctgcccacctgggttaggaaaggctgactggcctggggaggctgtggacgacgtctgcggtgtcasggccggggcaccggtacaaagtcagggctcccggaacaagctgctcctggtgtccttcgacagcttccgctggaactacgagcaggacgtggacacccccaacctggacgccatggcccgagatggggtgaaggcacgctacatgacccccgcctttgtcaccatgaccagcccctgccacttcaccctggtcaccgctctgggagaggagccccagcactgggattccgaggctttcyattcggtgatcagcactgaacacagaggactcaccatggagtttgagctcagctgggttttccttgttgctattttacaaggtgattcatggagaactaaagagattgagtgtgtccactgtgaggtgcagctggtagagtctgggagaggcttggcccagcctggggggtacctaaaactctccggtgcagcctctggattcaccgtcggtagctggtacatgagctggatccaccaggctccagggaagggtctggagtgggtctcatacattagtagtagtggttgtagcacaaactacgcagactctgtgaagggcagattcaccatctccacagacaactcaaagaacacgctctacctgcaaatgaacagcctgagagtggaggacacggccgtgtattactgtgcaagagacacagtgaggggaggt

SEQ ID NO: 1647 - DNA, 636 bp, Homo sapiens
aactggctggatcacactgtcagccaagaaaaggaaggacgaatgaggctgaagagactgcagggctgcagatgaaatatccagacctatgcatcctcatgtgggatgagtgggttccggcaaaatttaagaggctaatgatgggatggaggggttggcagcagcacagcatagcagaattttctgattcactaccactgctggtgttacagcgtgaacgtgacctgaagacaaaaaggctgtacagaatcattgtcacttccacaggaggggtttcggcgacgcgtgtaagggaactytggcgacttagtgcgatcactgggagaattgtagagtccactggagagaaagaaaaatggtcaaaaagagcccagagagttcctgggggaaaacacaccgcagcccagacctattcataactgcacagctggtacttccagaggcacatgcaccaggggcacgtggttctctttgctgacaagatttattaaaagaaaagaggaaagaactattctaaaatggaccctccctccaaaaaagcccaaacagccaaagcaattctaagcagaaagaacaaagctggaggcatcacactacctgacttcaaactgtactacaaggctacagtaacaaaaa

SEQ ID NO: 1648 - DNA, 2115 bp, Homo sapiens
atggggtgtcgggtgagaagaacagtttggatacagctgacctccacccctgggcccactcttacccatacgcacatcctcaaggcagctcagagcaacatcatagaatttgaaaggacacaggtcattgtatttcagacatacacaaataaaagtcatgtgcccattgaggcaaaatatatctttcctttggatgacaaggccgctattaaagagaaggaagaagcccagtcagagtaccgaggagcagtgacccagggccatggcgcttacctgatgagtcaggatgctccatgtagtgccggagtatttgaatattttaatgcaaaatccaaacatagttggagaaaagagatatgttttttaaacatctggttttatgtgtacatgcggaaatctcacattcttccaaggctaagaaataggaacatctgtgtttccttgaatgtgcccgcggccctgcaggccccagcccaggggcagcggggtgtcctggaagccccggagcttcatggaagcctgggagggcggcggagtggggtccgcagcgcggtgcccagagaggcagccggcgcccgaatccagggtgcacttccaagcggcgaggttcatcatggaggcaagtgtcaagctagggtggaagagcagcacctgcggactcgtgacatcatcaatgtgtccaacaggtacttaaacccaagcgatgagcccctggaattggactccctcttctgggagcttagggacagcattgtgcagtgtcagcttctcatgctgagagttctgcgcttccaagtctccttccagcatccacacaagtacctgctccactacctggtttccctcaagaactggctgaaccgccatacctggcagcggacccccgttgccgtcactgcctgggccctgctgcaggacacctaccacggggggctgtgcctccacttccaggcccagcacatcaccgtggcagtgctctacctggccctgcaggtctgcggagttgagatgattgacaagctggcaacccgagctctaatcagagattacaaagatggcattcttcatgaaaatgaaaccagtcgtgagaaacaaaccttgaaatctctgattattaaacccagtaaagaaaactctctcataatacaatttacaagctttgtggcagttgagaaaagggatgagaatgagtcaccttttcctgatattccaaaagtttctgaacttattaccaaagaagatgtagacttcctgccctacatgagctggcagggggagcaccaaggagccatcaggaaccaacctcttttagtgtcctctgagtggcaagaattaccttcatccaaaccaaaacttagggctaaaagaaaaatgaaattatctaagacagaaatttctgaagattttgaagaggatggcttaggtgtactaccagctttcacatcaactttggaacgtggaggacctccccagaacccctcttctgcaccctactgtggcattgctctttcagggagctcattgagctccacacagtctgctccactgcaacctgttggaggccgtacgaccaggccttctactggcacctaccctgagctggattctccccagcttcatttctctcttcctacagaccctgatcccatcagagttgttctgaaacagaaagtcatgagctatgagaagtactgctttttacaaataaaatgtgatacaacagacaacagtatcccgtgctttctggaggtaatagaggaggatgaaacagtgtgcacacagcactggcaggatgctgtgccttggactgcactcttcagtctacagagagagccaccttgcagcaccagtgagatggcagcactgttcaaactcaggatgacagaccagggaagaccctggaagtggactcagggccatgtggtcaggaacgctggagttgcaggtctaaaaaggaggatgtgggctccagggccctgtccctttgatgttaagtggtggagggagttggcgggatttgcctctggcttgcggtatatccagtggattgtaacaaatccagaaytcaagttctttccatatctggaaaacaggcaggatttatcagaaccttta

SEQ ID NO: 1649 - DNA, 898 bp, Homo sapiens
gacaatgaccctgatggcatggagcccaaaggcatcatcgagagtaactagaatgagatggttgacagctttgatgacatgaaactgtaggagtttcttctccgtggcatctatgcstatggttttgagaaaccctctgccatccagcagcgagccattctacctgtgtcaagggttatgatgtgatcactcaagcccaacctgggactggggaaatggccacacttgtcatatcgattctgccacagattgagttagatctaacagccacccaggccttggtcttagcacccactasagaactggctcagcagatacagaaggtggtcataacacctggagactacatgagtacctcttgtaatgcctgtattgggggcaccaatgtgtgtactgaggtgcagaaattgcagatggaagctccccatgtcatcatgcatacccctggatgcatgtttgatatggttcactggagatacctgtctcccaaatacatcaaaatgcttgtactggacaaagctgatgaaatgttaagccrtggattcaaggaccagatctatgtcatattccaaagtttaacagcaacacccaggtagtttgctgtcagctacaatgctttcttatgtgcttgaggtgaccaagaagttcatgagggaccccatttggattctggtcaagaaggaagagttgatyctggagagtatccaccaattctgcatcaatgtggaacaagagaagtggaagctggacacactgcgtgacttgtatgaaactctgaccatcacccaggcaagtcatcttcaccaacactcgaaggaaggtgggctgactcactgagaagatgcatgcttgggttttcactgtctctgctgtgcatggagatacggaccaacagaaa

SEQ ID NO: 1650 - DNA, 912 bp, Homo sapiens
atcgagagtaactagaatgagatggttgacagctttgatgacatgaaactgtaggagtttcttctccgtggcatctatgcstatggttttgagaaaccctctgccatccagcagcgagccattctacctgtgtcaagggttatgatgtgatcactcaagcccaacctgggactggggaaatggccacacttgtcatatcgattctgccacagattgagttagatctaacagccacccaggccttggtcttagcacccactasagaactggctcagcagatacagaaggtggtcataacacctggagactacatgagtacctcttgtaatgcctgtattgggggcaccaatgtgtgtactgaggtgcagaaattgcagatggaagctccccatgtcatcatgcatacccctggatgcatgtttgatatggttcactggagatacctgtctcccaaatacatcaaaatgcttgtactggacaaagctgatgaaatgttaagccrtggattcaaggaccagatctatgtcatattccaaagtttaacagcaacacccaggtagtttgctgtcagctacaatgctttcttatgtgcttgaggtgaccaagaagttcatgagggaccccatttggattctggtcaagaaggaagagttgatyctggagagtatccaccaattctgcatcaatgtggaacaagagaagtggaagctggacacactgcgtgacttgtatgaaactctgaccatcacccaggcaagtcatcttcaccaacactcgaaggaagctttagaaagctttgccaaacacggcaaagtctatcagaatgagggagagatttatttccctgccactcgttatgagagcatgagcatcatttccagccatttcgtggaaccatcctttatggtagcc

SEQ ID NO: 1651 - DNA, 1362 bp, Homo sapiens
gacggactcagagggccttaccccgccctctggaasgttagtgccaaaggagaagaggacaaatggagctttgaaaggatgactcaactctccaagaaggccgccagcatcctctcagacacctgtgcccttagccatggagaccggctgatgataatcttgcccccaacacctgaagcctactggatctgcctggcctgtgtgcgcttgggaatcacctttgtgcctgggagcccccagctgactgccaagaaaattcgctatcaattacgcatgtctaaggcccagtgcattgtggctaatgaagctatggccccagttgtaaactctgccgtgtccgactgccccaccttgaaaaccaagctcctggtgtcagataagagctatgatgggtggttggatttcaagaagttgattcaagttgcccctccaaagcagacctacatgaggaccaaaagccaagatccaatggccatattcttcaccargggtacaacaggagctcccaaaatggtcgagtattcccagtatggtttgggaatgggattcagccaggcttccagacggtggatggatctccagccaacagatgtcttgtggagtctgggtgatgcctttggtggatctttatccctgagcgctgtcttgggaacttggttccaaggagcctgtgtgtttctgtgtcacatgccaaccttctgccctgagactgttctaaatgtcctgtccagatttcccatcaccactctatctgcaaatccagagatgtaccaggaactgcttcagcacaagtgtttcaccagctacagattcaagagtctgaagcagtgtgtggctgcaggaggacccatcagccctggggtgattgaggactggaaacgcatcactaagttggacatctatgaaggctatgggcagacggaaactggtctactctgtgccacttccaaaacaataaaattgaagccaagctctctggggaagccattgccaccttatattgtccagattgtggatgaaaactcaaatctyctgcctccaggggaagaaggaaatattgcaatccrcataaaactaaaccaacctgcttctctgtactgtccacacatggtgagctgggaggaatatgcttcagcaagaggccacatgctttacctcacaggtgacagagggatcatggatgaagacggctacttctggtggtctggtagagttgatgatgttgccaatgcattgggtcagagattgtgaatgctttggttattgctattgagcctggggctgtgggagtttgaagaagactctggactgcttccaatacgtaggaattatatttctaaagtttagaaaatgcaaacaacc

SEQ ID NO: 1652 - DNA, 765 bp, Homo sapiens
atgactgctgctgaagtccggtggctgcaagagagtgaagttcagtccaaacattgtctgcagaagaaactgggtggacccaaaagccagggggaccctaataaactctactcacactctggagccaaagaaagggatgcttcttcagacaccctaaggcaaaagtcaagcttcttggctcaggacacacaagccccttttaggactggcctgtcctcgctgggacaggcatctcccacctactcctccccacctgcccacagccagtgcttggccacagggaaaggtgctaaagctaagacacgcatccctcttgctcctgacagcctagcctgggttggggggatcctgccagcaacaccaccggctagagaggggatagaaaaggacaacaccgtgggggaggggaggagtcctttggcagtgaccaccggcaaagcacgtaggatcatccagtgtgacccctgtctgagcctgctgcctggggatctccagggcctcagcctcaggcaggcccagggtggtgacttcacatgccataatgacactggtggcaaattcatctatggggagaaatttgatgatgagaacctcatccggaagcacaaaggtcctggtatcttgtccatggcaaatgctggacccaacacaaaaggcttccagtttttcatgtgcaccaccaagactgagtggtcrgatggcaagcacgtggtctttgacaaggtgaaggacagcatggatatcatggatgccatggagcactct

SEQ ID NO: 1653 - DNA, 939 bp, Homo sapiens
gcatccatggccagccacctcatgctcaacaatggcaccaagatggccatcctgggactgggcatctgaatgtcccctccaggccaggtgaccaaggctgtgaaggtggcgattgatatcaggtaccgccacatccactgagcccaggtacgagaatgagaatgagataggggtggccattcaggagaagctcagggggcagatggtgaagcgtgaggagctcttcatcatsagcaaactctggtgcacataccatgggaagggcctggtgaaaggagcctgtcagaagatgctcagtgaccttaagcagggctacctggactactaccttgttcactggccagccagctttaagcgtgggaaggaatccttcccattggatgagtcaggcaacatggttcccagtgacactgacattgtggacacacgggtggccatgaagagctggtggatgaagggctggtgaaagctactggcatctccaccttcaaccatctccaggttgagaggatcttaaacaaacctgggttaaagtataagccagcagttaaccaaatggagtgccacctgtgcctcacacagaagttaatccagtactgccactctaaaggcattatggtgactgcctgtagtccccttggctctcctgacagcctctgggccaaggctgaggacccttccctcctggaggatcccaagatcaaggcaatcatagccaggtgatcatagccaggcgatccaggtttggatccggttccccaggcagaggaacttgatggtgatccccaggtctgtgataccagaatgcactgctgagtcacagactttgaaccaagcagccaggatattaccatcttattcagctacaacaagaactggagggtctgtgccttggtaagctgtgcctcttataaggattacctcttccatgcagagttt

SEQ ID NO: 1654 - DNA, 1323 bp, Homo sapiens
atggccagccacttcgtgctcagcaacggtgccaggatgtccatcctggggctgggcacctggaagccccctccacgccaggtgactgaggctgtgaaggtggccattgatgtcaggtactgccatctcgactgtgcccatgtgtaccagaatgagaatgaggtggaggtggccattcaggagaagctcagggagcaggtggtgaagtgcgaggagctcttcattgtcagtaagctgtggtgcatgtaccatgagaagggcctggttaaaggagcctgccagaagatgcttagtgacatgaagctggactacctggatccttaccttattcactggccaactggctttaagcctgggagggaattttccccattggatgagtcgggcaatgtggttcccagtgacaccaacattctggacacatgggcagccatggaggagctggtggatgaagggctggtgaaagctattggcatctccaacttcaaccatttccaggtggagaggatcttaaataaacctggcttaaaggataagcctgcagttaaccagattgagtgtcacctgtacctcattcaggagaagttaagtccaaaggcattgtggtgactgcctacagccscctcggctctcccgacaggccctgggccaagcccgaggaccttgcctcctggaggatcccaggatcaaggtgatcacagccaagcacaataaaactacagcccaggtcctgatctggctccccatgcagaggaacttggtggtgatccccaagtctgtgacaccagaatgcatttgctgagaacgttaaggtctttaactttgaactgagcagccaggatatgaccacctcactcaactacaacaggaactggagggtctgtgccttggtgagctgtgcctcccacaaggattaccccttccatgaagagttttgaagctgtggttgcctgcttgtccctaagtgacctatacctgtgtttcctgcctcatttttttcattgcaaatgtagtatagcctgtgtcactcagcagtgggacagcaaactgtagagtggccagcgagggtgtgtccagcttgatgttggatctgaggagccctgtcagtagaatagaggtctcttccagtttgctttgcccttctttttgccctgctggggaaagtacaacctgaatacccttttctgaccaaagggaagcaaaatctaccaggttaaagtagtgccactaacagttgagttttaactgcttgkaactgtaatcctttcagcaagacttctctttgcctcaaataaaaagtgcttttgtgaacttgaaaaaaaa

SEQ ID NO: 1655 - DNA, 1404 bp, Homo sapiens
agtgatcaaaatataccagtaggcatctgcaatgttaccgtggacgacttatgtcaaattatgcctgagttggcccatggattaagtgaactcttatcacatgaaggcaatgttgaagaagatttctattcaacatttcaggtttttcaagaagaatttggaataatcaagtcctataatttaaagcccggtggtgataaaatttcagttaccaatcaaaatagaaaagaatatgtacagctttatactgacttccttctgaacaaatccatctataagcagtttgctgcattttattatggatttcatagtgtgtgtgcttcaaatgccctaatgctgcttcgtccagaagaggttgaaattttggtctgtggaagtcctgacctggatatgcatgctctgcagagaagtactcagtatgatggctatgcaaaaacggayttaactataaaatacttttgggatgttgtgcttggatttcctcttgatcttcaaaagaagttgctacattttactacagggagtgacagagtacctgtaggagggatggctgatttgaactttaaaatctcaaagaatgaaacttctactaactgcttacctgtggcccatacctgcttcaatcaactttgccttcccccctacaagagcaaaaaggatctgaaacagaaattgatcattggaatttcaaattcagaaggttttggacttgagtaacctagaagacttgaaatataatcttttatatgtagcattcacttccctcttactgtgcctttagccttttcatgtttctgtctcaaaacackttgacaaagctcaccaactttaaaatattaagtttttaaaaaatcaaatatgaagtatgttcagcaaaggcataattttctaaaaacacacacagaaatcgcttgagtgaggaaaagtccacatggcagagacaggtatggtccagttcctcttttatatagcactttatcattctccacaagtagtttgtcacaggcattccactgggaaagcaaagtacagtgaagaatgaatttatggtatagttgaacccagtggcagattgtacactgctagcactgctagcacacagtagcaaagcaaacagctacattatctttaacataaggcatgtagccatattttcatatagtggtatacaacacagtatcattgcaaatgcagtttacagggatttttgatatactggcttgggacctataagattcttctcagcagttgctgaaaagcatgtaaataactacataatagcctgagaataatgggattttgatagtgccatttattgttaaagatttatttttacaaagtaaattcagggttttagatgtgtacacagcttttacaaatcaataaagatgattgtacaagagt

SEQ ID NO: 1656 - DNA, 1171 bp, Homo sapiens
tttggcgatggggcagcaggaggtggggaggctcatgtcgaggtttaatgcattcaaaaggattaatrccatactgcaccatttgagaatgtccaagcacacagatgcagcagaagacgtgctattggggggggrraaaraaacgtgtgcagatgtatccatggctagagaagtgggaagaagatcctgaaactctcctgatcattataaagggagccggaggaaaggctttctgtgatgggagtgatattagagtcatctcsgaggctgaaaaggcaaaacggaagatagcgccagttttcttcagagaagaatatatgctgaacaatgcttttggttcttgccagaaaccttatgttgcacttattcatggaattacaatgggtgggagagttggtcgtcagtccatgggcagcttcaagtggctacagaaaagtgtctttttgccatgccagaaaccgcagtagggctgttccctgatgtgggtggaggttatttcttgccatgacttcaaggaaaacttggttacatccttgcattaacaggattcagactaaaatgaaatgatatgtacagagcaggaattgctacacactttgtagattctgaaaagttgggcatgttagaggaagatttgttagccttgaaatctccttcaaaagaaaatattgcagctgtcttagaaaattaccatatggagtctaagattgatgaagacaagtcttttatacttgaggaacacatgggcaaaataaacagttgcttttcagccaatactgtgggacaaattattgaaaacttacagcaagattgttcatcttttgccctagagcaattgaaggtaattaataacatgtctccaacatctctaaagatcacactaaggtaactcctggaggggtcttgaaagaccttgcaagaagtactaactatggagtatcagctaagtcaagcttgtatggagggtcatgacttttatgaaggtgtcagagctgttttaattaataaagaccagagtccaaaatggaaaccagctgatctaaaagaagttactgatgaagatttgaataatcactttaagtctttgggaagcaatgatttgaaattttgaggtgacaggctttcagggtatattctgtagcatgggttggcaatctgcagcacgcaggcc

SEQ ID NO: 1657 - DNA, 783 bp, Homo sapiens
cacttcatggggggacatagggtgaactactacacttcaccaaccagccaggacacattccacacatcaagctctgagagggayggcagatggtcatcctccaggtccagagctatgcccactggcaggacatcaccaggcaccgcatggaggtgatcagcaacttttcccagcagcacttcctcggggaggtggattaccttgtgtgtgcagatgtggacatgaagttcaacaaccatgtgggtgtggagatcctctcttccctgtttgccaccatccatcctggcttctatgggttccatcgggacacctttgcctatgaatgccagcctcagtcccaagcccattttcctgagggtgaaggggacttttattatataggggccttatttggtgggtcagtgctggaggtttacaggctgatcatggcctgtcaccaggtgatgatgattgaccaagccaaccacatcgaggccctgtggcatgacgaaagcctcttaaacaagtacctgcttaaccacaaacccactctcccttgagtacatgtgggattaaaaagtcgatggagtatacgttggatgaatacctggtgggtttgtgcaccatgataaactgcaagagatctgtggtcttggtaaataacaatgaggaaatgtgaactgatgagggaagcttccagaaagagaccagagagggggtgattgccagtcagcccgwatcttcctcctgaaatgctaccctgatttaaaatcagctttacaataaagagtatgactccaccta

SEQ ID NO: 1658 - DNA, 667 bp, Homo sapiens
gaaacatggttccaaaactgttcacttcccaaatttgtctgcttcttctgttggggcttctggctgtggagggctcactccatgtcaaacctccacagtttacctgggctcaggggtttgacgtccatcagtaggaaccagctccaatgcaccaatgcaatgcgggtaattaacaattatcaacggcgatggaaaaaccraaatacttttcttcttgcaacttttgctaatgtagttaatgtttgtggtaacccaactataacctgccctcataacagaactctcaacaattgtcatcatagtggagtccaggtgcctttaatgtactgtaacctcacaactccaagtccacagaatatttcaaactgcaggtatgcgcagacaccagcaaacatgttctatatagttgcatgtgacaacagggatcaacgacgggaccctccacagtatccagtggttccagttcacctgsataccatcatctaagctcctgtatcagcactcctcrtcatcactcatctgccaagctcctcaatcatagccaagatyccatccctccatgtactctgggtgtcagcatctgtcctcttcagtctctatacyccttccacttgcctgagctgaagtgccttgtgaagcctgcaataaactgctttgcaaattcatc

SEQ ID NO: 1659 - DNA, 933 bp, Homo sapiens
gtgagtcctgcaaatcamcgcatacctctaagtgatggaaacagcattcccatcatcagacttggtacctactcagagcctaaattgacccctaagggggccratgacttactcaaggccacacagcaagtaggtgcytacatataccaaaatgaagacacagctggggaggccatcagggggaaaatagcagaaggaaaggtgcagaggaaggatatcttctactgtggaaaactgtgggctacaaatcacaacccagagctggtctgcccgagcctagagaggatgctcaaggtcctccagctagattgtgtggatctttacatcactgaaatacccatggccgctaagccagaagacaaaatctaccctataggtgagaatggcaaatggttatatcacaagtcaaatctgtgtgccacttgggagacttcggaagcttgtaaagatgctggcttggtgaaatccctcggagtatccagttttaacagcaggccagctggagctcatccagaacaacccaggactcaaacccaagccagtcagcaacgaggttgagtgccacccatattacacccaaccaaaacttttgaaatttcgccaacaacatgacattgtcatgattgcatatagccctttggggaccactaggaatccaacctggacaaatatgtcttctctgccttcgttaaaggatgcacttctaaaaaggtgcaataagatcacagctcaagttattttgcgtttcaacatccagcaaggggtggttgtcattcctaaaagctttaatcctgaaaagatcaaggaaaaccttcaggcctttgacttttctctcactgaatcaaggacattgaagcctggagtgaaaatgtccgcttcatagaaatgctcatgtggtgtgatcatcccaaatacccatttcttgatgaatac

SEQ ID NO: 1660 - DNA, 942 bp, Homo sapiens
atgctgagatggaccctgaagaagcactttgttggcaatcctactaatagtgactttgagttgaagacakctgagctcccacccttaaaaaatagagaggtcctgcttgaagctttgttcctcactggggacccttacatgagagtggcagmcaaaagactgaaggaaggtgatacaatgatggggcagcaagtggccagrtttgtggaaagtaaaaacgcagccttaccaacagaactattgtactggctccttcaggctggacagcacactccattgctsatggaaaagatctggaaaacctgccaacagaatggcctgacacagtaccactgtctctggctctggggacagttagcatgacaggcctcactgcctactttggcctacttgacatctgtggtgtgaagggtggagaaacagtgatggttaatgcagcagctggagctgtgggctctgttttggggcarattacaaagctcaagggctgcaaagtggttggagcagtagggtctgaygaaaagactgcctgccttaaaaagcttggatctgatgtctttaactacaagacagtagagtcttkgaagaaactttgaagaaagcctctcctgatggttacaaytgttattttggtaatgtaagtggatggttttcaaacactgttatctcccagatgaagaaatttggaagaattgccacatgtggagctatcagcccacttcccccaggcccaatcccagagattgttagatgtatcaggagcttcacatggaagggttcattgtgacctgctggccaggagatgcccaccaaaaagctctaaaggacttgctgaaatgggtctcagagggtcaaatccagtaccaggaatatatcattgaaggatatgaaaacatgccagctgcatttatgggaatgctgaaaggagataatttggaaaaa

SEQ ID NO: 1661 - DNA, 668 bp, Homo sapiens
ataataccagccatggtcaaccccaccattttcttcgacatcaccatgatagcgagcccttgggctgcgtctgttttgatytgtttgcagagtagtttccaaagacagcagaaaacttttgtgctctgagcacatgagagaaaagatatggttttaaggattcctgctttcacagaattattccagggcttatgtggcagggtggtgacttcacatgccataatgacactggtggcgagcccatctgtggagagaaatttcatgacgagaacttcatcctgaagcctacaggtcctggcatctttttcacggcaaatgctggacccaacacaaacggttcccagtttttcatctgcactgccaagactgagtggctggatggcaagcatgtggtctctggcaaggtgaaagaagaaactgaatattgtggaggccatggagcgctttgggtccaggaaaggcaagaccagcaaggaggtcactattgctgactgtggacaacgctaataagtttgacttgtgttttatcttaaccaccagaccattccttctgtagctcaggagagcaccccccaccccatttgctcacagtattctatcatctttgtgttctcactgcagttccctttgggttctatgggtttccttccatgcctagctggattgca

SEQ ID NO: 1662 - DNA, 548 bp, Homo sapiens
gctgggcgggaactggtcgcgtccggacgcgcgacagcttccacccgcctcaggcagtatcagccgcgccgcagtcggaggaaatagacgcggggcctgaggctcctggacttgagaaaggattcaagacagccgatgatgaaaacacccatgcttgcaagtgaaggttctgcctgtcacttctcgcagaggctgcagaaaaggcccaggaggctgttgatgacatgaacgaccaccaggagaagctggagcaggctgatgcacagaagggcggagaagagggacacgtgccagacaacagctgcagagggctccaggcagayggagttccagagcgaacggtcatacagrtaattcctatcccaaaaaataaggagaccaggggtcaggcgataagtaaggaaagccaaacaggcaaccccagtagaaaactggggtctcccctgaccgggtcatgggactgggctcatgagggtgaccgttactgctccatttgcaattttctgagtatcagaggagcaagatgctaggatgtgtgacccaawgga

SEQ ID NO: 1663 - DNA, 1617 bp, Homo sapiens
atgcatttttccattactataataaccttaatctccttaaccttaccaatcattattaccttcatcaaccctcgcaagaaaaacttgtagccatattatgtaaaaatagctatcgcgtgcacgttcactattagcctcattcccacaacgtttatgtataccaacctagaagccatcacctcaaactgacattgaataacawttcaaacccttaaactctcattaagcttcaaactagactacttctccatgatatttattacagtagcactattcgtcacctgatctattatagaattctcaatattatatataaagtcagatcctaacattagccagttttttcaaatatttacttatcttcctaaccacagtattaattctggttactgccaacaacctttttcaactttttatcagatgagaaggtgtaggaattttgtcttttttactaattggctgatgacatggctgagcagatgctaatacagcagccctccaagcaatcctacgtaatcgcattggtgacattgacttcattttagccatagcacgattcctctcatcctctaatacatgagaacctcaaaaaatatttatcctaaatcctatccccgattttcttccattaattggccttctcttagcagcaacaggaaaatcagctcaacttagtctccacccctgacttctttccgccatggaaggcccaaccccattctcagacctactccactctagcactagagttgtggcagaagttttcctgcttatccgcttccacccattaatagagaataacatgttaatccaaaaccttaccctatgtttaggagctagcaccaccttatttacagcaatcagtgctttaacacaaaatgacataaaaaaattatagtattctccacctcaagtcaactaggccttataatagtcacaattggcattaatcagccacacctagcattcctacacatctgcacccacgcctttttcaaagctatattatttacatgttcaggatccatcatccacaacctcaacaatgaacaagacatccaaaaaacaggaggactatttaagactttaccccttacttcctcctcccttattattgacaggctagcacttacaggtatgcccttcctcacaggcttttactctaaatatctcatcatcaaaagcacaaacacttcatatactaatgcctgaaccctctctattactctcattgccacttctctaataagtttctatagtatccaaattatttccttcaccctaataggacaactctgcatcccaaccctaatcaacattaacgaaaataacccttccctaataaatccaattaaatgccttataatcggcagtatattcactggatttctcatcatcaatagcattatccctacttcatctccccaaacaacaatatcacttgatctaaaacttacagccctaagtgtagccatcctaggactcttactgtcaatagaacttagttttataactaatactcttaaaataaaatactcattacaaatattcaacttctctaatatactaggattttacccaatcacaactcaccgtacaacccaccataaggtatat

SEQ ID NO: 1664 - DNA, 1839 bp, Homo sapiens
atggcacagaactggaaaagaacacgaattcagggaggcattttgctttttgccttcttcctgctggaagataataaacctccttttcctagtgatgagaatcgtccagtagaaagggagaagtggatcaygcagaagagaaaggaagtggatcatgcagaagagaaagaggataactgcaggggtgaagaacttgggaaggcgagagggagtaggagtccgagcctaagcgtcagtggaaccaacaggagggaaggagagaatgctgagcagaaacgtctcacggtgctggtccacctggcagattctgacctcacctggctcagagaaactcttgcccatatttcaagcctcttcagcccacagatcttgaaagggcagttgctactgatccatgcttcatccgatgcctaccccactgtggagagcatcagggatgaggcctttcatggcgaattctactccaagcagaacgtagatcatgccttcctcatgagctttgccacaaagttctctgattacttcctgttaatagaggacaatgtcttttttgcccccaactttgtcacccacattcattcaagggtgaccaccatgaagtccaactcgtgggtgctaatggagttctccaatatgggcttcctyggcaaactcttccacagcagggacctcccactcctggcccatttcctccttctcttctacaaggagaaaccccttgacagcctgatttctcatttccatacgctcctkgtccaggaaagcccaatcctctgcagrcctttcctattctactgcagggtctcctacactgcctttgatcacaagcagaaggccacagcacttcagaaaaagaatgccgatggtcccaacaacccgcctggagctgtcttcactgatatgcaggtttccgatgtgcatttccyctgggaggcctacactctggatgagtcattcttttggacacacaacattagtataggaaaccacctgacagtgattctgaaccatccagcaaacctgagcagggtgcaagtgatgacgggctccattgtggaatgggagcaatttgactttggccagtgtgaagagtggggctctgatgggggtgtgggaggaggaaatgaagtgggagcacagcccgcccccatcctctttgcagcctctggggttcccctcaggggctccagggcaatygcacactcagccctggtctttgggctgccccctcaccaggtctgggctccttctttrttaggaagcttcagacaggctcaggcaggcaggacatttccactgttgccagccctgccccagtgtgatgctctggaacaagatgaccacacgygcgaggcactgccacagaaaatcctccatgggcctgtccactacttttctgacagcctggatgcagctcctcccagaataggcactcacaaccctttaagaacctgcccagacttgatgagggataaaaaaaatcagactccagatcagcaagacaggatagggtacagcgcagactgtaggcgaggaaccagactgaaagccgggcagaacttactgagagtctgcmctacagagaaaaagaaacagtcaaggtctcctgtcccatctatgcgttcttgggggtcagaaactgttggatttctaatagggaccgggtactttggaggtgccctgtcttctcttaggccacttccccttagttttcagttctgcatcaccaaagtmaccaccctctcctccaaggactccatggagccagctgagcatggggacctgggtcttcgggcagttataaatggaagccaatgggacctgcaggaagtcatctag

SEQ ID NO: 1665 - DNA, 1098 bp, Homo sapiens
atgcggtgttccatcaggaaatgcttcatactctcagtgggcatcgtattcctgtggcccttcatcactttgaaaatccccaaggaaactgaagatgatcaaaatgtgatgactgtcaaaggccaagctgagcagaaacgtctcacggtgctggtccacctggcagattctgacctcacctggctcagagaaactcttgcccatatttcaagcctcttcagcccacagatcttgaaagggcagttgctactgatccatgcttcatccgatgcctaccccactgtggagagcatcagggatgaggcctttcatggcgaattctactccaagcagaacgtagatcatgccttcctcatgagctttgccacaaagttctctgattacttcctgttaatagaggacaatgtcttttttgcccccaactttgtcacccacattcattcaagggtgaccaccatgaagtccaactcgtgggtgctaatggagttctccaatatgggcttcctyggcaaactcttccacagcagggacctcccactcctggcccatttcctccttctcttctacaaggagaaaccccttgacagcctgatttctcatttccatacgctcctkgtccaggaaagcccaatcctctgcagrcctttcctattctactgcagggtctcctacactgcctttgatcacaagcagaaggccacagcacttcagaaaaagaatgccgatggtcccaacaacccgcctggagctgtcttcactgatatgcaggtttccgatgtgcatttccyctgggaggcctacactctggatgagtcattcttttggacacacaacattagtataggaaaccacctgacagtgattctgaaccatccagcaaacctgagcagggtgcaagtgatgacgggctccattgtggaatgggagcactgcaccagcttcgccttgctgggacatctttcggaggggcagatggatcagaagatacttctgaaaggtatggggtaccacgtgagctgtgtgaggctggtggtgaaagctggtcaggctggggggctcatgatcaggcatatctacctctgggagaaaaatgacaaa

SEQ ID NO: 1666 - DNA, 2592 bp, Homo sapiens
  misc_feature (1)...(2592): n = A,T,C or G
tcagaatcggtagacattgcgaaccaggttatgaagtgcaaggctgcagttgcttgggaggctggaaagcctctctccatagaggagatagaggtggcacccccaaaggctcatgaagttcgaatcaagatcattgccactgcggtttgccacaccgacgcctataccctgaggggagctgatcctgagggttgttttccagtgatcttgggacatgaaggtrccggaattgaggaaagtgttggcgagggagttactaagctgaaggcgggtgacactgtcatcccactttacatcccacagtgtggagaatgcaaattttgtctatatcctaaaactaacctttgccagaagataagagtcactcaagggaaaggattaatgccagatggtaccagcagatttacttgcaaaggaaagacaattttgcgttacatgggaaccagyacattttctgaatacacagttgtagctgatatctctgttgctwaaatagatcctttagcacctttggataaactctgccttctaggttgtggcatttcagctggtgatgntgctgctgtgaacactgccaaggtggarcctggctctgtttgtgccgtctttggtctggsaggagttggattggcagttatcangggctgtaaagtggctggtgcatcccggrtcattggtgtggacatcaataaagataaatttgcaagggccaaagagttnggagccrctgaatgtattaaccctcagggttttagtaaacccatccaggaagggctcattgagaygacygatggaggagtggactattcctttgaatgtattggtaatgtgaaggtcatgagagcagcacttgaggcttatcacaagggctggggagtcagcgtggtggttggagtagctgcttcaggtgaagaaattgccactcgtccattccagmtggtaacaggtcgcacatdgraaggaactgcctttggaggatggaagagtgtagaaagtgtcccaaagttggtgtctgaatataygtccaaaaaaataaaagttgatgartttgtgactcacaatctgtcttttgrtgaaattaacaaagcctttcaactgatrcattctggaaagagcattcgaactgttgtaaagatttaattcaaaagagwaaaataatgtccawcctgtcgtgatgtgatgggrgcagcttaacaggcagggagaagcgcctccaaactcacagcctcgtagagcttcgcagctaccccagagaatagtgttatgagtgtaattcatgaatctctataatcaacgacaaggataattcagtcatggacctgttttctggacgctcctccacataaataattgctagcttattaaggaatattttaacataataaaagtaatttctayatttgtgtagaaattgtctttgttttatgctgtaatcattgtcatggtttgtctgcccattatcttcattctgtaagggaaatgtaaaggaagcagggcagtggtgggtgtctgaaacctcagaaacattcgttgaagttttaagggtctcagtcccgttgattgaagaacagatcctagccatcagtgacaaagttaatcaggagccaagtctgcttctgtgatattatcttkaagggaggtactgtgccttgttcgtgcctgtaccccaaattcctagtatggcatctgcccctcaggggacactaaaatgtattattgaaacagcattctggacttaaatagktgtatgtgtgtgttggttgtggctgtactatttctagtatagtgaattacatactgaatatccaagttctcagcacctacttttgtcaaatcttaacattttgccacttccacatcacattgccattcctcccctccagaggtaacaattatccaaaatttgatgtttgtcattcctgtgttgttgtactttcactgkgtataacckaaaccatctactctttagtactgttttatatatttttaagccttatacttgctcattctacagcttttctttttttcactcattattgtataattatatgtgaagctttcattcattaattttagtactgtgtagcagtattcaattacgcgaactatcttaattcatctgttctccagttgaaggcatgaagttgttgccagtttctgtattacaacactgtagtggaacattcttctgcattgggctcactacrttagttacttaagatgtgtatcacagaataaacacatttagccttatagacattgccaaatttatcttcaaagtaaatgtgagtttttgtgaattacgtragtgtagaatggtgttttattatgagtttagtttgcattttccacaattactcattaaatccttcattctaatgkacattttattgtgaagaacctgttcatatcctgtgcccaactttgtattgaattatttctttttctctgagtaatttttaggagttcttttattctagacatcaatcatttgtcagttttatatgttgcaaatatcttctagtctatctagtgacttttctttttactttatggtattttgttgaataaagttttaatgtagtcaaataa

SEQ ID NO: 1667 - DNA, 1019 bp, Homo sapiens
tccccttatctgttccttagtctcctttgtatattmcttaatgttgggagttctttgagattatgttctgtgcctttaagttacacattctgcctgaacaatcttaagtaccttattattccrttgtcttaacactgactgacttctctatcttttcttgtgccttgacatctgtcttgagctctagatttttcattattaatctcttgagaaatgaaggttaataatgaattaacctaagttagtaaggcccaagcagcaatcattccacacaagcctgggtttaataaggtcaaaacaggaataatctcacaccaacctgagatttcttacattcctcattactgtgaatggtatagccaaccaccttgaggagcgcaagcctctcttcggcccggaaagatttaagttcgtgaatgcatacgcaagactcggaggtagttccggttccggcgtggccattttcgttggtggtgttcagttgtggcggttgctggtcagtaacagccaagatgctgcggaatctgctggctcttcgtcagattgggcagaggacgataagcactgcttcccgcaggcattttaaaaataaagttccggagaagcaaaaactgttccaggaggatgatgaaattccactgtatctaaagggtggggtagctgatgccctcctgtatagagccaccatgattcttacagttggtggaacagcatatgccatatatgagctggctgtggcttcatttcccaagaagcaggagtgacttcagtcatcccagcaatygcttggttcagtttcattcagctctctatggaccagtaatytgataaataaccgagctcttctttggggatcaatatttattgacttgtagtaactgccaccaataaagcagtctttaccatgctttgtctgattttatcactttatgccaataatttcaacttttggtcagccttgtaaatcttaggtaaggatcaaagaaatgattcttttgccactaaacttgtgaaagcaa

SEQ ID NO: 1668 - DNA, 785 bp, Homo sapiens
ccccagccttagctccakggaccmgcctactgaacatcgaaaaggtcaggaacgagatcacgggactgagacggcgagccggctagagcggatagagccgtactgccgctctagtttttcttttgctctctatggttaggagcgcaagcctctcttcggcccggaaagatttaagttcgtgaatgcatacgcaagactcggaggtagttccggttccggcgtggccattttcgttggtggtgttcagttgtggcggttgctggtcagtaacagccaagatgctgcggaatctgctggctcttcgtcagattgggcagaggacgataagcactgcttcccgcaggcattttaaaaataaagttccggagaagcaaaaactgttccaggaggatgatgaaattccactgtatctaaagggtggggtagctgatgccctcctgtatagagccaccatgattcttacagttggtggaacagcatatgccatatatgagctggctgtggcttcatttcccaagaagcaggagtgacttcagtcatcccagcaatygcttggttcagtttcattcagctctctatggaccagtaatytgataaataaccgagctcttctttggggatcaatatttattgacttgtagtaactgccaccaataaagcagtctttaccatgctttgtctgattttatcactttatgccaataatttcaacttttggtcagccttgtaaatcttaggtaaggatcaaagaaatgattcttttgccactaaacttgtgaaagcaa

SEQ ID NO: 1669 - DNA, 315 bp, Homo sapiens
aacatgcgtgtgggaattcacagcgggcgagtacactgcggtgtccttggtctcaggaagtggcagttcgacgtctggtctaacgatgtcacgctagccaaccacatggaggctggcggcaaggcaggacgcatccacatcaccaaggctacactcaactacctgaatggggactacgaggtggagccaggctgtgggggcgagcgcaacgcctacctcaaggascacagtatcgagaccttcctcatcctgcgctgcacccagaagcggaaagaagagaaggccatgatcgccaagatgaaccgccagagaacc

SEQ ID NO: 1670 - DNA, 3729 bp, Homo sapiens
tggaggaggagctcagagcgtacgggagggggcggacccttgcccctccggcgcttgggccagagtggtgcgggcggcgcgtggcggcgatccccacgtggtggctttctcacgctagccctctttggtcctccttgacgtcccgggcctgtgggcccgctttctgccgagatgccgaaggtcaagtcgggggccatcggccgccgccgcgggcggcaggagcagcgccgggagctgaagagcgctggaggactcatgttcaacacggggattgggcagcacattttgaaaaatcctctcattattaacagcattatcgataaggctgccttaagaccaactgatgtagtgctggaagttggacctggaactggcaacatgactgtaaagttgttagaaaaggcaaaaaaggttgttgcttgtgaacttgacccaaggctagtagctgaacttcacaaaagagttcagggcacgcctgtggccagcaaacttcaagtactggtgggtgatgtgctgaaaacagatttgccattctttgatacttgtgtggcaaatttgccttatcagatctcttcrccttttgtcttcaagctgttgctacatcgaccttttttcaggtgtgctatacttatgtttcaaagagaatttgccctccgactggttgcaaaacctggagataagttatactgcagactctcaattaatacacagctgttggcacgtgtggaccatctaatgaaagtgggaaagaataacttcagaccaccgcccaaggtggaatccagtgttgtaaggatagaacctaagaatccaccaccacccatcaattttcaggaatgggatggtctagtaaggataacctttgttaggaaaaacaagacactctctgctgcatttaaatcaagtgcagtgcaacaactcttggaaaaaaactacagaattcactgttcagtccataatattgtaagttagaaaatgttcctgcagtttcattgatttgttttcttttaaaatgtccatttttattcttgttgatctagcatgagattattttgtacattccataagatccttaaaagacaatatataatgtataactagcacaattttgacttgaattctgacaggtcagtgctgctgtgtatcctgtgaaacagatatgagcaactttgattactccaccctgtcctctaactactgacagttgtttttagccataacaagaatcagattcagcagttacaggttcctcaaagctgtagatatgtgtagcttgcacaacttaaaataattgtgtagtttactgtcctctgaattgtgaccacgtcttgtttcttgctcacatagcagttacaaatatagttattactttctttgtatagaaattgaaataaagttcatatggctcaatagcagattyctggttgtgagcctcatgcgtatcatttgtgtaacagtgtgtgcgatgtgatgtttgctatctttttagcttccagtttaattagaacagagagagaaaggccaattttctttttattttttatgactcagaacctatatggtttaatgtatcacaatactatctccattttctcttttatgggcaaaaagtcattagataatctgcctaagtataatagaaaaatattaagctagattaagaaaaatatttggataaaatatgtgaattaagtgtaaaatccttttggataaaatatgtgaattaagtgtaaaatccttaatattcccaaggcttgggcaggtcacctctttgagaaaaatgaggtggttaaggtcaaatctgtaggaagaaaatgcattattttgaaaggagtaacaattgctttaaaatttaatttacagttgtaattatttgtgaagtctgaaactaataactatttcagaattttaaagaagaaaatggctaatatagacaggattactaattcaaggtattccaagtttttgttaataaagatcagccacttttaattagagatccaagtcttaatgtaaaaatcaggctttccaaagtctcattaacagatatattaaaggtgactattttatgacttactgaactaaaaaaaagagtcaaggtgacctcattaaagatatgtcgttcatttattctgaatcttatattgatagataataccagaagatttcagcatagcagataaaatacagcaaatcctaaccagcacaggttttagtgacaaacgggcccgttccatggacatagatgacttcatcagattgctacatggattcaacgcagaaggtattcatttttcctaggtatttggaaaacagaaattttcaaggtcaagaaaagaaatgaattttgtattttttgtatttgagaagataatgcttttgctttactgagacattatttacttgactatttttggttcaatactactactgttgtcaccatttatgattctgaattttaaagttggaaagttctaagtatcaaagtttttaatatataatgctggtccaatctattcataataatcttcaagttcaggagccgcagagacgcacaactttacacttatcatttctaacagtttattgtataaagatgttactcttctatttactgttatatactgtaaggccttctttaggcctttagctctgttcctccagtaataaaaaagttaaaatatgcttcactagtcacacattccccataccatttcgtgttattcacattccccgtaccatttcttgttattcacatgtacagtaaaacaattgtttcttaaattatttttattttggttctctcattctcttccctatttatcctatacagtgtctgttacgattgcctacctctttcgctatcctatagcgtcagagacttagggttctgggtaagcccaagtctgctactgccaccgtgcagtgccaggcatattaaagggcatgactcccaacatgtaaaatgaggaagctaaactggaatgaaattaacaataaaatkatctttttttatggttcttagggagataactataggcttagcaaaatttcagagggttttgtaattgaaactggtttcaacttcagaaaaacagccatttcccrtaactacaggttcccagtattcctatgatttctggacaattaaaatttccagttcctttttcatataccyggtgcttagttttaagctattttaaaactgtcagactgagaatttcaatagatgtcataaactagttttattagctactatgtttaagtcaatataatactaagtgctgttaatatactataatagagttatagtagctattttgtttctataaaaaattaataaaaatatctttattgatatttggctttttttaatacctaacttaatagaagagtgtttccaattaatttaacaaagccagattttgaaatctggcttcaaagtcatagtaaatgttactacataattaaaataatgcttgttcttaatgtataatccagaacaaaggcatcaagctgcttttgttaaacaaatatgaaatatwcattaagartagatttttttgtttaatttcacaaaactattttgcagagttcacttgtatcatctctatccttatagtaaaaattttaagatttawctcggctttctcaggttatttccctctacccctatgaactgctgagttttagttccttttctggccttcagttttcactatctgtaaa

SEQ ID NO: 1671 - DNA, 3679 bp, Homo sapiens
tggaggaggagctcagagcgtacgggagggggcggacccttgcccctccggcgcttgggccagagtggtgcgggcggcgcgtggcggcgatccccacgtggtggctttctcacgctagccctctttggtcctccttgacgtcccgggcctgtgggcccgctttctgccgagatgccgaaggtcaagtcgggggccatcggccgccgccgcgggcggcaggagcagcgccgggagctgaagagcgctggaggactcatgttcaacacggggattgggcagcacattttgaaaaatcctctcattattaacagcattatcgataaggctgccttaagaccaactgatgtagtgctggaagttggacctggaactggcaacatgactgtaaagttgttagaaaaggcaaaaaaggttgttgcttgtgaacttgacccaaggctagtagctgaacttcacaaaagagttcagggcacgcctgtggccagcaaacttcaagtactggtgggtgatgtgctgaaaacagatttgccattctttgatacttgtgtggcaaatttgccttatcaggtgtgctatacttatgtttcaaagagaatttgccctccgactggttgcaaaacctggagataagttatactgcagactctcaattaatacacagctgttggcacgtgtggaccatctaatgaaagtgggaaagaataacttcagaccaccgcccaaggtggaatccagtgttgtaaggatagaacctaagaatccaccaccacccatcaattttcaggaatgggatggtctagtaaggataacctttgttaggaaaaacaagacactctctgctgcatttaaatcaagtgcagtgcaacaactcttggaaaaaaactacagaattcactgttcagtccataatattgtaagttagaaaatgttcctgcagtttcattgatttgttttcttttaaaatgtccatttttattcttgttgatctagcatgagattattttgtacattccataagatccttaaaagacaatatataatgtataactagcacaattttgacttgaattctgacaggtcagtgctgctgtgtatcctgtgaaacagatatgagcaactttgattactccaccctgtcctctaactactgacagttgtttttagccataacaagaatcagattcagcagttacaggttcctcaaagctgtagatatgtgtagcttgcacaacttaaaataattgtgtagtttactgtcctctgaattgtgaccacgtcttgtttcttgctcacatagcagttacaaatatagttattactttctttgtatagaaattgaaataaagttcatatggctcaatagcagattyctggttgtgagcctcatgcgtatcatttgtgtaacagtgtgtgcgatgtgatgtttgctatctttttagcttccagtttaattagaacagagagagaaaggccaattttctttttattttttatgactcagaacctatatggtttaatgtatcacaatactatctccattttctcttttatgggcaaaaagtcattagataatctgcctaagtataatagaaaaatattaagctagattaagaaaaatatttggataaaatatgtgaattaagtgtaaaatccttttggataaaatatgtgaattaagtgtaaaatccttaatattcccaaggcttgggcaggtcacctctttgagaaaaatgaggtggttaaggtcaaatctgtaggaagaaaatgcattattttgaaaggagtaacaattgctttaaaatttaatttacagttgtaattatttgtgaagtctgaaactaataactatttcagaattttaaagaagaaaatggctaatatagacaggattactaattcaaggtattccaagtttttgttaataaagatcagccacttttaattagagatccaagtcttaatgtaaaaatcaggctttccaaagtctcattaacagatatattaaaggtgactattttatgacttactgaactaaaaaaaagagtcaaggtgacctcattaaagatatgtcgttcatttattctgaatcttatattgatagataataccagaagatttcagcatagcagataaaatacagcaaatcctaaccagcacaggttttagtgacaaacgggcccgttccatggacatagatgacttcatcagattgctacatggattcaacgcagaaggtattcatttttcctaggtatttggaaaacagaaattttcaaggtcaagaaaagaaatgaattttgtattttttgtatttgagaagataatgcttttgctttactgagacattatttacttgactatttttggttcaatactactactgttgtcaccatttatgattctgaattttaaagttggaaagttctaagtatcaaagtttttaatatataatgctggtccaatctattcataataatcttcaagttcaggagccgcagagacgcacaactttacacttatcatttctaacagtttattgtataaagatgttactcttctatttactgttatatactgtaaggccttctttaggcctttagctctgttcctccagtaataaaaaagttaaaatatgcttcactagtcacacattccccataccatttcgtgttattcacattccccgtaccatttcttgttattcacatgtacagtaaaacaattgtttcttaaattatttttattttggttctctcattctcttccctatttatcctatacagtgtctgttacgattgcctacctctttcgctatcctatagcgtcagagacttagggttctgggtaagcccaagtctgctactgccaccgtgcagtgccaggcatattaaagggcatgactcccaacatgtaaaatgaggaagctaaactggaatgaaattaacaataaaatkatctttttttatggttcttagggagataactataggcttagcaaaatttcagagggttttgtaattgaaactggtttcaacttcagaaaaacagccatttcccrtaactacaggttcccagtattcctatgatttctggacaattaaaatttccagttcctttttcatataccyggtgcttagttttaagctattttaaaactgtcagactgagaatttcaatagatgtcataaactagttttattagctactatgtttaagtcaatataatactaagtgctgttaatatactataatagagttatagtagctattttgtttctataaaaaattaataaaaatatctttattgatatttggctttttttaatacctaacttaatagaagagtgtttccaattaatttaacaaagccagattttgaaatctggcttcaaagtcatagtaaatgttactacataattaaaataatgcttgttcttaatgtataatccagaacaaaggcatcaagctgcttttgttaaacaaatatgaaatatwcattaagartagatttttttgtttaatttcacaaaactattttgcagagttcacttgtatcatctctatccttatagtaaaaattttaagatttawctcggctttctcaggttatttccctctacccctatgaactgctgagttttagttccttttctggccttcagttttcactatctgtaaa

SEQ ID NO: 1672 - DNA, 2258 bp, Homo sapiens
tggaggaggagctcagagcgtacgggagggggcggacccttgcccctccggcgcttgggccagagtggtgcgggcggcgcgtggcggcgatccccacgtggtggctttctcacgctagccctctttggtcctccttgacgtcccgggcctgtgggcccgctttctgccgagatgccgaaggtcaagtcgggggccatcggccgccgccgcgggcggcaggagcagcgccgggagctgaagagcgctggaggactcatgttcaacacggggattgggcagcacattttgaaaaatcctctcattattaacagcattatcgataaggctgccttaagaccaactgatgtagtgctggaagttggacctggaactggcaacatgactgtaaagttgttagaaaaggcaaaaaaggttgttgcttgtgaacttgacccaaggctagtagctgaacttcacaaaagagttcagggcacgcctgtggccagcaaacttcaagtactggtgggtgatgtgctgaaaacagatttgccattctttgatacttgtgtggcaaatttgccttatcagatctcttcrccttttgtcttcaagctgttgctacatcgaccttttttcaggtgtgctatacttatgtttcaaagagaatttgccctccgactggttgcaaaacctggagataagttatactgcagactctcaattaatacacagctgttggcacgtgtggaccatctaatgaaagtgggaaagaataacttcagaccaccgcccaaggtggaatccagtgttgtaaggatagaacctaagaatccaccaccacccatcaattttcaggaatgggatggtctagtaaggataacctttgttaggaaaaacaagacactctctgctgcatttaaatcaagtgcagtgcaacaactcttggaaaaaaactacagaattcactgttcagtccataatattgtaagttagaaaatgttcctgcagtttcattgatttgttttcttttaaaatgtccatttttattcttgttgatctagcatgagattattttgtacattccataagatccttaaaagacaatatataatgtataactagcacaattttgacttgaattctgacaggtcagtgctgctgtgtatcctgtgaaacagatatgagcaactttgattactccaccctgtcctctaactactgacagttgtttttagccataacaagaatcagattcagcagttacaggttcctcaaagctgtagatatgtgtagcttgcacaacttaaaataattgtgtagtttactgtcctctgaattgtgaccacgtcttgtttcttgctcacatagcagttacaaatatagttattactttctttgtatagaaattgaaataaagttcatatggctcaatagcagattyctggttgtgagcctcatgcgtatcatttgtgtaacagtgtgtgcgatgtgatgtttgctatctttttagcttccagtttaattagaacagagagagaaaggccaattttctttttattttttatgactcagaacctatatggtttaatgtatcacaatactatctccattttctcttttatgggcaaaaagtcattagataatctgcctaagtataatagaaaaatattaagctagattaagaaaaatatttggataaaatatgtgaattaagtgtaaaatccttttggataaaatatgtgaattaagtgtaaaatccttaatattcccaaggcttgggcaggtcacctctttgagaaaaatgaggtggttaaggtcaaatctgtaggaagaaaatgcattattttgaaaggagtaacaattgctttaaaatttaatttacagttgtaattatttgtgaagtctgaaactaataactatttcagaattttaaagaagaaaatggctaatatagacaggattactaattcaaggtattccaagtttttgttaataaagatcagccacttttaattagagatccaagtcttaatgtaaaaatcaggctttccaaagtctcattaacagatatattaaaggtgactattttatgacttactgaactaaaaaaaagagtcaaggtgacctcattaaagatatgtcgttcatttattctgaatcttatattgatagataataccagaagatttcagcatagcagataaaatacagcaaatcctaaccagcacaggttttagtgacaaacgggcccgttccatggacatagatgacttcatcag

SEQ ID NO: 1673 - DNA, 2541 bp, Homo sapiens
tggaggaggagctcagagcgtacgggagggggcggacccttgcccctccggcgcttgggccagagtggtgcgggcggcgcgtggcggcgatccccacgtggtggctttctcacgctagccctctttggtcctccttgacgtcccgggcctgtgggcccgctttctgccgagatgccgaaggtcaagtcgggggccatcggccgccgccgcgggcggcaggagcagcgccgggagctgaagagcgctggaggactcatgttcaacacggggattgggcagcacattttgaaaaatcctctcattattaacagcattatcgataaggctgccttaagaccaactgatgtagtgctggaagttggacctggaactggcaacatgactgtaaagttgttagaaaaggcaaaaaaggttgttgcttgtgaacttgacccaaggctagtagctgaacttcacaaaagagttcagggcacgcctgtggccagcaaacttcaagtactggtgggtgatgtgctgaaaacagatttgccattctttgatacttgtgtggcaaatttgccttatcagatctcttcrccttttgtcttcaagctgttgctacatcgaccttttttcaggtgtgctatacttatgtttcaaagagaatttgccctccgactggttgcaaaacctggagataagttatactgcagactctcaattaatacacagctgttggcacgtgtggaccatctaatgaaagtgggaaagaataacttcagaccaccgcccaaggtggaatccagtgttgtaaggatagaacctaagaatccaccaccacccatcaattttcaggaatgggatggtctagtaaggataacctttgttaggaaaaacaagacactctctgctgcatttaaatcaagtgcagtgcaacaactcttggaaaaaaactacagaattcactgttcagtccataatattataataccagaagatttcagcatagcagataaaatacagcaaatcctaaccagcacaggttttagtgacaaacgggcccgttccatggacatagatgacttcatcagattgctacatggattcaacgcagaaggtattcatttttcctaggtatttggaaaacagaaattttcaaggtcaagaaaagaaatgaattttgtattttttgtatttgagaagataatgcttttgctttactgagacattatttacttgactatttttggttcaatactactactgttgtcaccatttatgattctgaattttaaagttggaaagttctaagtatcaaagtttttaatatataatgctggtccaatctattcataataatcttcaagttcaggagccgcagagacgcacaactttacacttatcatttctaacagtttattgtataaagatgttactcttctatttactgttatatactgtaaggccttctttaggcctttagctctgttcctccagtaataaaaaagttaaaatatgcttcactagtcacacattccccataccatttcgtgttattcacattccccgtaccatttcttgttattcacatgtacagtaaaacaattgtttcttaaattatttttattttggttctctcattctcttccctatttatcctatacagtgtctgttacgattgcctacctctttcgctatcctatagcgtcagagacttagggttctgggtaagcccaagtctgctactgccaccgtgcagtgccaggcatattaaagggcatgactcccaacatgtaaaatgaggaagctaaactggaatgaaattaacaataaaatkatctttttttatggttcttagggagataactataggcttagcaaaatttcagagggttttgtaattgaaactggtttcaacttcagaaaaacagccatttcccrtaactacaggttcccagtattcctatgatttctggacaattaaaatttccagttcctttttcatataccyggtgcttagttttaagctattttaaaactgtcagactgagaatttcaatagatgtcataaactagttttattagctactatgtttaagtcaatataatactaagtgctgttaatatactataatagagttatagtagctattttgtttctataaaaaattaataaaaatatctttattgatatttggctttttttaatacctaacttaatagaagagtgtttccaattaatttaacaaagccagattttgaaatctggcttcaaagtcatagtaaatgttactacataattaaaataatgcttgttcttaatgtataatccagaacaaaggcatcaagctgcttttgttaaacaaatatgaaatatwcattaagartagatttttttgtttaatttcacaaaactattttgcagagttcacttgtatcatctctatccttatagtaaaaattttaagatttawctcggctttctcaggttatttccctctacccctatgaactgctgagttttagttccttttctggccttcagttttcactatctgtaaa

SEQ ID NO: 1674 - DNA, 327 bp, Homo sapiens
gagaaaatggaagaatttgcccagagctctgatgaagacggtgttgtgttttctctggagtcagctgtgcaaaaccttacagaagaaaaagctgatcttatcacttcggccctggctcagattccacaaaaagttttatggagattcaaaggaaagmaaccaactacattaggtgccaatactcagctctatgtttggatatgccagagtgatcttcakgctataacaaaatacatcttttcacatccacgtacttctgtatctattgccaccttcaatggtcacatattattccatccaatggatgcaactgaaatttatgtatag

SEQ ID NO: 1675 - DNA, 813 bp, Homo sapiens
atgccctgtgaacctgaggctcttagtgcctgggccacacaagcacacagtggcagtggcagctctttccttgctcctgacatcaccaccttgagcatcccctggctccaccaagctccagctatgtccaatatggtgctgcttggcagcagctcactgggacttgcccagaaagtggtgaaaaggtgggggttggagttgggcaaggtggtcactaagaagttcagcaatcaggaggttagcatagtgagtggtgaaagaatgagagaccaagctgcctatgtcattgtgaaaattaatgacaccttgacatctcttgctatgaccaatgtgtgcaaagccacatggtcctctggcatgaaggcagtactctcatgttctccatatgcccaacaagatcaaaaggacaagagtcatcctgcagtttctgcaaaacttgtagccaatgtgttttyagtagctgggagaagtgttggggtggataggatgtttctggttggtgatattaaagactgggtggctgtccttgtggatgacatmcccaatgcatgtggcacaacacatgactctgcagacaagctactgctagatgaagttagacgctttagtcctcacctcgtgggtagagttggagtttccaagttgcagcccgaggcagctgcagaattgaggaactgtctctacctgtggggatggacagcagcatctagcctagaggarccctctgrggtaggtcacactccagttggagttgggtgtgttgcactttggtggggatcctttcgacttggacaggccaccccccctgcccca

SEQ ID NO: 1676 - DNA, 870 bp, Homo sapiens
caagctccagctatgtccaatatggtgctgcttggcagcagctcactgggacttgcccagaaagtggtgaaaaggtgggggttggagttgggcaaggtggtcactaagaagttcagcaatcaggaggttagcatagtgagtggtgaaagaatgagagaccaagctgcctatgtcattgtgaaaattaatgacaccttgacatctcttgctatgaccaatgtgtgcaaagccacatggtcctctggcatgaaggcagtactctcatgttctccatatgcccaacaagatcaaaaggacaagagtcatcctgcagtttctgcaaaacttgtagccaatgtgttttyagtagctgggttggagcatgtcagtactrtggatctgcacactgctcaaatacagggattcttcagtactgctgtgaatgacktacatgtggagcctgcagttctgtgrtggacctgagagaatattgcagactggaggaactgcagcattgtttcacccaaagcaggaggagccaaagagactccaccattcatggacagacctaacatggcttgccttgcaggagaagtgttggggtggataggatgtttctggttggtgatattaaagactgggtggctgtccttgtggatgacatmcccaatgcatgtggcacaacacatgactctgcagacaagctactgtctgctggaaccactaaagtttataccacttcagctctgaggctgttattttacaaacaccagtccccaacaagacaacatgattttgctcttacttgtttagccatgttcctctatagctccatgtattggtctgttttcatgctgctaataaagacatacccgacactgggtaatttac

SEQ ID NO: 1677 - DNA, 735 bp, Homo sapiens
agaaagcacctggctgtcttcacctacgcgagaccttctctggaatgtgatttgctgcgactgcagacatctccatayggcataatgaactcccttgagtgtggctccatcgccagctccctgmagcctccaccaataatccatggctcctccaggaagtgtcgcaggcaggtggccaagaccaacttattaggkagccagaagctcacccctttcttaacaactttgaccacgaagcgcaaatacgatgcaggtaaatccagaggcagagcctgggtccccaggctgctggtaacacgctttgaaatccaggtgagggagccatgcccccacagctcttgcctcaaggatcagatgcattttaccttccagagacgcaggttargctgcacctgaggcagtytgagccacaactgggacagaattcccttggtcttctcttctgatccctcagcagaactgcccctaatgctcagttcatggcaatacaggccttttctctcctgtttctccaaactctcccagcctctgcccagtacctagttccaaagccacttttataatatcctcagttatctgttatagcaacaaccccacttctgggtactaatctgctaccaactacaggaatttaactgttctggagttagggaacagcacacacagacactcrcacaaaacaaactccacctaaaaaaactgtacgagaattccccaaacttctcaactaaataa

SEQ ID NO: 1678 - DNA, 986 bp, Homo sapiens
aaaagtatctcaaaggctgttgagcacctcaataaagctattccgcccgtcttggtgagcaagaagctgtgtgtgtgaaattgggggacagtaacaaactggaagaaggcatgaatttaaatctaactgggaacacatctaaattgggtgcaaagaccttactagaagtgctgcttgctgtctgtgatgttgaagctgctgcaaggagccacctatactgtcacaatgggtcctggctggcaatccaaaagtatctagccaatgccagctttcagcaaggtccatggtagttttcacagtggtaatgggccggcagtgcaggagttcatggttctccctgctagaaccgtaacctcaggaaagccgtgctttaccagaaggatgtcatcaggcagaaatatggcaaagattcctcctaaacactggagctgctatggaatgtgattagaaagcctgrctgtattataagtagtgaatggcatggacaatagcctctagttcttacagttcaggaaatatgaccttgatgttcaagcctccagatgtccttagcagttacatcacttctgaccagctggtaggcaggtacaagtccttcatcaaggactactcrgtggtgtctactgaagatgccttggaccaggatgaccgagaaacttggcagaagctctctgctagtgcaggttatatccatgtgacagggaatcatctccctgtgcccagccggaaaggaactaccaagactacagacaaggactcgggcaactgcctcctactcaaggtgaatcagacagaccccatgatggaatctcttcaggagtgcaaagtggcccaggccgaaggatagggcgctatttcccactgtgttggggtgactgaagattcttgcattgccaaactcatggtgaggatctgtactaggtcaaccaaggctgcggccccttgcccatctaagcacttggccaagtacagccacctcctcaggt

SEQ ID NO: 1679 - DNA, 5100 bp, Homo sapiens
cagagcgaggctggggtagggaggccgactgagcaggagtcgtccgcttatagtggaggctgctaggagccggtcagagggtgagtggggagcaggcgagcgagccacagcaggcaggagggagcgtcgcgcggcgcagaggagcgccggggcagggccgcggcggaaccacagccggagaggggcagcccgagccgggcgccgcagggtccccacccccacccggccggacagtgcccggtgttcccccgtgcgggggrcggcggcggcggctgacgggaccgycgggacmgcgggggtgttgccacctccaccgaggagccggcgcggccgcgggctcctcagagccggggccccgggcccgtgacagacgggcmgaggaagggagagaggcggcggcgacaccatgtcatctcccagtccgggcaagaggcggatggacacggacgtggtcaagctcatcgagagtaaacatgaggttacgatcctgggaggacttaatgaatttgtagtgaagttttatggaccacaaggaacaccatatgaaggcggagtatggaaagttagagtggacctacctgataaataccctttcaaatctccatctataggattcatgaataaaattttccatcccaacattgatgaagcgtcaggaactgtgtgtctagatgtaattaatcaaacttggacagctctctatgatcttaccaatatatttgagtccttcctgcctcagttrttggcctatcctaaccccatagatcctctcaatggtgacgctgcagccatgtacctccaccgaccagaagaatacaagcagaaaattaaagagtacatccagaaatacgccacggaggaggcgctgaaagaacaggaagagggtaccggggacagctcatcggaragctctatgtctgacttttccgaagatgaggcccaggatatggagttgtagtagaaaaagcacctgcttttcagaaagactattatttcctaaccatgagaagcagactataatattcatatttaaaraaagcaattttttttattactaaacaaggtttttatgaataatagcattgatatrtatatattatatatcaccctttagatcttgatttcttggtcatttctcaacctgaggtgcatagcatattcccacattccatttggtagcaatatgcggtctgaatgcatgcattcatgagtccatgtggccaagtcagcctgtgtgctactgaactgtcgaaggaaatagccgctctgataggtagatgtgagtaaaaagaacaggaaaaaattgcttcttttattggtttccaaagaaacaaaccaaaccaaccagctcttggatgtgaagataaaatagtgcttttttgaaatggagaggaaaaasttggggaggaagaggcctgctgtgggggcatcggagccagccatgtaagaatcagagctgctccttcctgtgaatcctaggtggccctatgtcttctgtggagttacagtataaagcagggagctaattaagagtattaaaacttaaaaccattttttgactctgattttaagtacatttttatatgtcagttgctgcccttcacactaccaggccctgcagccacagtgttctgttggagaaacttggggaagtgttttctgaaccagttctttttcttggggtagagcgtgaaatccagacctgtttttgaaaggacagcacaggaggagaaaagtgactgggacgatgcttcctctcatccaaaacacatgcagagtcacatcctcatcctagtgtttggcagtttgagaccgctaccctgaacttaagagctttaaatatgagggttgtgtttctgggggggttatttttttggtgtgtgtgtgtgtgtattgtgcttagaaaggttgcagatttcatcttcacctaccaagaggcggccgcctccttggacaagccgctcatggaccattagacttgagaagacgacccacrtggtgactgcaaagccctgggtacttgccttcatgttctggtttggttttccctttttctgctgctcttggcagcagcctggtcatcatctgcttgtgggagtgggaaatgggtatttggaaatcagtttaaaatgcctgctaatcaaatgtcgactcagctaaccatatgtccaggttgctgcagagtttctttcaaatctgagtgttgcctgctgaactcggaggggagtttggagaaattttagacagcagctctgtgttctttttttgccgcagccaataagataatagcagaattagccaatcctaaaaccttctaaagacgatttttgagcatcccactgggattatttaatttttytttttgacgtgtgtttttagtttagaagtgctgtattccacaaggtttaagtcagtgaggttggaagataccctatcttttttattcaaaaagcacaatcaatcttttgtttgaaaatctatataaagtacaacttgcttttagcatgattattttcctaaataaaaagacaaagaatttacttactttatgttaattacgggcatgaagcaaaaggttttctttaaaaaaaaaaaaaagtgcagtgatgtagggctgtggttagttaaccgtactgagttatccatctagcatctgtggcttgctggaagggtagtattaactatttaacatgtaatggtgtacttcactcttacctagcacgctgtcttctcattgctttgggggagggagggtctctctgctggcactgtctaacttgcttacctgctgactttgcagtttgcttgtgctatgacatttattgtaggtgctatttagggtaggcttaaagtgctgggtggtgatttgagttcaaacaataaaaaattgtattttttcaatattgtawaaacaatagtgttctaattaccttaaaaaaaaataatgaccagttaagaattgcttttgatcttgtcaaaaaactgaatagaccccagtttcgggaaggtgtgtgagcagtgccatgactctgccccttacctaatcccacatctctctaatgataagacattggctcgcctctgaccagagccccagcaccagagagcggaagatgcagaattgtcaaatgacctgctgggggaggttgtaggagtttagcagatttgagtgtggctgcagagagagagagagtgtgtgtatgtgtgcacatgtgtgagagtgtgagcgagagtgtgtgtgtgtccatctaagtstgtgtgatgaaggtgggataaggctcctctgttagtgctggaagctcctgtaattgccgcatggatcccactgtgccctcttgttctgtgcaagtctgtcctgtctgggcactaaccttggtcccatgcatgtttatgttctgggtggggctttgcctctccactgggaaactgacttttgctgggttgaacagagtcccttatgctttttgtcctctccctgcrcctgggagaggtgggagtaggagcccaaacacacaggtacagaaagatctggaagaaggcctggcagtgaatccaaggactctgggcccccaacaatagatggtagcgtaagtctggagcagcggtgtttcaccacmaaatgcctttccaggctgcccttccaacactcaggagagcatccagatccctgggcagaggctctacattcttggctttagaggtggtggcagcggcagcaggtcagagccacttctggcggtttccctcccctttttagtgcccatagtttttggatcctcccttgagttttaccagcacaagccattctttgcccctgttcacataactgagctcaagctcttgccaaacaccaacaagcaagatggttgcaacctggcaacattgaatccaccacccttgggctccctctggaagccccagcaccggggggcttttgggcacagggtcagtggtagccatcttagacactgacatttggctttgtcgtcaatttcatcaccctccttgaggttactgtgcagtttcaaccagcattttatcctagtgaggtcattatcaggagttgccatatcatctctccagtacctaacatttctcatccacttcaaaagctgttctgactgccagctggctgatctaagctcctgaggaatgtctcctctcaaaggaatttttccctccaaaggccccctgaagtcctagttggcattggcctggcacatgctttatgttaggcctcccgttgggatggctgagaatcatgaaagacagatcctccgctagcctctgtgggtcaagtttctggacaccaagtctctgggaactagtgtttgattttaaatggcatgtggcccttccttgtttcagtgacttagaaaagtaaaagccatttaaaaaagttagcaagattttttatcgacttcccaactgggcttccagccttgttgaatgaaatcatctatctctgattgggcgcaacgaactgcatttctttggacttctgaatccatgtttgtgctttctctggcccgtgaacacctcggcgattctgttagggatgggatgagtgggagraagccctttgagaagggggagccggccctgtcatgcgcaggttttccactcatctgaggaagagccagggctctgaatttagcctaacactcatcttggctgtgggcttgggaagaaatggccattatttacagattgtatttggtacatattgtgtgatacttgaaaagataaaagggactgccagcccctaactgaaatctgaagctttttatcgcttatttttcctcgccctgtctcctcccttccacytttctccttgcattgtgatgatctagtaggcacgtctgtcaacaggacacatgcctcctctgactataacctcttaatagttgtgtataatgaaaactgtaaacttttttaaataaacgtgtatataccttggcaaatggctggaccttgatcaataagataatagccctcatgattactctcagctggttttctaaaataccctctctgttctggctcctttgagcagcagacgctggcttcttttggctgagcagctcttagaatgcagat

SEQ ID NO: 1680 - DNA, 4703 bp, Homo sapiens
gggaggccgactgagcaggagtcgtccgcttatagtggaggctgctaggagccggtcagaggcatcgagagtaaacatgaggttacgatcctgggaggacttaatgaatttgtagtgaagttttatggaccacaaggaacaccatatgaaggcggagtatggaaagttagagtggacctacctgataaataccctttcaaatctccatctataggattcatgaataaaattttccatcccaacattgatgaagcgtcaggaactgtgtgtctagatgtaattaatcaaacttggacagctctctatgatcttaccaatatatttgagtccttcctgcctcagttrttggcctatcctaaccccatagatcctctcaatggtgacgctgcagccatgtacctccaccgaccagaagaatacaagcagaaaattaaagagtacatccagaaatacgccacggaggaggcgctgaaagaacaggaagagggtaccggggacagctcatcggaragctctatgtctgacttttccgaagatgaggcccaggatatggagttgtagtagaaaaagcacctgcttttcagaaagactattatttcctaaccatgagaagcagactataatattcatatttaaaraaagcaattttttttattactaaacaaggtttttatgaataatagcattgatatrtatatattatatatcaccctttagatcttgatttcttggtcatttctcaacctgaggtgcatagcatattcccacattccatttggtagcaatatgcggtctgaatgcatgcattcatgagtccatgtggccaagtcagcctgtgtgctactgaactgtcgaaggaaatagccgctctgataggtagatgtgagtaaaaagaacaggaaaaaattgcttcttttattggtttccaaagaaacaaaccaaaccaaccagctcttggatgtgaagataaaatagtgcttttttgaaatggagaggaaaaasttggggaggaagaggcctgctgtgggggcatcggagccagccatgtaagaatcagagctgctccttcctgtgaatcctaggtggccctatgtcttctgtggagttacagtataaagcagggagctaattaagagtattaaaacttaaaaccattttttgactctgattttaagtacatttttatatgtcagttgctgcccttcacactaccaggccctgcagccacagtgttctgttggagaaacttggggaagtgttttctgaaccagttctttttcttggggtagagcgtgaaatccagacctgtttttgaaaggacagcacaggaggagaaaagtgactgggacgatgcttcctctcatccaaaacacatgcagagtcacatcctcatcctagtgtttggcagtttgagaccgctaccctgaacttaagagctttaaatatgagggttgtgtttctgggggggttatttttttggtgtgtgtgtgtgtgtattgtgcttagaaaggttgcagatttcatcttcacctaccaagaggcggccgcctccttggacaagccgctcatggaccattagacttgagaagacgacccacrtggtgactgcaaagccctgggtacttgccttcatgttctggtttggttttccctttttctgctgctcttggcagcagcctggtcatcatctgcttgtgggagtgggaaatgggtatttggaaatcagtttaaaatgcctgctaatcaaatgtcgactcagctaaccatatgtccaggttgctgcagagtttctttcaaatctgagtgttgcctgctgaactcggaggggagtttggagaaattttagacagcagctctgtgttctttttttgccgcagccaataagataatagcagaattagccaatcctaaaaccttctaaagacgatttttgagcatcccactgggattatttaatttttytttttgacgtgtgtttttagtttagaagtgctgtattccacaaggtttaagtcagtgaggttggaagataccctatcttttttattcaaaaagcacaatcaatcttttgtttgaaaatctatataaagtacaacttgcttttagcatgattattttcctaaataaaaagacaaagaatttacttactttatgttaattacgggcatgaagcaaaaggttttctttaaaaaaaaaaaaaagtgcagtgatgtagggctgtggttagttaaccgtactgagttatccatctagcatctgtggcttgctggaagggtagtattaactatttaacatgtaatggtgtacttcactcttacctagcacgctgtcttctcattgctttgggggagggagggtctctctgctggcactgtctaacttgcttacctgctgactttgcagtttgcttgtgctatgacatttattgtaggtgctatttagggtaggcttaaagtgctgggtggtgatttgagttcaaacaataaaaaattgtattttttcaatattgtawaaacaatagtgttctaattaccttaaaaaaaaataatgaccagttaagaattgcttttgatcttgtcaaaaaactgaatagaccccagtttcgggaaggtgtgtgagcagtgccatgactctgccccttacctaatcccacatctctctaatgataagacattggctcgcctctgaccagagccccagcaccagagagcggaagatgcagaattgtcaaatgacctgctgggggaggttgtaggagtttagcagatttgagtgtggctgcagagagagagagagtgtgtgtatgtgtgcacatgtgtgagagtgtgagcgagagtgtgtgtgtgtccatctaagtstgtgtgatgaaggtgggataaggctcctctgttagtgctggaagctcctgtaattgccgcatggatcccactgtgccctcttgttctgtgcaagtctgtcctgtctgggcactaaccttggtcccatgcatgtttatgttctgggtggggctttgcctctccactgggaaactgacttttgctgggttgaacagagtcccttatgctttttgtcctctccctgcrcctgggagaggtgggagtaggagcccaaacacacaggtacagaaagatctggaagaaggcctggcagtgaatccaaggactctgggcccccaacaatagatggtagcgtaagtctggagcagcggtgtttcaccacmaaatgcctttccaggctgcccttccaacactcaggagagcatccagatccctgggcagaggctctacattcttggctttagaggtggtggcagcggcagcaggtcagagccacttctggcggtttccctcccctttttagtgcccatagtttttggatcctcccttgagttttaccagcacaagccattctttgcccctgttcacataactgagctcaagctcttgccaaacaccaacaagcaagatggttgcaacctggcaacattgaatccaccacccttgggctccctctggaagccccagcaccggggggcttttgggcacagggtcagtggtagccatcttagacactgacatttggctttgtcgtcaatttcatcaccctccttgaggttactgtgcagtttcaaccagcattttatcctagtgaggtcattatcaggagttgccatatcatctctccagtacctaacatttctcatccacttcaaaagctgttctgactgccagctggctgatctaagctcctgaggaatgtctcctctcaaaggaatttttccctccaaaggccccctgaagtcctagttggcattggcctggcacatgctttatgttaggcctcccgttgggatggctgagaatcatgaaagacagatcctccgctagcctctgtgggtcaagtttctggacaccaagtctctgggaactagtgtttgattttaaatggcatgtggcccttccttgtttcagtgacttagaaaagtaaaagccatttaaaaaagttagcaagattttttatcgacttcccaactgggcttccagccttgttgaatgaaatcatctatctctgattgggcgcaacgaactgcatttctttggacttctgaatccatgtttgtgctttctctggcccgtgaacacctcggcgattctgttagggatgggatgagtgggagraagccctttgagaagggggagccggccctgtcatgcgcaggttttccactcatctgaggaagagccagggctctgaatttagcctaacactcatcttggctgtgggcttgggaagaaatggccattatttacagattgtatttggtacatattgtgtgatacttgaaaagataaaagggactgccagcccctaactgaaatctgaagctttttatcgcttatttttcctcgccctgtctcctcccttccacytttctccttgcattgtgatgatctagtaggcacgtctgtcaacaggacacatgcctcctctgactataacctcttaatagttgtgtataatgaaaactgtaaacttttttaaataaacgtgtatataccttggcaaatggctggaccttgatcaataagataatagccctcatgattactctcagctggttttctaaaataccctctctgttctggctcctttgagcagcagacgctggcttcttttggctgagcagctcttagaatgcagat

SEQ ID NO: 1681 - DNA, 5301 bp, Homo sapiens
cagagcgaggctggggtagggaggccgactgagcaggagtcgtccgcttatagtggaggctgctaggagccggtcagagggtgagtggggagcaggcgagcgagccacagcaggcaggagggagcgtcgcgcggcgcagaggagcgccggggcagggccgcggcggaaccacagccggagaggggcagcccgagccgggcgccgcagggtccccacccccacccggccggacagtgcccggtgttcccccgtgcgggggrcggcggcggcggctgacgggaccgycgggacmgcgggggtgttgccacctccaccgaggagccggcgcggccgcgggctcctcagagccggggccccgggcccgtgacagacgggcmgaggaagggagagaggcggcggcgacaccatgtcatctcccagtccgggcaagaggcggatggacacggacgtggtcaagctcatcgagagtaaacatgaggttacgatcctgggaggacttaatgaatttgtagtgaagttttatggaccacaaggaacaccatatgaaggcggagtatggaaagttagagtggacctacctgataaataccctttcaaatctccatctataggattcatgaataaaattttccatcccaacattgatgaagcgtcaggaactgtgtgtctagatgtaattaatcaaacttggacagctctctatgatcttaccaatatatttgagtccttcctgcctcagttrttggcctatcctaaccccatagatcctctcaatggtgacgctgcagccatgtacctccaccgaccagaagaatacaagcagaaaattaaagagtacatccagaaatacgccacggaggaggcgctgaaagaacaggaagagggtaccggggacagctcatcggaragctctatgtctgacttttccgaagatgaggcccaggatatggagttgtagtagaaaaagcacctgcttttcagaaagactattatttcctaaccatgagaagcagactataatattcatatttaaaraaagcaattttttttattactaaacaaggtttttatgaataatagcattgatatrtatatattatatatcaccctttagatcttgatttcttggtcatttctcaacctgaggtgcatagcatattcccacattccatttggtagcaatatgcggtctgaatgcatgcattcatgagtccatgtggccaagtcagcctgtgtgctactgaactgtcgaaggaaatagccgctctgataggtagatgtgagtaaaaagaacaggaaaaaattgcttcttttattggtttccaaagaaacaaaccaaaccaaccagctcttggatgtgaagataaaatagtgcttttttgaaatggagaggaaaaasttggggaggaagaggcctgctgtgggggcatcggagccagccatgtaagaatcagagctgctccttcctgtgaatcctaggtggccctatgtcttctgtggagttacagtataaagcagggagctaattaagagtattaaaacttaaaaccattttttgactctgattttaagtacatttttatatgtcagttgctgcccttcacactaccaggccctgcagccacagtgttctgttggagaaacttggggaagtgttttctgaaccagttctttttcttggggtagagcgtgaaatccagacctgtttttgaaaggacagcacaggaggagaaaagtgactgggacgatgcttcctctcatccaaaacacatgcagagtcacatcctcatcctagtgtttggcagtttgagaccgctaccctgaacttaagagctttaaatatgagggttgtgtttctgggggggttatttttttggtgtgtgtgtgtgtgtattgtgcttagaaaggttgcagatttcatcttcacctaccaagaggcggccgcctccttggacaagccgctcatggaccattagacttgagaagacgacccacrtggtgactgcaaagccctgggtacttgccttcatgttctggtttggttttccctttttctgctgctcttggcagcagcctggtcatcatctgcttgtgggagtgggaaatgggtattttagacccaacacaggttctaaatttaaaacaaataataattggaacaaataaaggttcttgtacccagagtgattctacatgggaaaaacaaaccagcttttttcagagagtgaccgaataggaagaagggattcagaaatatgatgtagtagaacatgccctgcaggaagaaaatgttttctctcctgygtatgttaagaggaaatcagtttaaaatgcctgctaatcaaatgtcgactcagctaaccatatgtccaggttgctgcagagtttctttcaaatctgagtgttgcctgctgaactcggaggggagtttggagaaattttagacagcagctctgtgttctttttttgccgcagccaataagataatagcagaattagccaatcctaaaaccttctaaagacgatttttgagcatcccactgggattatttaatttttytttttgacgtgtgtttttagtttagaagtgctgtattccacaaggtttaagtcagtgaggttggaagataccctatcttttttattcaaaaagcacaatcaatcttttgtttgaaaatctatataaagtacaacttgcttttagcatgattattttcctaaataaaaagacaaagaatttacttactttatgttaattacgggcatgaagcaaaaggttttctttaaaaaaaaaaaaaagtgcagtgatgtagggctgtggttagttaaccgtactgagttatccatctagcatctgtggcttgctggaagggtagtattaactatttaacatgtaatggtgtacttcactcttacctagcacgctgtcttctcattgctttgggggagggagggtctctctgctggcactgtctaacttgcttacctgctgactttgcagtttgcttgtgctatgacatttattgtaggtgctatttagggtaggcttaaagtgctgggtggtgatttgagttcaaacaataaaaaattgtattttttcaatattgtawaaacaatagtgttctaattaccttaaaaaaaaataatgaccagttaagaattgcttttgatcttgtcaaaaaactgaatagaccccagtttcgggaaggtgtgtgagcagtgccatgactctgccccttacctaatcccacatctctctaatgataagacattggctcgcctctgaccagagccccagcaccagagagcggaagatgcagaattgtcaaatgacctgctgggggaggttgtaggagtttagcagatttgagtgtggctgcagagagagagagagtgtgtgtatgtgtgcacatgtgtgagagtgtgagcgagagtgtgtgtgtgtccatctaagtstgtgtgatgaaggtgggataaggctcctctgttagtgctggaagctcctgtaattgccgcatggatcccactgtgccctcttgttctgtgcaagtctgtcctgtctgggcactaaccttggtcccatgcatgtttatgttctgggtggggctttgcctctccactgggaaactgacttttgctgggttgaacagagtcccttatgctttttgtcctctccctgcrcctgggagaggtgggagtaggagcccaaacacacaggtacagaaagatctggaagaaggcctggcagtgaatccaaggactctgggcccccaacaatagatggtagcgtaagtctggagcagcggtgtttcaccacmaaatgcctttccaggctgcccttccaacactcaggagagcatccagatccctgggcagaggctctacattcttggctttagaggtggtggcagcggcagcaggtcagagccacttctggcggtttccctcccctttttagtgcccatagtttttggatcctcccttgagttttaccagcacaagccattctttgcccctgttcacataactgagctcaagctcttgccaaacaccaacaagcaagatggttgcaacctggcaacattgaatccaccacccttgggctccctctggaagccccagcaccggggggcttttgggcacagggtcagtggtagccatcttagacactgacatttggctttgtcgtcaatttcatcaccctccttgaggttactgtgcagtttcaaccagcattttatcctagtgaggtcattatcaggagttgccatatcatctctccagtacctaacatttctcatccacttcaaaagctgttctgactgccagctggctgatctaagctcctgaggaatgtctcctctcaaaggaatttttccctccaaaggccccctgaagtcctagttggcattggcctggcacatgctttatgttaggcctcccgttgggatggctgagaatcatgaaagacagatcctccgctagcctctgtgggtcaagtttctggacaccaagtctctgggaactagtgtttgattttaaatggcatgtggcccttccttgtttcagtgacttagaaaagtaaaagccatttaaaaaagttagcaagattttttatcgacttcccaactgggcttccagccttgttgaatgaaatcatctatctctgattgggcgcaacgaactgcatttctttggacttctgaatccatgtttgtgctttctctggcccgtgaacacctcggcgattctgttagggatgggatgagtgggagraagccctttgagaagggggagccggccctgtcatgcgcaggttttccactcatctgaggaagagccagggctctgaatttagcctaacactcatcttggctgtgggcttgggaagaaatggccattatttacagattgtatttggtacatattgtgtgatacttgaaaagataaaagggactgccagcccctaactgaaatctgaagctttttatcgcttatttttcctcgccctgtctcctcccttccacytttctccttgcattgtgatgatctagtaggcacgtctgtcaacaggacacatgcctcctctgactataacctcttaatagttgtgtataatgaaaactgtaaacttttttaaataaacgtgtatataccttggcaaatggctggaccttgatcaataagataatagccctcatgattactctcagctggttttctaaaataccctctctgttctggctcctttgagcagcagacgctggcttcttttggctgagcagctcttagaatgcagat

SEQ ID NO: 1682 - DNA, 5628 bp, Homo sapiens
gtctttggcctccgggaccagggagggaggacgctggttgtcctggagcccgggaagctcaagggctgagagggagccgctgcgcgagtcttccccacctcttcccgatcccggactagcgaacttcggaccaccacgtccctccggggataaagtggggtcgtgggaaaggaggctgtgcttctcctcatgcactggggcctgcggtgtttgtctcgagcgtccaacacactaggatccgggagtccgtcgtcacgctccttggcctcgcggtcgcttgtttgctcggcctgctgggagcgatccggcgctgacagccccgctcagactccgggagccgcttgtgggtctttcggaagataactgaagttcacagttaccagccaagaaaacttgaaaatgagcagccgacggaaacgtgctcctccagtgagggtagatgaggaaaagaggcagcagcttcattggaatatgcatgaggacagaaggaatgaacctatcatcataagtgatgatgacgagcagccctgcccaggttcagatacctcttctgctcattatatcattctaagtgatagtctaaaggaagaagtggctcacagagataagaagaggtgttcaaaagtggtgagcttctcaaaaccaattgaaaaagaagagactgttggtattttttcccctttgtctgtaaagttaaatattgtgatttctccctatcattttgataattcctggaaagcatttctaggagaattaactcttcagcttcttcctgcacagagtttaattgaaaatttttccgaaaggagtattacattgatgagttcagagtcaagcaatcagttcctgatttatgttcattcaaaaggtgaagatgtagagaaacaaaaaaaagaaccgatgagtatttgtgacaagggtattctggtggagtcatccttcagtggtgaaatgttagaagatttggggtggctacaaaagaagagaagaataaaactctatcagaaaccagaaggaaatcacattatcaaggttggaatttatcttttggaagctggcctagcaaaactagacttcttgagtgatgcaaattcaagaatgaaaaagttcaatcagctcatgaagaaagtaatggaaaagttacacaattctattattccagatgtgttggaagaggatgaagatgatccggagagtgagccagagggacaagacattgacgagctgtatcactttgtgaaacaaacacatcagcaagaaacgcagtccatccaagtggatgtccagcatcctgcattgatcccygtgttgagaccctaccaaagagaggctgtcaattggatgctacaacaagagtgtttcagaagcagtcctgctactgaaagtgccctgcacttcttatggcgagagattgttacatctgagggtctgaaactctactataatccatatacaggctgcatcattcgtgagtacccaaattctgggccgcagttgcttggtggaattttagcagatgagatgggtcttggaaagacagtggaggttttggctctgattctgacacatactcgacaagatgtcaagcaagatgctctcactcttcccgagggaaaagtggtgaattattttattccgtcacattattttggaggaaaactgaaaaagacagaaatccagaatatcgaatttgaaccaaaagaaaaagttcaatgccctcctacacgtgtgatgatactgacagctgtgaaagaaatgaatggaaaaaaaggagtgtccatcctttccatctataagtatgtcagttctatatatagatacgatgttcaacggaacaggagtcttttgaaacggatgctgaaatgtttaatttttgaaggtctygtgaaacagatcaaaggccatggtttttctgggacttttacattgggaaagaattacaaggaagaggatatatgtgataaaacaaaaaagcaggcagtagggagtccaaggaaaattcagaaagaaactagaaaatcagggaacaaggacacagattctgaatacttgccatcagacacctctgatgatgatgatgatccttactattattattataagtccaggagaaatcgcagtaaattgaggaaaaagcttgttccatccacaaaaaaaggaaaaagtcaaccatttatcaatcccgattcacaaggtcactgtccagctactagcgactctggaataactgatgttgctatgtctaaaagtacatgtatctctgaattcaaccaagaacatgaaacagaggactgtgctgaatctctaaatcatgctgatagtgatgtaccaccttctaataccatgagtccctttaacacctctgattaccgctttgagtgtatatgtggtgaacttgatcagatagatcgtaagcctcgtgttcaatgcctgaagtgtcacctgtggcaacatgcaaagtgtgtgaattatgatgagaaaaatctgaagatcaagcctttttactgcccccactgccttgttgcaatggaaccagtgtcaacaagagcaactctgatcatctctccaagttccatctgtcaccagtgggtggatgagatcaacaggcatgtgaggtcgtcatctcttcgagtcttggtatatcaaggagtgaagaaagatggctttttacaacctcattttttggcagaacaggatatagttatcattacctatgatgtactgcgttcagaattaaattatgtcgatatcccacatagcaatagtgaggatgggcgtcgcctacggaaccagaagcgctatatggctatcccgagccccctggtagctgtggagtggtggaggatctgccttgatgaagctcagatggttgagtgtcccacagtaaaagctgcagaaatggcccagcgtttgagtgggattaatcgatggtgtatcagtggcactccagtacagagaggattagaggatctttttgggttagtggtctttcttggtattgaaccttactgtgtcaaacactggtgggttcgacttctctatcggccttactgcaagaagaatcctcagcatctctacagctttattgccaagatactgtggaggtctgcaaagaaagatgtgattgaccaaatccaaataccaccacaaaccgaagaaatacactggctccacttttctccagtggaaaggcatttctatcaccgtcagcatgaggtgtgctgccaggatgtggtggtaaaactcaggaagatttctgactgggctctgaagctcagcagcctagacagaaggactgtcacctctatcctgtatccattgctgaggctcagacaggcctgctgtcacccacaggctgttcgtggagagttcttgccactccaaaaaagttttgaacagtctaccttttcttttagcaccatgacaatggaagagctgctgacatctttgcagaagaaatgtggaactgaatgtgaagaagcacatcgacagctagtttgtgctctcaatggcttagcaggcattcatattattaaaggtgagtatgccttggcagcagaattgtacagagaagtgttgcgctcctcggaggaacacaaaggaaaactcaaaactgattcacttcaaagacttcatgctacccataacttgatggaattgttgatagccaggcacccagggataccacctaccttgcgtgatggccgacttgaggaagaggccaaacagctgcgagagcactacatgagcaagtgtaatacagaagttgctgaagcccagcaagctttatatcctgtgcagcagaccatccatgagcttcaaagaaagattcattctaattctccttggtggctaaatgtgatccacagagcaatagaatttactattgatgaggagctagttcagcgagtgcgaaatgaaataaccagcaactacaagcaacaaactggcaagctttctatgtcagagaagttccgtgattgcagaggtcttcagttcttacttacaacacaaatggaagagctaaataaatgccagaagctagtaagagaggctgtaaaaaacctggagggacctccatctcgtaatgttattgagtctgcaacagtctgtcacctccgaccagccagacttcctctcaactgctgtgtcttttgtaaagctgatgaattgttcacagagtatgaatcaaagctattttccaacacagtcaaaggccagactgcaatatttgaggagatgatagaagatgaagaaggactggtggatgatcgagcacctaccaccacccggggtctctgggcaataagtgagacagagcgatctatgaaagcaatactatcatttgcaaaatcacataggtttgatgttgaatttgttgatgaaggaagcacttcaatggatctctttgaagcatggaagaaggaatataagttgcttcatgaatattggatggctctgaggaatcgtgtgtctgctgttgatgaacttgcaatggctacagaacgactaagagtgcgtgatcctagggagccaaagcctaatccgcctgttcttcatatcattgaaccacatgaggtagaacaaaaccgaataaaactactaaatgataaagctgttgctacatcacagcttcagaaaaaacttgggcagcttctttacctaactaatttggagaagtctcaagataaaacatcgggaggtgttaatccagaaccttgyccaatctgtgctcgacagctaggaaaacagtgggcggtactgacctgtggtcactgtttctgtaatgaatgcatttctataattattgaacaatacagcgtgggatctcacagaagctccattaagtgtgcaatctgccgccagaccacatctcacaaagaaatctcgtatgtctttacctcagagaaagcaaaccaggaggaggacatccctgtgaagggcagccattctacaaaagtggaagctgtggtcagaactctgatgaaaatacagcttagagatccaggggccaaagcactcgttttctcaacgtggcaagatgtattagatattatttcaaaagctcttactgacaacaacatggaatttgcacaaatcagtcgtgttaagacatttcaggagaacctttcagcatttaaacgtgatccccaaatcaatattttgctgctgcccctgcacacaggttctaatggattaactatcattgaagcaactcatgttctcttggtggagcccatattgaaccctgcccatgagcttcaggccatagggagggtgcaccgaattggacagacaaaacctactattgtacacagattcttaattaaagcaacaayagaagaaagaatgcaggcaatgctgaaaactgctgagagaaggttttttgaggaacaggcgttattttgttttcatgacatcaccccattctcccacccctggtccctgacaactgccattctacagttgagagatttggtgatttgtgagttgttttttatttactttaaaaattttttgatttgttttttatcatctttttcaatttagagatgttttgcacaagtaaaaattatggggcttattcagtaatacatgtctgtaaggaataaacattaagaaacccaa

SEQ ID NO: 1683 - DNA, 12106 bp, Homo sapiens
gtctttggcctccgggaccagggagggaggacgctggttgtcctggagcccgggaagctcaagggctgagagggagccgctgcgcgagtcttccccacctcttcccgatcccggactagcgaacttcggaccaccacgtccctccggggataaagtggggtcgtgggaaaggaggctgtgcttctcctcatgcactggggcctgcggtgtttgtctcgagcgtccaacacactaggatccgggagtccgtcgtcacgctccttggcctcgcggtcgcttgtttgctcggcctgctgggagcgatccggcgctgacagccccgctcagactccgggagccgcttgtgggtctttcggaagataactgaagttcacagttaccagccaagaaaacttgaaaatgagcagccgacggaaacgtgctcctccagtgagggtagatgaggaaaagaggcagcagcttcattggaatatgcatgaggacagaaggaatgaacctatcatcataagtgatgatgacgagcagccctgcccaggttcagatacctcttctgctcattatatcattctaagtgatagtctaaaggaagaagtggctcacagagataagaagaggtgttcaaaagtggtgagcttctcaaaaccaattgaaaaagaagagactgttggtattttttcccctttgtctgtaaagttaaatattgtgatttctccctatcattttgataattcctggaaagcatttctaggagaattaactcttcagcttcttcctgcacagagtttaattgaaaatttttccgaaaggagtattacattgatgagttcagagtcaagcaatcagttcctgatttatgttcattcaaaaggtgaagatgtagagaaacaaaaaaaagaaccgatgagtatttgtgacaagggtattctggtggagtcatccttcagtggtgaaatgttagaagatttggggtggctacaaaagaagagaagaataaaactctatcagaaaccagaaggaaatcacattatcaaggttggaatttatcttttggaagctggcctagcaaaactagacttcttgagtgatgcaaattcaagaatgaaaaagttcaatcagctcatgaagaaagtaatggaaaagttacacaattctattattccagatgtgttggaagaggatgaagatgatccggagagtgagccagagggacaagacattgacgagctgtatcactttgtgaaacaaacacatcagcaagaaacgcagtccatccaagtggatgtccagcatcctgcattgatcccygtgttgagaccctaccaaagagaggctgtcaattggatgctacaacaagagtgtttcagaagcagtcctgctactgaaagtgccctgcacttcttatggcgagagattgttacatctgagggtctgaaactctactataatccatatacaggctgcatcattcgtgagtacccaaattctgggccgcagttgcttggtggaattttagcagatgagatgggtcttggaaagacagtggaggttttggctctgattctgacacatactcgacaagatgtcaagcaagatgctctcactcttcccgagggaaaagtggtgaattattttattccgtcacattattttggaggaaaactgaaaaagacagaaatccagaatatcgaatttgaaccaaaagaaaaagttcaatgccctcctacacgtgtgatgatactgacagctgtgaaagaaatgaatggaaaaaaaggagtgtccatcctttccatctataagtatgtcagttctatatatagatacgatgttcaacggaacaggagtcttttgaaacggatgctgaaatgtttaatttttgaaggtctygtgaaacagatcaaaggccatggtttttctgggacttttacattgggaaagaattacaaggaagaggatatatgtgataaaacaaaaaagcaggcagtagggagtccaaggaaaattcagaaagaaactagaaaatcagggaacaaggacacagattctgaatacttgccatcagacacctctgatgatgatgatgatccttactattattattataagtccaggagaaatcgcagtaaattgaggaaaaagcttgttccatccacaaaaaaaggaaaaagtcaaccatttatcaatcccgattcacaaggtcactgtccagctactagcgactctggaataactgatgttgctatgtctaaaagtacatgtatctctgaattcaaccaagaacatgaaacagaggactgtgctgaatctctaaatcatgctgatagtgatgtaccaccttctaataccatgagtccctttaacacctctgattaccgctttgagtgtatatgtggtgaacttgatcagatagatcgtaagcctcgtgttcaatgcctgaagtgtcacctgtggcaacatgcaaagtgtgtgaattatgatgagaaaaatctgaagatcaagcctttttactgcccccactgccttgttgcaatggaaccagtgtcaacaagagcaactctgatcatctctccaagttccatctgtcaccagtgggtggatgagatcaacaggcatgtgaggtcgtcatctcttcgagtcttggtatatcaaggagtgaagaaagatggctttttacaacctcattttttggcagaacaggatatagttatcattacctatgatgtactgcgttcagaattaaattatgtcgatatcccacatagcaatagtgaggatgggcgtcgcctacggaaccagaagcgctatatggctatcccgagccccctggtagctgtggagtggtggaggatctgccttgatgaagctcagatggttgagtgtcccacagtaaaagctgcagaaatggcccagcgtttgagtgggattaatcgatggtgtatcagtggcactccagtacagagaggattagaggatctttttgggttagtggtctttcttggtattgaaccttactgtgtcaaacactggtgggttcgacttctctatcggccttactgcaagaagaatcctcagcatctctacagctttattgccaagatactgtggaggtctgcaaagaaagatgtgattgaccaaatccaaataccaccacaaaccgaagaaatacactggctccacttttctccagtggaaaggcatttctatcaccgtcagcatgaggtgtgctgccaggatgtggtggtaaaactcaggaagatttctgactgggctctgaagctcagcagcctagacagaaggactgtcacctctatcctgtatccattgctgaggctcagacaggcctgctgtcacccacaggctgttcgtggagagttcttgccactccaaaaaagcaccatgacaatggaagagctgctgacatctttgcagaagaaatgtggaactgaatgtgaagaagcacatcgacagctagtttgtgctctcaatggcttagcaggcattcatattattaaaggtgagtatgccttggcagcagaattgtacagagaagtgttgcgctcctcggaggaacacaaaggaaaactcaaaactgattcacttcaaagacttcatgctacccataacttgatggaattgttgatagccaggcacccagggataccacctaccttgcgtgatggccgacttgaggaagaggccaaacagctgcgagagcactacatgagcaagtgtaatacagaagttgctgaagcccagcaagctttatatcctgtgcagcagaccatccatgagcttcaaagaaagattcattctaattctccttggtggctaaatgtgatccacagagcaatagaatttactattgatgaggagctagttcagcgagtgcgaaatgaaataaccagcaactacaagcaacaaactggcaagctttctatgtcagagaagttccgtgattgcagaggtcttcagttcttacttacaacacaaatggaagagctaaataaatgccagaagctagtaagagaggctgtaaaaaacctggagggacctccatctcgtaatgttattgagtctgcaacagtctgtcacctccgaccagccagacttcctctcaactgctgtgtcttttgtaaagctgatgaattgttcacagagtatgaatcaaagctattttccaacacagtcaaaggccagactgcaatatttgaggagatgatagaagatgaagaaggactggtggatgatcgagcacctaccaccacccggggtctctgggcaataagtgagacagagcgatctatgaaagcaatactatcatttgcaaaatcacataggtttgatgttgaatttgttgatgaaggaagcacttcaatggatctctttgaagcatggaagaaggaatataagttgcttcatgaatattggatggctctgaggaatcgtgtgtctgctgttgatgaacttgcaatggctacagaacgactaagagtgcgtgatcctagggagccaaagcctaatccgcctgttcttcatatcattgaaccacatgaggtagaacaaaaccgaataaaactactaaatgataaagctgttgctacatcacagcttcagaaaaaacttgggcagcttctttacctaactaatttggagaagtctcaagataaaacatcgggaggtgttaatccagaaccttgyccaatctgtgctcgacagctaggaaaacagtgggcggtactgacctgtggtcactgtttctgtaatgaatgcatttctataattattgaacaatacagcgtgggatctcacagaagctccattaagtgtgcaatctgccgccagaccacatctcacaaagaaatctcgtatgtctttacctcagagaaagcaaaccaggaggaggacatccctgtgaaggtaaagtaggtcaggaacacatagaagcataggtaaggcaatataatataggaagcagtatctgattaagaaagcatgaacatcagaacaagcttgacagtgaataggtagackccactgttgtctgtagatacactgcctgaaagcctcagcttaaccatgtaatttttaattgtaggaggaacacagaacacttattcaaacatggttagcgatagtcatgtacactgtgactaaaatgtaacatcttaaaattacagtttcctatcctctataatatttctatccaccacaagtagacagaggtctggttacattagagatttatttaaagaaagagttttcctcattcttttacacatccctgaatgtaaggaaaaaaggatgtgtctaactaaacagaaggataaaataaattggctaatgaagacagctacaagaaagagggtaatgtgctttttaaacagcatagattgatattccaggataaagccaaattttggctttattttcctaatttttttccatgcttcattcagaattttaagaaaattactataatgtgatatccagactggatctgtaattggatttactgcttttaaggggtatttaataaaaagccaagactattttgctctttcttttccttaaatatgcttttttaatattttttttctaaccaaacttgaacaaaggacacatcggtatctaaatttagtagcaaatgtgggctttaaggaatagagaatgagaattagagaatgatggggttgactcttaagcaagatgaagtattctttattaattccttctgagtttttgatactcctcacttttaagtaatgtgttttttaagtagaatcagctacaagttgaaattcactaccagtagttaagcagttattagggtacccttctcccaagaaaactgtagctgcattaaagaacttttaattgctcttttttcactgttatttgagtaaaacctgaaaatatcagttatattgctctttagtctgttgggataaacagaattccacagttagaataagcattcatccattcattccacacatatatattggacacgtactagcacacaggcagtgtgctaggcctcatagacrcagcatacacataaataaaacagatatggttactacttttgtggagattggtgaaggagtttgagttggggcaggaagcacagatgttaataaataatgtgttataattgtgataagcactrcaaaagaacaaagctggaggcatcatgctacctgatttcaaactatactacaaggctacagtaaccaaaacagaatggtaccaaaacagacatataggcsaatggagcagaacagagacctcagaaataataccacacatctacaactgatctttgacagacccgacaaaaacaaacaatggggaaaggatcctattgggtaaatggggctggaaaaactggctagccatatgcagaaaactgaaaccggaccccttccttacaccttacacaaaaattaactcaagatagattaaagacttaaatgtaaaacccaaaaccctaaaaatccgagaagaaaacctaggcagtaccattcaggacgtaggcatggacaaagacttcatgacaaaaatgccaaaagcaattgcaacaaaagccaaaattgacaaagggaatctaattaaagagcttctgcagagcaaaagaaattatcgtcggtaaacaggcatcctacagaacgggagaaaatttttgcaatcaacccatctgacagaggtctaatatccagaatttacaaggaatgtgaacatatttataagaaaaaaacaaccccatcaaaaattggacaaaggacatgaacagacacttctcaaaagaagatatttacgtggccaacaaacatgaaaaaaagttcatcactgatcatcggagaaatgcaaatcagaaccacaatgagataccatctcacaccagtcagaatggcgattattaaaaagtcaacaaacaatagatgctggcaaggctgtgaagaaataggaacgtttttacactgttggtaggaatataaattagtgcaaccattgtggaagacagtatggcgattcctcaaggatctagaaacagaaatcccataggacccagcaatcccattactgcatatatacccaaaggaatataaatcattctgctataaagacatatacacacaaatgtttactgcagcactatttacaataacaaatatatggaaccaatccaaatgcccatcaatgatagactagataaagaaaatatagtacatatgcaccatgtaatactatgcatccataaaaaggaatgagatcatgtcctttgcagggacatggatgaagctggaagccatcatcctcagcaaactaacacaggaacaaaaaaccaccacatgttctcactcgtaagtgggagttgaacactgagaacacatggacacaaagaagggaacaacacacacaccagggcttgttggggcaggggagtaaggagagggaactaagagggcagataaataggtgcagcaaactaccatggcacatggatacctgtgtaacaagcctgcatattctgtacatgtatcctgtttttttgttttgttttgttttgttttgttttttaaggagaaaaaggaaaaaaagtctctgagggaatgacagttaagcaggtatctaaaggatgaatgatgaattagtcagcctgaggagagaataggttggctcccagacagagaaaaagaaaaccagaagagagccagtgcatggaaaagcctaagacaaggactcaaatggatctgagtggctgaagtgtagaaagcaaggagaaagcagttgaataagcctggagacctaactaggggaccagatgttgaagggccacctgaacatttgagaattttatttttatttaaggagaaagccattaaatattataagcagggatgtatcatgatcaaatttggatttcaaaaagatctctcttgtgtggaaaacagatgatgaggaacagaatagagcagaagaaatttggagagagcagcttaggaggctacagcaggagtaatggtggctttgatttggctgatggcggtagaaatggagagaagtgggtatattctagacatgtttagaataaagttagagaatgttggcagcattagtgaaggaaatttcatagatcacccctggtttctgatgtgaataagcaggtgggtaatggtatagctaatgatacaagatatttggaagaggaatacatttagacatatcatatttaaggtgcctaagacatccaagtagaactatccagaaaagtgttgatatgtggagctggagatacaaaattcggagtcactaatagaaaagtttgcttcagattgagtcctatgaagtccataactttaaaagattgaatcaagttgggagggctggaaaatgagaaggagcaactagggacaggcaatccaggcaggtacgctggcaacaaagaccacagggaagctctgcttcggtgaggagacagtagtgctgaaggtggatcaactacaatgtggactaatttgtctaatgaggtcactgatgactttagaaggagctcttttaatacaaatgtagaggcagaaagcagattgggagggattgcgggatgagcaggaagtcaacaagtagaaaaaatgcccaactgtttcataaacttaactgtgagatagaatcagaattgtaaccagaacctatgaaaacagaaagacatcacttttttgttgttgttctgtttaagacaaaagattcttgagcatgtttagtctccagtgaaaaaaggatagactgaagatataggagaaaggataatttgtaatacaagtttcttgaaaagaaggagaatgttgatgtatagaaagtagagtttcattgaagtcaaataacaggtataaattgggctattgagcacaaaagatataagcataggtgttcttatctgagaatgggagatcatagtcattccagagaggacaggcctgccagatgtgactgtagaagtaggtgactcaagtgaggtggagaagaaaagatgctagaagatgaaacagtgagacctgaattttggatgagctgtccaagcagacagtatgtaatatctagagttgaggtatagagtaaattaggcaccaaagttctttagtgaatgtagggtagggttcaataaattatagcaaagggtagagttgggataactgggcttcagggggctcaaaaaatggaagttgttacacaaatgagaactaatgctctgaaacctgcatttgtggaccagcactcaaatgcaacagtcaaatccttcactcaaaagggctgctgagagaccagtatgcttagaagatagccaggttctaattaaagcagggaagtgaagagcagtatttctacaagaggtagaaaatatgaaacaatttgtttcataaaatacgggttccagggggcgccagtgaaaggtccaggagtgaaaggagaaaaattagagggtaaacaagcaggaaggaagtgcaggacagtatgggaataacagaacaggcaaggatacgtgatgagagcatcatgacctaaggatcatctagtcctgttccctctctgtgaatcccctgaatacattttacagtcagccctgtgtatctgtggatatagccaaccatagatcaaaaatacttggaaaaagaaaaattccatgaagttctaaagagcagaacttgaatttgcagcatgctgagtttacattgaatccacgcaaatgcaatgatgtgtagggattatatgaggtaatctagagatgatttaaagtatacaggaggatgtgtgtatgttatatgcaaatatgacatcattttatataagggccttgagcatcctgggattttggtatccacaggggttttggaagcagtcagtccctcacagatactgagggaggactatatttttaaagcaaataccaaagagttattgaaggaagaagtaggtgacttatggtgcagccctgaggcatttgacagttattctttatcctgcctgcacttaggagctatgctgcttcccagtccctctctccctttcttcccactcctatagtttctcctttcctttccataaagatagtctttcttagcccttccttttttctcttctttctcttcctctggccacagcatctcaagggccacagatggcctttgtggctaagaagaggtggctcacccttaggtgacagcatgcatcacagtacaaggaactggcataagaaagaactgctgtgtcaggttttgcgcagagaggttaaggaagtgattgctctagctactggtaaacagcacagcctctacgaaactgagtcattgagcccatcaaatccaaacacctgttcattttatggcagctttcctagacacccaggatagagattggcacagttacatgtgctgtgctgttggagcagggatatcggtatataaatactgtttattgtgctctcacttctcgctgtctttcatgagtattgattaacacgtgaattaactgaagcatcttttaaaaaaaattaagtttatagaatttactaaagataatttccctttttatcatagatgcacatgtaattacatttccttttcttaaacataagactattgtaccattgtgcgggcaaattttatccctcctcgacgttgtcacactgcttcacgccatgtttaggttggctcttcactgctttttctgttaccatttgtgtctgccacatttgccttgtgcttcctgtctcttcttctgacttctgtcacatttctggcctgctgtctgtcacttcctccttgaaacatcagcttattgtattctgagacttcacccctctcttgtgactctttgaaacttccayataaatgatcatattgcctattttggattagtatgtaaataaagatggctttgtgtaaataattaaggcattattttcaaattttagaaactactagttccaattatttctaaacctagtttttttctttatattactgttgattatcaaatcgttgttctttaacaagcaatactgacaagtaattttttatttaattgaaatgtttatattatctgaaatataaaatttatttctgaaatgattatttcactgtatttatgtcaagattctcagacatagcaaaccatatatcgtacagaatgcttaatcatatagcttttttgtggataaaagatatttggaaakcataaaactattatttattagtagtagacatttttaagtagtatttcttggaaataagagattttacaatgtaaggaatgctgttgattgaccatagatataaaatgaatactgggatcacaaatgtcctgttcggtggatgcacttaagttgaagaccatttcttccctagcaacagtgtgatggtattcctaaatgacctttggaacctactgggcatctcacaaagtaaacaaaattccccttgcaagttctgacaactgccaggcattttggatggtgaagtaggcctcctggcagaacatatggcccacatgtcttgttccctgtgtcttacatttggctaggttttatacaaagcattttgccagtggaaaccctgaccctatatactggtcaagagtcttagataataagaaatttctgtccgggagaaaatagatacagccactacatagatatagtgacagcaatacagtacccttcccacccaccacatgctacacaattgctttttttgtcaaacttttaagtatgtgaccatcaactggcctgctttttaaaataaatatttttgttcaggctctgtctccataaactttgactcattagacctgggatgtggtccagaaatctgcatttttagcaagcatatctcttgataatagagatatcttatacagcctttttgtagagaaaaaaactctgtatctctacattccaactcacagagaagcctagccatactatgtgtagaattctacatgtggaattctattctgttttttttttatttgaatttttgttcatttaatttaaagatcatttgtgacatctgtctcacacttttaaaatataattaaaataaacatctgagtg

SEQ ID NO: 1684 - DNA, 6992 bp, Homo sapiens
gtctttggcctccgggaccagggagggaggacgctggttgtcctggagcccgggaagctcaagggctgagagggagccgctgcgcgagtcttccccacctcttcccgatcccggactagcgaacttcggaccaccacgtccctccggggataaagtggggtcgtgggaaaggaggctgtgcttctcctcatgcactggggcctgcggtgtttgtctcgagcgtccaacacactaggatccgggagtccgtcgtcacgctccttggcctcgcggtcgcttgtttgctcggcctgctgggagcgatccggcgctgacagccccgctcagactccgggagccgcttgtgggtctttcggaagataactgaagttcacagttaccagccaagaaaacttgaaaatgagcagccgacggaaacgtgctcctccagtgagggtagatgaggaaaagaggcagcagcttcattggaatatgcatgaggacagaaggaatgaacctatcatcataagtgatgatgacgagcagccctgcccaggttcagatacctcttctgctcattatatcattctaagtgatagtctaaaggaagaagtggctcacagagataagaagaggtgttcaaaagtggtgagcttctcaaaaccaattgaaaaagaagagactgttggtattttttcccctttgtctgtaaagttaaatattgtgatttctccctatcattttgataattcctggaaagcatttctaggagaattaactcttcagcttcttcctgcacagagtttaattgaaaatttttccgaaaggagtattacattgatgagttcagagtcaagcaatcagttcctgatttatgttcattcaaaaggtgaagatgtagagaaacaaaaaaaagaaccgatgagtatttgtgacaagggtattctggtggagtcatccttcagtggtgaaatgttagaagatttggggtggctacaaaagaagagaagaataaaactctatcagaaaccagaaggaaatcacattatcaaggttggaatttatcttttggaagctggcctagcaaaactagacttcttgagtgatgcaaattcaagaatgaaaaagttcaatcagctcatgaagaaagtaatggaaaagttacacaattctattattccagatgtgttggaagaggatgaagatgatccggagagtgagccagagggacaagacattgacgagctgtatcactttgtgaaacaaacacatcagcaagaaacgcagtccatccaagtggatgtccagcatcctgcattgatcccygtgttgagaccctaccaaagagaggctgtcaattggatgctacaacaagagtgtttcagaagcagtcctgctactgaaagtgccctgcacttcttatggcgagagattgttacatctgagggtctgaaactctactataatccatatacaggctgcatcattcgtgagtacccaaattctgggccgcagttgcttggtggaattttagcagatgagatgggtcttggaaagacagtggaggttttggctctgattctgacacatactcgacaagatgtcaagcaagatgctctcactcttcccgagggaaaagtggtgaattattttattccgtcacattattttggaggaaaactgaaaaagacagaaatccagaatatcgaatttgaaccaaaagaaaaagttcaatgccctcctacacgtgtgatgatactgacagctgtgaaagaaatgaatggaaaaaaaggagtgtccatcctttccatctataagtatgtcagttctatatatagatacgatgttcaacggaacaggagtcttttgaaacggatgctgaaatgtttaatttttgaaggtctygtgaaacagatcaaaggccatggtttttctgggacttttacattgggaaagaattacaaggaagaggatatatgtgataaaacaaaaaagcaggcagtagggagtccaaggaaaattcagaaagaaactagaaaatcagggaacaaggacacagattctgaatacttgccatcagacacctctgatgatgatgatgatccttactattattattataagtccaggagaaatcgcagtaaattgaggaaaaagcttgttccatccacaaaaaaaggaaaaagtcaaccatttatcaatcccgattcacaaggtcactgtccagctactagcgactctggaataactgatgttgctatgtctaaaagtacatgtatctctgaattcaaccaagaacatgaaacagaggactgtgctgaatctctaaatcatgctgatagtgatgtaccaccttctaataccatgagtccctttaacacctctgattaccgctttgagtgtatatgtggtgaacttgatcagatagatcgtaagcctcgtgttcaatgcctgaagtgtcacctgtggcaacatgcaaagtgtgtgaattatgatgagaaaaatctgaagatcaagcctttttactgcccccactgccttgttgcaatggaaccagtgtcaacaagagcaactctgatcatctctccaagttccatctgtcaccagtgggtggatgagatcaacaggcatgtgaggtcgtcatctcttcgagtcttggtatatcaaggagtgaagaaagatggctttttacaacctcattttttggcagaacaggatatagttatcattacctatgatgtactgcgttcagaattaaattatgtcgatatcccacatagcaatagtgaggatgggcgtcgcctacggaaccagaagcgctatatggctatcccgagccccctggtagctgtggagtggtggaggatctgccttgatgaagctcagatggttgagtgtcccacagtaaaagctgcagaaatggcccagcgtttgagtgggattaatcgatggtgtatcagtggcactccagtacagagaggattagaggatctttttgggttagtggtctttcttggtattgaaccttactgtgtcaaacactggtgggttcgacttctctatcggccttactgcaagaagaatcctcagcatctctacagctttattgccaagatactgtggaggtctgcaaagaaagatgtgattgaccaaatccaaataccaccacaaaccgaagaaatacactggctccacttttctccagtggaaaggcatttctatcaccgtcagcatgaggtgtgctgccaggatgtggtggtaaaactcaggaagatttctgactgggctctgaagctcagcagcctagacagaaggactgtcacctctatcctgtatccattgctgaggctcagacaggcctgctgtcacccacaggctgttcgtggagagttcttgccactccaaaaaagttttgaacagtctaccttttcttttagcaccatgacaatggaagagctgctgacatctttgcagaagaaatgtggaactgaatgtgaagaagcacatcgacagctagtttgtgctctcaatggcttagcaggcattcatattattaaaggtgagtatgccttggcagcagaattgtacagagaagtgttgcgctcctcggaggaacacaaaggaaaactcaaaactgattcacttcaaagacttcatgctacccataacttgatggaattgttgatagccaggcacccagggataccacctaccttgcgtgatggccgacttgaggaagaggccaaacagctgcgagagcactacatgagcaagtgtaatacagaagttgctgaagcccagcaagctttatatcctgtgcagcagaccatccatgagcttcaaagaaagattcattctaattctccttggtggctaaatgtgatccacagagcaatagaatttactattgatgaggagctagttcagcgagtgcgaaatgaaataaccagcaactacaagcaacaaactggcaagctttctatgtcagagaaaggtcttcagttcttacttacaacacaaatggaagagctaaataaatgccagaagctagtaagagaggctgtaaaaaacctggagggacctccatctcgtaatgttattgagtctgcaacagtctgtcacctccgaccagccagacttcctctcaactgctgtgtcttttgtaaagctgatgaattgttcacagagtatgaatcaaagctattttccaacacagtcaaaggccagactgcaatatttgaggagatgatagaagatgaagaaggactggtggatgatcgagcacctaccaccacccggggtctctgggcaataagtgagacagagcgatctatgaaagcaatactatcatttgcaaaatcacataggtttgatgttgaatttgttgatgaaggaagcacttcaatggatctctttgaagcatggaagaaggaatataagttgcttcatgaatattggatggctctgaggaatcgtgtgtctgctgttgatgaacttgcaatggctacagaacgactaagagtgcgtgatcctagggagccaaagcctaatccgcctgttcttcatatcattgaaccacatgaggtagaacaaaaccgaataaaactactaaatgataaagctgttgctacatcacagcttcagaaaaaacttgggcagcttctttacctaactaatttggagaagtctcaagataaaacatcgggaggtgttaatccagaaccttgyccaatctgtgctcgacagctaggaaaacagtgggcggtactgacctgtggtcactgtttctgtaatgaatgcatttctataattattgaacaatacagcgtgggatctcacagaagctccattaagtgtgcaatctgccgccagaccacatctcacaaagaaatctcgtatgtctttacctcagagaaagcaaaccaggaggaggacatccctgtgaagggcagccattctacaaaagtggaagctgtggtcagaactctgatgaaaatacagcttagagatccaggggccaaagcactcgttttctcaacgtggcaagatgtattagatattatttcaaaagctcttactgacaacaacatggaatttgcacaaatcagtcgtgttaagacatttcaggagaacctttcagcatttaaacgtgatccccaaatcaatattttgctgctgcccctgcacacaggttctaatggattaactatcattgaagcaactcatgttctcttggtggagcccatattgaaccctgcccatgagcttcaggccatagggagggtgcaccgaattggacagacaaaacctactattgtacacagattcttaattaaagcaacaayagaagaaagaatgcaggcaatgctgaaaactgctgagagaagtatctatatctgaygatgcaagggaattaagagaggtaatgtgtacttttcttatgataagatcactcataaaaacagttggaataagaaagtaaactagtctagttttataygacctggtatattgaacaaacatagatctcagttttggaagggccttcagtatctttagcacatgattcaccaatatcttgttagtaatattttaagtagatggtgaattatattaacccattttttgagtaggcttataccataactttacacctagtaattttgcagtaatacaactccttacaataagttaatgttagacagttatttgtttcttctgcatcttgctactgaaaacaaaaacaatgaaaatattcatatttctattatgtgtaaagtggtgttagtgtaaacagttaactccaaatagattttttaatgtattaatgattaccttaaaattatctgctttccctactcttaatttttcttattgttaaagtttttatatgttgtaagattgatgtatctgtaaatattgcagtttttatgattttgttttattataacatggaaatatggcagggttttttttttaatcattattatactgatgtcttggattctttttctttcccatgttcttgtgtaactagactttttagccagtgatatctgaattcatggtagagttgttatttcactccagttgttcctcccttaagcacgagtctttgaccttttgaacaagagaatgccatgttcacataagcaaatcgttgcaagtgataataacgaagtgtttcttcttctgtgaggaattaatggactttgaaattgctgaataaggagtagcttgttacatcctagccatttgatgtaatacaaatgttcttatttggcttccttttctttgagccttcagagttttaaaggaccctctttgaccctcaggacttattagctcccagttagctgcctggaaaactcatagaaccattccctagatcccatttgtccgagaggctttggtgcttagttaaggtgcattttcttactctaggtttatagagtgatgtaattcaactgaagaaaacacacacatgcttttggtgcttattcttcagttaaaaggaggtatccattgattcttttatatgaaattaaatcaaactgttatttttatagctcttcacatattaaaaagagctttcatgtacatttacgtgtttaatttacccaacaatcttgtgaagttgatataattaatatctttactgttttaaaggtagagaactgaagttcagatatattgaaactttcttaggacatgtagcaagtaaacagtggagcccaggtcccctgactccatatcttacattcttttactaataacatgtcatgctgagattcagaaggcccatgcttataatttaaaaatgagactatttcagtatttctttgtgtttgttttctactattcctttctgagctatgttttagagaaaacaatttgatatgcttcaattttgtaaaatcaaattacatatatataaaaaaacctatctgtattagacaaaaaytgtttttatttatttctgtaagatatcmattaaataaatattttagtgg

SEQ ID NO: 1685 - DNA, 7339 bp, Homo sapiens
gtctttggcctccgggaccagggagggaggacgctggttgtcctggagcccgggaagctcaagggctgagagggagccgctgcgcgagtcttccccacctcttcccgatcccggactagcgaacttcggaccaccacgtccctccggggataaagtggggtcgtgggaaaggaggctgtgcttctcctcatgcactggggcctgcggtgtttgtctcgagcgtccaacacactaggatccgggagtccgtcgtcacgctccttggcctcgcggtcgcttgtttgctcggcctgctgggagcgatccggcgctgacagccccgctcagactccgggagccgcttgtgggtctttcggaagataactgaagttcacagttaccagccaagaaaacttgaaaatgagcagccgacggaaacgtgctcctccagtgagggtagatgaggaaaagaggcagcagcttcattggaatatgcatgaggacagaaggaatgaacctatcatcataagtgatgatgacgagcagccctgcccaggttcagatacctcttctgctcattatatcattctaagtgatagtctaaaggaagaagtggctcacagagataagaagaggtgttcaaaagtggtgagcttctcaaaaccaattgaaaaagaagagactgttggtattttttcccctttgtctgtaaagttaaatattgtgatttctccctatcattttgataattcctggaaagcatttctaggagaattaactcttcagcttcttcctgcacagagtttaattgaaaatttttccgaaaggagtattacattgatgagttcagagtcaagcaatcagttcctgatttatgttcattcaaaaggtgaagatgtagagaaacaaaaaaaagaaccgatgagtatttgtgacaagggtattctggtggagtcatccttcagtggtgaaatgttagaagatttggggtggctacaaaagaagagaagaataaaactctatcagaaaccagaaggaaatcacattatcaaggttggaatttatcttttggaagctggcctagcaaaactagacttcttgagtgatgcaaattcaagaatgaaaaagttcaatcagctcatgaagaaagtaatggaaaagttacacaattctattattccagatgtgttggaagaggatgaagatgatccggagagtgagccagagggacaagacattgacgagctgtatcactttgtgaaacaaacacatcagcaagaaacgcagtccatccaagtggatgtccagcatcctgcattgatcccygtgttgagaccctaccaaagagaggctgtcaattggatgctacaacaagagtgtttcagaagcagtcctgctactgaaagtgccctgcacttcttatggcgagagattgttacatctgagggtctgaaactctactataatccatatacaggctgcatcattcgtgagtacccaaattctgggccgcagttgcttggtggaattttagcagatgagatgggtcttggaaagacagtggaggttttggctctgattctgacacatactcgacaagatgtcaagcaagatgctctcactcttcccgagggaaaagtggtgaattattttattccgtcacattattttggaggaaaactgaaaaagacagaaatccagaatatcgaatttgaaccaaaagaaaaagttcaatgccctcctacacgtgtgatgatactgacagctgtgaaagaaatgaatggaaaaaaaggagtgtccatcctttccatctataagtatgtcagttctatatatagatacgatgttcaacggaacaggagtcttttgaaacggatgctgaaatgtttaatttttgaaggtctygtgaaacagatcaaaggccatggtttttctgggacttttacattgggaaagaattacaaggaagaggatatatgtgataaaacaaaaaagcaggcagtagggagtccaaggaaaattcagaaagaaactagaaaatcagggaacaaggacacagattctgaatacttgccatcagacacctctgatgatgatgatgatccttactattattattataagtccaggagaaatcgcagtaaattgaggaaaaagcttgttccatccacaaaaaaaggaaaaagtcaaccatttatcaatcccgattcacaaggtcactgtccagctactagcgactctggaataactgatgttgctatgtctaaaagtacatgtatctctgaattcaaccaagaacatgaaacagaggactgtgctgaatctctaaatcatgctgatagtgatgtaccaccttctaataccatgagtccctttaacacctctgattaccgctttgagtgtatatgtggtgaacttgatcagatagatcgtaagcctcgtgttcaatgcctgaagtgtcacctgtggcaacatgcaaagtgtgtgaattatgatgagaaaaatctgaagatcaagcctttttactgcccccactgccttgttgcaatggaaccagtgtcaacaagagcaactctgatcatctctccaagttccatctgtcaccagtgggtggatgagatcaacaggcatgtgaggtcgtcatctcttcgagtcttggtatatcaaggagtgaagaaagatggctttttacaacctcattttttggcagaacaggatatagttatcattacctatgatgtactgcgttcagaattaaattatgtcgatatcccacatagcaatagtgaggatgggcgtcgcctacggaaccagaagcgctatatggctatcccgagccccctggtagctgtggagtggtggaggatctgccttgatgaagctcagatggttgagtgtcccacagtaaaagctgcagaaatggcccagcgtttgagtgggattaatcgatggtgtatcagtggcactccagtacagagaggattagaggatctttttgggttagtggtctttcttggtattgaaccttactgtgtcaaacactggtgggttcgacttctctatcggccttactgcaagaagaatcctcagcatctctacagctttattgccaagatactgtggaggtctgcaaagaaagatgtgattgaccaaatccaaataccaccacaaaccgaagaaatacactggctccacttttctccagtggaaaggcatttctatcaccgtcagcatgaggtgtgctgccaggatgtggtggtaaaactcaggaagatttctgactgggctctgaagctcagcagcctagacagaaggactgtcacctctatcctgtatccattgctgaggctcagacaggcctgctgtcacccacaggctgttcgtggagagttcttgccactccaaaaaagttttgaacagtctaccttttcttttagcaccatgacaatggaagagctgctgacatctttgcagaagaaatgtggaactgaatgtgaagaagcacatcgacagctagtttgtgctctcaatggcttagcaggcattcatattattaaaggtgagtatgccttggcagcagaattgtacagagaagtgttgcgctcctcggaggaacacaaaggaaaactcaaaactgattcacttcaaagacttcatgctacccataacttgatggaattgttgatagccaggcacccagggataccacctaccttgcgtgatggccgacttgaggaagaggccaaacagctgcgagagcactacatgagcaagtgtaatacagaagttgctgaagcccagcaagctttatatcctgtgcagcagaccatccatgagcttcaaagaaagattcattctaattctccttggtggctaaatgtgatccacagagcaatagaatttactattgatgaggagctagttcagcgagtgcgaaatgaaataaccagcaactacaagcaacaaactggcaagctttctatgtcagagaaaggtcttcagttcttacttacaacacaaatggaagagctaaataaatgccagaagctagtaagagaggctgtaaaaaacctggagggacctccatctcgtaatgttattgagtctgcaacagtctgtcacctccgaccagccagacttcctctcaactgctgtgtcttttgtaaagctgatgaattgttcacagagtatgaatcaaagctattttccaacacagtcaaaggccagactgcaatatttgaggagatgatagaagatgaagaaggactggtggatgatcgagcacctaccaccacccggggtctctgggcaataagtgagacagagcgatctatgaaagcaatactatcatttgcaaaatcacataggtttgatgttgaatttgttgatgaaggaagcacttcaatggatctctttgaagcatggaagaaggaatataagttgcttcatgaatattggatggctctgaggaatcgtgtgtctgctgttgatgaacttgcaatggctacagaacgactaagagtgcgtgatcctagggagccaaagcctaatccgcctgttcttcatatcattgaaccacatgaggtagaacaaaaccgaataaaactactaaatgataaagctgttgctacatcacagcttcagaaaaaacttgggcagcttctttacctaactaatttggagaagtctcaagataaaacatcgggaggtgttaatccagaaccttgyccaatctgtgctcgacagctaggaaaacagtgggcggtactgacctgtggtcactgtttctgtaatgaatgcatttctataattattgaacaatacagcgtgggatctcacagaagctccattaagtgtgcaatctgccgccagaccacatctcacaaagaaatctcgtatgtctttacctcagagaaagcaaaccaggaggaggacatccctgtgaagggcagccattctacaaaagtggaagctgtggtcagaactctgatgaaaatacagcttagagatccaggggccaaagcactcgttttctcaacgtggcaagatgtattagatattatttcaaaagctcttactgacaacaacatggaatttgcacaaatcagtcgtgttaagacatttcaggagaacctttcagcatttaaacgtgatccccaaatcaatattttgctgctgcccctgcacacaggttctaatggattaactatcattgaagcaactcatgttctcttggtggagcccatattgaaccctgcccatgagcttcaggccatagggagggtgcaccgaattggacagacaaaacctactattgtacacagattcttaattaaagcaacaayagaagaaagaatgcaggcaatgctgaaaactgctgagagaagtcacacgaactcatcagcaaagcattcagaggcctctgtcttgactgtggctgacctggcagacctatttaccaaagaaactgaagagcttgaatgaactacacttgattcattccatggactttagtgtattaataaactttcatagctgtagagcaaagttacaagttttaaaaacccagtagataacagtaacactgttcctagttgaatgaatttgtttattgttctggttatacagtggcttagtacttattgagtcctttkcaatatactgtttccaaaagatctataaagattcttaattttacactcctaataaaacatttattttttgtcccaaatagtatctatatctgaygatgcaagggaattaagagaggtaatgtgtacttttcttatgataagatcactcataaaaacagttggaataagaaagtaaactagtctagttttataygacctggtatattgaacaaacatagatctcagttttggaagggccttcagtatctttagcacatgattcaccaatatcttgttagtaatattttaagtagatggtgaattatattaacccattttttgagtaggcttataccataactttacacctagtaattttgcagtaatacaactccttacaataagttaatgttagacagttatttgtttcttctgcatcttgctactgaaaacaaaaacaatgaaaatattcatatttctattatgtgtaaagtggtgttagtgtaaacagttaactccaaatagattttttaatgtattaatgattaccttaaaattatctgctttccctactcttaatttttcttattgttaaagtttttatatgttgtaagattgatgtatctgtaaatattgcagtttttatgattttgttttattataacatggaaatatggcagggttttttttttaatcattattatactgatgtcttggattctttttctttcccatgttcttgtgtaactagactttttagccagtgatatctgaattcatggtagagttgttatttcactccagttgttcctcccttaagcacgagtctttgaccttttgaacaagagaatgccatgttcacataagcaaatcgttgcaagtgataataacgaagtgtttcttcttctgtgaggaattaatggactttgaaattgctgaataaggagtagcttgttacatcctagccatttgatgtaatacaaatgttcttatttggcttccttttctttgagccttcagagttttaaaggaccctctttgaccctcaggacttattagctcccagttagctgcctggaaaactcatagaaccattccctagatcccatttgtccgagaggctttggtgcttagttaaggtgcattttcttactctaggtttatagagtgatgtaattcaactgaagaaaacacacacatgcttttggtgcttattcttcagttaaaaggaggtatccattgattcttttatatgaaattaaatcaaactgttatttttatagctcttcacatattaaaaagagctttcatgtacatttacgtgtttaatttacccaacaatcttgtgaagttgatataattaatatctttactgttttaaaggtagagaactgaagttcagatatattgaaactttcttaggacatgtagcaagtaaacagtggagcccaggtcccctgactccatatcttacattcttttactaataacatgtcatgctgagattcagaaggcccatgcttataatttaaaaatgagactatttcagtatttctttgtgtttgttttctactattcctttctgagctatgttttagagaaaacaatttgatatgcttcaattttgtaaaatcaaattacatatatataaaaaaacctatctgtattagacaaaaaytgtttttatttatttctgtaagatatcmattaaataaatattttagtgg

SEQ ID NO: 1686 - DNA, 831 bp, Homo sapiens
agtggggttcccggcgcggggaatgtcccgggtggagctggctgagtcgcgcgctctgctccacccgacggggctgtgtgtgctgggcctggctcgcggcgaaccgagatggcagagcagtcggacgaggccgtgaagtactayaccctagaggagattcagaagcacaaccacagcaagagcacctggctgatcctgcaccacaaggtgtacgatttgaccaaatttctggaagagcatcctggtggggaagaagttttaagggaacaagctggaggtgacgctactgagaactttgaggatgtcgggcactctacagatgccagggaaatgtccaaaacattcatcattggggagctccatccagatgacagaccaaagttaaacaagcctccrgaaccttaaaggcggtgtttcaaggaaactcttatcactactattgattctagttccagttggtggaccaactgggtgatccctgccatctctgcagtggccgtygccttgatgtatcgcctatamatggcagaggactgaacacctcctcagaagtcagcgcaggaagagcctgctttggacacgggagaaaagaagccattgctaactacttcaactgacagaaaccttcacttgaaaacaatgattttaatatatctctttctttttcttccgacattagaaacaaaacaaaaagaactgtcctttctgcgctcaaatttttcgagtgtgcctttttattcatctactttwttttgatgtttccttaatgtgtaatttacttattataagcatgatcttttaaaaatatatttggcttttaaagtatgcacc

SEQ ID NO: 1687 - DNA, 807 bp, Homo sapiens
agtggggttcccggcgcggggaatgtcccgggtggagctggctgagtcgcgcgctctgctccacccgacggggctgtgtgtgctgggcctggctcgcggcgaaccgagatggcagagcagtcggacgaggccgtgaagtactayaccctagaggagattcagaagcacaaccacagcaagagcacctggctgatcctgcaccacaaggtgtacgatttgaccaaatttctggaagagcatcctggtggggaagaagttttaagggaacaagctggaggtgacgctactgagaactttgaggatgtcgggcactctacagatgccagggaaatgtccaaaacattcatcattggggagctccatccagatgacagaccaaagttaaacaagcctccrgaaactcttatcactactattgattctagttccagttggtggaccaactgggtgatccctgccatctctgcagtggccgtygccttgatgtatcgcctatamatggcagaggactgaacacctcctcagaagtcagcgcaggaagagcctgctttggacacgggagaaaagaagccattgctaactacttcaactgacagaaaccttcacttgaaaacaatgattttaatatatctctttctttttcttccgacattagaaacaaaacaaaaagaactgtcctttctgcgctcaaatttttcgagtgtgcctttttattcatctactttwttttgatgtttccttaatgtgtaatttacttattataagcatgatcttttaaaaatatatttggcttttaaagtatgcacc

SEQ ID NO: 1688 - DNA, 1518 bp, Homo sapiens
ttgtctgtgctagaaaggwtaaaggatcaagcagatggaaaatacatcttagtcactgggatcacgcccactcctctaggagaagggaagagcacagttatgactgggctgtgcaggctctgaccatgcatctgcatgtcacctcttttgcctgtatgaggcaaccttcccaaggaccgacttttggagtggaaagaaggagtcatgggtagtggatatgccctggtcatcccatggaagagttcaaccttcacttgactggagatatccatgccatcacagttgccaataattcaccagctgctgtcatcgacccaaggattctgcatgaaaatgcacagacaaggctctatccaagcacactgacagaagaggaaatgagtaaatttgcctgcctcgacgccgacccttccaccatcgcatggcagagagtattgaataaaaatgaccgatttctacaaaaaaaatagatgttggcatggatacagtgatctacactgccgagaaaggctcctcttggcaaacgctgtttgatatcgtggtggccagcgagatcatggtggtgctggcccttatgaacagcctctcagacatgaagacatggctgggaaggatggtggtggccatctgatgcagaccctggaatggacacctgtattcatgcacgtgggcccttttgctaacatcacccatggcaattcttcagtgttggctgacaaaattgccctgaaactggttggtgaagaaggatttgtagagactgaagctggctttggtgctgacattgaaatggagaaatttttcaacaagtgtcaagcttccagcttggtgcccagtgtggttgtgttggtggcaacggtgcaagctctgaagatgcacagtggcgggccaagtgtaactgctggtgttcctctgaagaaagaacataaagaaaagaacatccagttggtggcagatggctgccgtaacctctagcagcaaattcagattgctcagctctttggggttcccattatggtgactctgaaggtcttcaagwtccacaccggtgctgagattgacttggtgtgtgagctcacaaaacgggctggtgcctttgatgcagtcccttgctatcactggtcagttggtagaaaacggttgcggacttggcttgggctttgagagaagctgcaagtaaaagaagttgattccatttcccgtatgatgttcagcttccaattgtggaaaagataagaaccatggccctggctgtctatggagccaacgatatccagctctctcctgaggcacaaaccaaaatagattgttaacactcaacagggtttcagaaatttgcccatctgcatggcaaggacccacctttctctgtctcaccaacctgacaaaaaaagtgtgccaagggacttcattgtacctctcagtgatgtcaaggccagcataggtgctgggttcattggccctttggttagaacaatgagcatcgtgccaggactgccacttggccctgctttcatg

SEQ ID NO: 1689 - DNA, 897 bp, Homo sapiens
atgaccctggcaccctctgaccaagayctttttgtctttaggtctggccctcctgctgcagctggattctctgatgtggcggccactgctgagaaccgccagaccttcatgcagtcagccatacagtttctgaggaagtacaacttcgatgggctggacattgattgggagtatccaggcaatcgtggcagcccagctgacacccagcagctcttcaccatcctgttgaaggaaatgtatgaggcttttgagcaagagtctacccgcagcaaaaagcccagattgttgatgtctgctgctgtgtcagctggcaaaggtaccattgagactgcctgccagatccctgagatgtcgagttctactccttcccgaaaggagccacctaggtgtggaatgccccctgggaggtgccttatgtctacaaggggaaccagtggatcaggtacgacarctccaagagcttcaccctcaagcaccccatccatgacgccgcccctggctgcctggccgcccccgctgcgcccccggccctctctactgatggatggagcatcgcccccaagcggtgacccaccgccagtacaggccaccactgtctggtcagggacagaagcggggcagtcaccaccgtctccagatgagcgacaccgggagtctttaaatctcccgactgagaagctctttgtgtccagatcggaggtgctcctaacgtacacagtgcctcagtgcctctgtcttatggctatgagctttacagcaatctttctcaaactgcaaaaaggcctaactaaaatccatcttgcaattcctagcacttgcgttaagggatttggagccatatacagaaaagatctagaagaaaaagaagggagctacagtgcactgtcacagtgctga

SEQ ID NO: 1690 - DNA, 4446 bp, Homo sapiens
  misc_feature (1)...(4446): n = A,T,C or G
acctcaactcctagtgaaggaagcactccattaacaagtatgtctgtcagcaccatgccggtggccagttctgaggctagcaccctttcaacaactcctgttgacaccagcacacctgtgaccacttctagtgaagccagttcatcttctacaactcctgaaggcactacaataacaagtatgtctgtcagcaccacactggtggccagttctgaggctagcaccctttcaacaactcctgttgactccaacactcctgtgaccacttcaactgaagccacttcatcttctacaactgcggaaggtaccagcatgccaacctcaacttatactgaaggaagcactccattaacaagtatgcctgtcaacaccacactggtggccagttctgaggctagcaccctttcaacaactcctgttgacaccagcacacctgtgaccacttcaactgaagccagttcctctcctacaactgctgatggtgccagtatgccaacctcaactcctagtgaaggaagcactccattaacaagtatgcctgtcagcaaaacgctgttgaccagttctgaggctagcaccctttcaacaactcctcttgacacaagcacacatatcaccacttctactgaagccagttgctctcctacaaccactgaaggtaccagcatgccaatctcaactcctagtgaaggaagtcctttattaacaagtatacctgtcagcatcacaccggtgaccagtcctgaggctagcaccctttcaacaactcctgttgactccaacagtcctgtgaccacttctactgaagtcagttcatctcctacacctgctgaagcaactcctgttgacaccagcacmcctgtgaccacttctactgaagccacttcatctcctacaactgctgaaggtaccagcataccaacctcgactcctagtgaaggaacgactccattaacaagcacacctgtcagccacacgctggtggccaattctgaggctagcaccctttcaacaactcctgttgactccaacactcctttgaccacttctactgaagccagttcacctcctcccactgctgaaggtaccagcatgccaacctcaactcctagtgaaggaagcactccattaacacgtatgcctgtcagcaccacaatggtggccagttctgaaacgagcacactttcaacaactcctgctgacaccagcacacctgtgaccacttattctcaagccagttcatcttctacaactgctgacggtaccagcatgccaacctcaacttatagtgaaggaagcactccactaacaagtgtgcctgtcagcaccaggctggtggtcagttctgaggctagcaccctttccacaactcctgtcgacaccagcacacctgtcaccacttctactgaagccagttcatctcctacaactgctgaaggtaccagcataccaacctcacctcccagtgaaggaaccactccgttagcaagtatgcctgtcagcaccacgctggtggtcagttctgaggctaacaccctttcaacaactcctgtggactccaaaactcaggtggccacttctactgaagccagttcacctcctccaactgctgaagttaccagcatgccaacctcaactcctggagaaagaagcactccattaacaagtatgyctgtcagacacacgccagtggccagttctgaggcyarcaccctttcaacawctccyrttgacwmcagcacasctgtgaccacttctgctgaaaycagttcctctcctacaaccgctgaagccggttcatctcctacaactgctgacgatactagcatgccaacctcaacttatagtgaaggaagcactccactaacaagtgtgcctgtcagcaccatgccggtggtcagttctgaggctagcacccattccacaactcctgttgacaccagcacacctgtcaccacttctactgaagccagttcatctcctacaactgctgaaggtaccagcataccaacctcacctcctagtgaaggaaccactccgttagcaagtatgcctgtcagcaccacgccggtggtcagttctgaggctggcaccctttccacaactcctgttgacaccagcacacctatgaccacttctactgaagccagttcatctcctacaactgctgaagatatcgtcgtgccaatctcaactgctagtgaaggaagtactctattaacaagtatacctgtcagcaccacgccrgtggccagtcctgaggctagcaccctttcaacaactcctgttgactccaacagtcctgtggtcacttctactgaaatcagttcatctgctacatccgctgaagtggccagttctgaggctagcaccgtttcaacaactgctgttgacaccagcatacctgtcaccacttctactgaagccagttcctctcctacaactgctgaagttaccagcatgccaacctcaactcctagtgaaacaagtactccattaactagtatgcctgtcaaccacacgccagtggccagttctgaggctggcaccctttcaacaactcctgttgacaccagcacacctgtgaccacttctactaaagccagttcatctcctacaactgctgaaggtgtgcctgtcagcaccacaccggtgaccagttctgcaatcagcaccctttcaacaactcctgttgacaccagcacacctgtgaccacttctactgaagcccattcatctcctacaacttctgaaggtaccagcatgccaacctcaactcctagtgaaggaagtactccattaacatatatgcctgtcagcaccatgctggtagtcagttctgaggatagcaccctttcagcaactcctgttgacaccagcacacctgtgaccacttctactgaagccacttcatctacaactgctgaaggtaccagcattccaacctcaactcctagtgaaggaatgactccattaactagtgtacctgtcagcaacacgccggtggccagttctgaggctagcatcctttcaacaactcctgttgactccaacactcctttgaccacttctactgaagccagttcatctcctcccactgctgaaggtaccagcatgccaacctcaactcctagtgaaggaagcactccattaacargtatgcctgtcagcaccacaacggtggccagttctgaaacgarcaccctttcaacaactcctgctgacaccagcacacctgtgaccacttattctcaagscagttcatctcctccaattgctgacggtactagcatgccaacctcaacttatagtgaaggaagcactccactaacaaatatgtctttcagcaccacgccagtggtcagttctgaggctagcaccctttccacaactcctgttgacaccagcacacctgtcaccacttctactgaagccagtttatctcctacaactgctgaaggtaccagcataccaacctcaagtcctatgaggtgcctcaatggaggaacttggaaagaaaacttctgtgattgttccacaggctttggagatgggtgccagaatacggcctctcgctgcaagaatggaggcacctgggatgggctcaagtgccagtgtcccaacctctattatggggagttgtgtgaggaggtggtcagcagcattgacatagggccaccggagactatctctgcccaaatggaactgactgtgacagtgaccagtgtgaagttcaccgaagagctaaaaaaccactcttcccaggaattccaggagttcaaacagacattcacggaacagatgaatattgtgtattccgggatccctgagtatgtcggggtgaacatcacaaagctacgtcttggcagtgtggtggtggagcatgacgtcctcctaagaaccaagtacacaccagaatacaagacagtattggacaatgccaccgaagtagtgaaagagaaaatcacaaaagtgaccacacagcaaataatgattaatgatatttgctcaggtgaactcnnctgtaacctcggcaagtgccagatgtctctaagtggacctcagtgcctktgcgtgaccacggaaactcactggtacagtggggagacctgtaaccagggcacccagaagagtctggtgtacggcctcgtgggggcaggggtcgtgctgatgctgatcatcctggtagctctcctgatgctcgttttccgctccaagagagaggtgaaacggcaaaagtacagattgtctcagttatacaagtggcaagaagaggacagtggaccagctcctgggaccttccaaaacattggctttgacatctgccaagatgatgattccatccacctggagtccatctatagtaatttccagccctccttgagacacatagaccctgaaacaaagatccgaattcagaggcctcaggtaatgacgacatcattt

SEQ ID NO: 1691 - DNA, 3167 bp, Homo sapiens
ctcccaggctggggcaggtcgcagcgccctcgcctgctggggctcggagggatgggccgtgtccgagcgctggcggagcacgggccgccgcggcgcgcgcctaccccmgcgcacacgtgcatgcagtgagccaggtgcatcagctgcacccgccctcgggcttcgcgcgcctccgctggagcccagctagcctcgcggctccggggccgaccgggtcggaactgctgcgtccccattccggacgcagagagcgcgcggggcgccggcgccgccggttaaagtgccgcggggcaggggccgggccgcggccacccgctcctcccgctccggtcccgactgtcgggctctcggccgagtcgccccggacaatcacaaagagtgtgtaggccagccccggtcacagagtgcaccgtatcctgtcacttctggatgtgagggagaagtgagtcatctcattcccctccgtggatcagaggacttggactagatagaagcatgtggtgtctcctacgaggcctgggccggcctggagccctggcacggggagcyctggggcagcagcaatccctgggtgcccgggccctggccagcgcaggctctgagagccgggacgmgtacagctatgtggtrgtgggcgcgggctcggcgggctgcgtgctggctgggaggctcacggaggaccccgccgagcgcgtgctgctgctggaggccgggcccaaggacgtgckcgcggggagcaagcggctctcgtggaagatccacatgcccgcggccctggtggccaacctgtgcgacgacaggtacaactggtgctaccacacagaggtgcagcggggcctggacggccgcgtgctrtactggccacgcggccgcgtctggggtggctcctcatccctcaatgccatggtctacgtccgtgggcacgccgaggactacgagcgctggcagcgccagggcgcccgcggctgggactacgcgcactgcctgccctacttccgcaaggcgcagggccacgagctgggcgccagccggtaccggggcgccgatggcccgctgcgggtgtcccggggcaagaccaaccacccgctgcactgcgcattcctggaggccacgcagcaggccggctacccgctcaccgaggacatgaatggcttccagcaggagggcttcggctggatggacatgaccatccatgaaggyaaacggtggagcgcrgcctgtgcctacctgcacccagcactgagccgcaccaacctcaaggccgaggccgagacgcttgtgagcagggtgctatttgagggcacccgtgcagtgggcgtggagtatgtcaagaatggccagagccacagggcttatgccagcaaggaggtgattctgagtggaggtgccatcaactctccacagctgctcatgctstctggcatcgggaatgctgatgacctcaagaaactgggcatccctgtggtgtgccacctacctggggttggccagaacctgcaagaccacctggagatctacattcagcaggcatgcacccgccctatcaccctccattcagcacagaagcccctgcggaaggtctgcattggtctggagtggctctggaaattcacaggggagggagccactgcccatctggaaacaggtgggttcatccgcagccagcctggggtcccccacccggacatccagttccatttcctgccatcccaagtgattgaccacgggcgggtccccacccagcaggaggcttaccaggtacatgtggggcccatgcggggcacsagtgtgggctggctcaaactgagaagtgccartccccaagaccaccctgtgatccagcccaactacttgtcaacagaaactgatattgaggatttccgtctgtgtgtgaagctcaccagagaaatttttgcacaggaagccctggctccgttccgagggaaagagctccagccaggaagccacattcagtcagataaagagatagatgcctttgtgcgggcaaaagccgacagcgcctaccacccstcgtgcacctgtaagatgggccagccctccgatcccactgccgtggtggatccgcagacaagggtcctcggggtggaaaacctcagggtcgtcgatgcctccatcatgcctagcatggtcagcggcaacctgaacgcccccacaatcatgatcgcagagaaggcagctgacattatcaaggggcagcctgcactctgggacaaagatgtccctgtctacaagcccaggacgctggccacccagcgctaagacagttgctgctggaggatgaccagggaagccccctrataagccaagagggccagcacagcccttgctcccaggctcctgcctgaaactatctagcacactaggacccaggtggtaccctactcagtggctgagaattggataaagtcttgggaaatgagacaagtactgggcagtgaatccagctccttttccccagcctttccctgtgggccatttggggaaggccagcattcagcctgagatgttcctccctgcctcctggagggacagaaggggaggatggttaactcctgccrcrtcctttttcttgtgttcacgtggcattctctaacccagggcagtggttccttcccaggccatgcacagaggctgggtgcctgccagacccacggagggttcgcgaaggaaggggcatcctccttcttgagctgcaagctttagctgaggcagtaagtcacacagtagttagttcagcctgggctggcacataagtccccagtgtccctgttgagaggggaaagttgcctgctggttgaaaaactggcttttcctttctcgctgcctaatttcactctcagagtgaggcaggtaactggggctccactgggtcactctgagagggttgtggctctggttcttattaaaccagggccaggtgcagggctcacacctgtaatcccagcactttgggaaggtcacttgagctcaggagttcaagaccagcctgggcaacatagtgagaccttgtctctggaaaacaattagctgggcatggtggtacacacctgtagtcccagctacttgggaggctgaggcgggaggatggctttagcccaggaggttgaggctcctgtgaaccctgatggcaccactgcactccagcc

SEQ ID NO: 1692 - DNA, 1198 bp, Homo sapiens
ctcccaggctggggcaggtcgcagcgccctcgcctgctggggctcggagggatgggccgtgtccgagcgctggcggagcacgggccgccgcggcgcgcgcctaccccmgcgcacacgtgcatgcagtgagccaggtgcatcagctgcacccgccctcgggcttcgcgcgcctccgctggagcccagctagcctcgcggctccggggccgaccgggtcggaactgctgcgtccccattccggacgcagagagcgcgcggggcgccggcgccgccggttaaagtgccgcggggcaggggccgggccgcggccacccgctcctcccgctccggtcccgactgtcgggctctcggccgagtcgccccggacaatcacaaagagtgtgtaggccagccccggtcacagagtgcaccgtatcctgtcacttctggatgtgagggagaagtgagtcatctcattcccctccgtggatcagaggacttggactagatagaagcatgtggtgtctcctacgaggcctgggccggcctggagccctggcacggggagcyctggggcagcagcaatccctgggtgcccgggccctggccagcgcaggctctgagagccgggacgmgtacagctatgtggtrgtgggcgcgggctcggcgggctgcgtgctggctgggaggctcacggaggaccccgccgagcgcgtgctgctgctggaggccgggcccaaggacgtgckcgcggggagcaagcggctctcgtggaagatccacatgcccgcggccctggtggccaacctgtgcgacgacaggtacaactggtgctaccacacagaggtgcagcggggcctggacggccgcgtgctrtactggccacgcggccgcgtctggggtggctcctcatccctcaatgccatggtctacgtccgtgggcacgccgaggactacgagcgctggcagcgccagggcgcccgcggctgggactacgcgcactgcctgccctacttccgcaaggcgcagggccacgagctgggcgccagccggtaccggggcgccgatggcccgctgcgggtgtcccggggcaagaccaaccacccgctgcactgcgcattcctggaggccacgcagcaggccggctacccgctcaccgaggacatgaatggcttccagcaggagggcttcggctggatggacatgaccatccatgaag

SEQ ID NO: 1693 - DNA, 2859 bp, Homo sapiens
ggctagtccctctgagacgagcgagcaggcagccattcactaacatgcgttcattccacaatcacaaagagtgtgtaggccagccccggtcacagagtgcaccgtatcctgtcacttctggatgtgagggagaagtgagtcatctcattcccctccgtggatcagaggacttggactagatagaagcatgtggtgtctcctacgaggcctgggccggcctggagccctggcacggggagcyctggggcagcagcaatccctgggtgcccgggccctggccagcgcaggctctgagagccgggacgmgtacagctatgtggtrgtgggcgcgggctcggcgggctgcgtgctggctgggaggctcacggaggaccccgccgagcgcgtgctgctgctggaggccgggcccaaggacgtgckcgcggggagcaagcggctctcgtggaagatccacatgcccgcggccctggtggccaacctgtgcgacgacaggtacaactggtgctaccacacagaggtgcagcggggcctggacggccgcgtgctrtactggccacgcggccgcgtctggggtggctcctcatccctcaatgccatggtctacgtccgtgggcacgccgaggactacgagcgctggcagcgccagggcgcccgcggctgggactacgcgcactgcctgccctacttccgcaaggcgcagggccacgagctgggcgccagccggtaccggggcgccgatggcccgctgcgggtgtcccggggcaagaccaaccacccgctgcactgcgcattcctggaggccacgcagcaggccggctacccgctcaccgaggacatgaatggcttccagcaggagggcttcggctggatggacatgaccatccatgaaggyaaacggtggagcgcrgcctgtgcctacctgcacccagcactgagccgcaccaacctcaaggccgaggccgagacgcttgtgagcagggtgctatttgagggcacccgtgcagtgggcgtggagtatgtcaagaatggccagagccacagggcttatgccagcaaggaggtgattctgagtggaggtgccatcaactctccacagctgctcatgctstctggcatcgggaatgctgatgacctcaagaaactgggcatccctgtggtgtgccacctacctggggttggccagaacctgcaagaccacctggagatctacattcagcaggcatgcacccgccctatcaccctccattcagcacagaagcccctgcggaaggtctgcattggtctggagtggctctggaaattcacaggggagggagccactgcccatctggaaacaggtgggttcatccgcagccagcctggggtcccccacccggacatccagttccatttcctgccatcccaagtgattgaccacgggcgggtccccacccagcaggaggcttaccaggtacatgtggggcccatgcggggcacsagtgtgggctggctcaaactgagaagtgccartccccaagaccaccctgtgatccagcccaactacttgtcaacagaaactgatattgaggatttccgtctgtgtgtgaagctcaccagagaaatttttgcacaggaagccctggctccgttccgagggaaagagctccagccaggaagccacattcagtcagataaagagatagatgcctttgtgcgggcaaaagccgacagcgcctaccacccstcgtgcacctgtaagatgggccagccctccgatcccactgccgtggtggatccgcagacaagggtcctcggggtggaaaacctcagggtcgtcgatgcctccatcatgcctagcatggtcagcggcaacctgaacgcccccacaatcatgatcgcagagaaggcagctgacattatcaaggggcagcctgcactctgggacaaagatgtccctgtctacaagcccaggacgctggccacccagcgctaagacagttgctgctggaggatgaccagggaagccccctrataagccaagagggccagcacagcccttgctcccaggctcctgcctgaaactatctagcacactaggacccaggtggtaccctactcagtggctgagaattggataaagtcttgggaaatgagacaagtactgggcagtgaatccagctccttttccccagcctttccctgtgggccatttggggaaggccagcattcagcctgagatgttcctccctgcctcctggagggacagaaggggaggatggttaactcctgccrcrtcctttttcttgtgttcacgtggcattctctaacccagggcagtggttccttcccaggccatgcacagaggctgggtgcctgccagacccacggagggttcgcgaaggaaggggcatcctccttcttgagctgcaagctttagctgaggcagtaagtcacacagtagttagttcagcctgggctggcacataagtccccagtgtccctgttgagaggggaaagttgcctgctggttgaaaaactggcttttcctttctcgctgcctaatttcactctcagagtgaggcaggtaactggggctccactgggtcactctgagagggttgtggctctggttcttattaaaccagggccaggtgcagggctcacacctgtaatcccagcactttgggaaggtcacttgagctcaggagttcaagaccagcctgggcaacatagtgagaccttgtctctggaaaacaattagctgggcatggtggtacacacctgtagtcccagctacttgggaggctgaggcgggaggatggctttagcccaggaggttgaggctcctgtgaaccctgatggcaccactgcactccagcc

SEQ ID NO: 1694 - DNA, 2136 bp, Homo sapiens
atgctgtcctcatccccaaaccctggctcctcctgtgacctgctgtcctcatccccaaaccctggctcctcctgcgacctgctgtcctcatccccaaaccctggctcctcctgcgacatgctgtcctcatccccaaaccctggcttctcctgcgacctgctgtccttataccccaaccctggctcctcctgcgacctgctgtcctcatccccaaaccctggctcctcctgcgacctgctgtcctcatccccaatccctggctcctcctgcgacmtgctgtcctcatccccaatccctggctcctcctgcgacatgctgtcctcatccccaaaccctggctcctcctgcgacctgctgtccttataccccaaccctggctcctcctgcgacctgctgtcctcatccccaaagcctggctcctcctgcgacacactgtcctcatccccaatccctggctcctcctgcgacctgctgtcctcatccccaaaccctggcttctcctgcgacacgctgtccttataccccatcccgggctcctcctgcgacctgctgtcctcatccccaaaccctggctcctcctgcgacctgctgtcctcatccccaaaccctggctcctcctgtgacctgctgtcctcatccccaaaccctggctccttctgcgacctgctgtcctcatccccaaaccctggctcctcctgtgatctgctgtccttataccccaaccctggctcctcctgcgacctgctgtccctatacccccaccctggctcctcctgcgacatgctgtcctcatccccaatccctggctcctcctgccacctgctgtcctcatccccaaaccctggctcctactgcgacctgctgtcctcatccccaaaccctggctcctcctgtgacctgctgtcctcatccctaatccctggctcctcctgcgacctgctgtcctcatccccaaaccctggctcctcctgtgacctgctgtcctcatccctaatccctggctcctcctgtgacctgctgtcctcatccccaaaccctggctcctcctgcgacctgctgtcctcatccctaatccctggctcctcctgtgacctgctgtcctcatccccaaaccctggctcctcctgcgacctgcggtcctcatccccaaaccctggctcctcctgcgacctgcggtcctcatccccaaaccctggctcctcctgcgacacactgtcctcatccccaaaccctggctcttcctgcgacctgctgtcctcatccccaaaccctggctcctcctgcgacctgctgtccttataccccaaccctggctcctcctgcgacctgctgtcctcatccccaaaccctggctccccctgcgacctgctgtcctcatccccaaaccctggctcctcctgcgacatgctgtcatcatccccaaaccctagctcctcctgcgacctgctgtccttataccccaaccctggctcctcctgcgacctgctgtccttataccccaaccctggctcctcctgcgacctgctgtccttataccccatccctggctcctcctgcgacctgctgtcctcatccccaaaccctggctcctcctgcgacctgctgtccttataccccaaccctggctcctcctgggacctgctgtcctcatcccgaaaccctggctcctcctgcgacatgctgttctcatccccaaaccctggctcttcctgcgacctgctgtcctcatccccaaccctggctcctcctgcgacctgctgtccttataccccaaatcctggctcttcctgcgacctgctgtcctcatccccaatccctggctcctcctgcgacacgctgtcctcatccccaaaccctggctggcttctccacaggtctgtcctgcatgctcctaggttcactgattcactcagcacaagttatccgaggacctggagggtgccaggtgccacaccagcactgagccagcagtgggagctggggcagacgaggctcggagctcatggctcccccaattacaacgacctctcaggtgacctcaaggctggccgagggccatctcatcacccctgtcctgttggccccaggcagccaagaccgatggctttggcccrtccttcccagggcccctggcag

SEQ ID NO: 1695 - DNA, 1838 bp, Homo sapiens
tgagtggtggctgggtatggaggcgaaggcggcacccaagccagctgcaagcggcgcgtgctcggtgtcggcagaggagaccgaaaagtggatggaggaggcgatgcacatggccaaagaagccctcgaaaatactgaagttcctgttggctgtcttatggtctacaacaatgaagttgtagggaaggggagaaatgaagttaaccaaaccaaaaatgctactcgacatgcagaaatggtggccatcgatcaggtcctcgattggtgtcgtcaaagtggcaagagtccctctgaagtatttgaacacactgtgttgtatgtcactgtggagccgtgcattatgtgtgcagctgctctccgcctgatgaaaatcccgctggttgtatatggctgtcagaatgaacgatttggtggttgtggctctgttctaaatattgcctctgctgacctaccaaacactgggagaccatttcagtgtatccctggatatcgggctgaggaagcagtggaaatgttaaagaccttctacaaacaagaaaatccaaatgcaccaaaatcgaaagttcggaaaaaggawtgtcagaaatcttgaacatgttctgatgaaagaaccaagtgacccaaagtgacctggacaagattcatagactgaaagctgttgacatcgttgaatcatatgtttatatattgtttttaatctgcaggaaaatggtgtctctcatcatttgctctgttaagggaacaaattagcactttttagaagtctgacaattgtaaacagttattagcttttccagaagctgattcccattttaagatgggggaaaattaaggtttgaggttttagaaattagcaagtagtgcatacccttctagccacaagtgcccagtccaggmaagtgctgacttcttagagaatgtgtggccagacccagggacctggagtgtgtttggactgcagtttgccaccctgagaacaccttctccaggactggcatttcagaatcagattcttcattttttgcagctacgatgttcttccagggcactgggggctgtgacttctctctaaattgtatataagttgtgtatatagagaccataattatatggtccttagaaaagactttgcttttataaagcatttagaaaaaatgcatacttttaaaacaagtgcttgagttgtcacttaaaaattatagcatattgctataataaaaccttatttatgtcttatttgaagatgaatagtcttaaaagataaagacataaatgggacaattgttattgagcaaaaaaccaaattatcccaccctcatggagcttatattctagcaaggggagatggatatgatagattacacagtttattggaggacaataagagttatggcaaaaagcaaaaggaacacagggtaaaggggataggtgccatttggtggtgagaatgctgactgaaaaatagaatgrtcaatttaatctgaaacaaatggttatttcttttataatccatataataaatttaaaatctaaaatgtaaaattttgaacacaacactggaaagggtatccacagcaggaagtccccagttcacctccatgactacagggcagctttgcacagccctctgggcgcactgtgtgcctctgcccagaagggggcctcgccgttccaccagaagctcagctccaggccctggaggggctgctgctcctcagttgcatttcttcagtagattcatttccttgatgcaaagcatctgtatttgttggttctgtcatttgagcgatgtctctgacttgtttgttttgaattacattacaggctggaatgtaatt

SEQ ID NO: 1696 - DNA, 483 bp, Homo sapiens
atggctgggcaaaaacttgctctaaaaatcattgactgggtaacttcttgggagagcatatcccgaaaccaaaaggccattgctaattccctgacatcctggaatgagattcttacctccagactggctattttacctgagaataaaccatctattgactggacttactacaaggccagtgtggccaaggcaggcttggtggatgactttgagaagaagtttaatgccctgaagtttcctgtaccagaggataaatacactgcccaagtggatgctgaagaaaaagaagatgtgaaaacttgtgctgagtggatgtctctctcaaaggccaggattggacaatatgagaaacagctggagaagatgaggaacttaattccatttgatcagacgaccactgaggacctgaatgaagctttcccagaaaccaaatgagacaagagaaagtatccctaytggcctcaccaaccaatcgagaattta

SEQ ID NO: 1697 - DNA, 1669 bp, Homo sapiens
ggagatatttggctatcggactcaaggctgccggaaaagtctctgccttgccggatccatcttctcatttggaatcctccccttggtgttttactggagaccagcatggcacgtatgggcacattgtgtcccatgttccttgcaagaagcagacactgtgttgctgaggacaacggatgaattccaaatttactcttggaaaaaggtaatatggatctacctgtcagcattaaacagcgcatttggtctcactcctgaccaccctctcatgacagatgaggagtatatcataaatagagccataagaaagccagacctaaaggtgagatgcatcaaagtgcagaaaataagatatgtttggaactacttagaaggacagttccagaaaattggttctttggaagactggctyagttctgccaagatacatcaaaaatttggatcaggcttgacaagagaagaacaggagattaggaggttaatrtgtgggcctaatactatcgatgttgaagttacaccaatttggaaactgctcatcaaggaggttctaaatccattttatatatttcaactcttcagtgtctgtttgtggtttagtgaagactataaggaatatgcttttgccatcataatcatgtccataatttccatatctttgacagtatatgatctcagagagttaaatagatgttggattgtatttttgtgggaaaataacctgactcaactctgtctcctcccactttcagctggagttcaagagctggaatcacgcgtcctggtgcctggagatttattaattttgacagggaacaaagtgctaatgccatgtgatgccgttctgattgaaggcagctgtgtggtggatgaaggcatgctgacaggagaaagtattccagtcaccaaaactccgttacccaagatggatagctctgtgccctggaaaacacagagtgaagcggattacaagcggcatgtcctcttctgtggaacagaggttatccaggccaaggcagcttgctctgggaccgtgagagccgtggtactgcagactggattcaacactgcaaagggagaccttgtgagatccattctctaccctaagccagtgaattttcagttgtacagggatgccatcaggttcctcctgtgccttgtaggaacagccaccattgggatgatctatactctgtgtgtctatgtgcttagyggggaacctccagargaggtggtgaggaaagcccttgacgtcatcacaattgcggttcctccggctctacctgctgctctgaccacaggcattatctatgcccagaggaggctgaagaagagaggcatcttytgcattagcccccagaggatcaacgtatgtggacagttaaaccttgtctgctttgacaagacaggcaccttaacaagggayggcttggacctctggggagtcgtgtcctgtgataggaatggctttcaggaagttcacagctttgcctcaggccaggctttgccatggggcccactgtgtgcagcgatggccagctgccactctctgatccttcttgatgggaccatccagggagaccctctggacctcaaaatgtttgaagccaccacctgggtaagcctctgctcttcagagaatctgagaagcttcttcaatgccagagcaaca

SEQ ID NO: 1698 - DNA, 3469 bp, Homo sapiens
ggagatatttggctatcggactcaaggctgccggaaaagtctctgccttgccggatccatcttctcatttggaatcctccccttggtgttttactggagaccagcatggcacgtatgggcacattgtgtcccatgttccttgcaagaagcagacactgtgttgctgaggacaacggatgaattccaaatttactcttggaaaaaggtaatatggatctacctgtcagcattaaacagcgcatttggtctcactcctgaccaccctctcatgacagatgaggagtatatcataaatagagccataagaaagccagacctaaaggtgagatgcatcaaagtgcagaaaataagatatgtttggaactacttagaaggacagttccagaaaattggttctttggaagactggctyagttctgccaagatacatcaaaaatttggatcaggcttgacaagagaagaacaggagattaggaggttaatrtgtgggcctaatactatcgatgttgaagttacaccaatttggaaactgctcatcaaggaggttctaaatccattttatatatttcaactcttcagtgtctgtttgtggtttagtgaagactataaggaatatgcttttgccatcataatcatgtccataatttccatatctttgacagtatatgatctcagagagttaaatagatgttggattgtatttttgtgggaaaataacctgactcaactctgtctcctcccactttcagctggagttcaagagctggaatcacgcgtcctggtgcctggagatttattaattttgacagggaacaaagtgctaatgccatgtgatgccgttctgattgaaggcagctgtgtggtggatgaaggcatgctgacaggagaaagtattccagtcaccaaaactccgttacccaagatggatagctctgtgccctggaaaacacagagtgaagcggattacaagcggcatgtcctcttctgtggaacagaggttatccaggccaaggcagcttgctctgggaccgtgagagccgtggtactgcagactggattcaacactgcaaagggagaccttgtgagatccattctctaccctaagccagtgaattttcagttgtacagggatgccatcaggttcctcctgtgccttgtaggaacagccaccattgggatgatctatactctgtgtgtctatgtgcttagyggggaacctccagargaggtggtgaggaaagcccttgacgtcatcacaattgcggttcctccggctctacctgctgctctgaccacaggcattatctatgcccagaggaggctgaagaagagaggcatcttytgcattagcccccagaggatcaacgtatgtggacagttaaaccttgtctgctttgacaagacaggcaccttaacaagggayggcttggacctctggggagtcgtgtcctgtgataggaatggctttcaggaagttcacagctttgcctcaggccaggctttgccatggggcccactgtgtgcagcgatggccagctgccactctctgatccttcttgatgggaccatccagggagaccctctggacctcaaaatgtttgaagccaccacctgggaaatggctttttctggggacgatttccacatcaagggagtgccggcacatgccatggtagttaagccctgcagaacagccagccaggtcccagtggaaggaattgcaatcctgcatcagttcccattctcatcggcactgcaaagaatgacagtcattgtccaagagatgggaggtgaccgactggcattcatgaaaggtgcaccagagagggtggccagcttttgccaacctgagacagtacccactagttttgttagcgawcttcagatttacacgacacagggcttccgagtcatagcactggcctacaagaagctggaaaatgaccatcacgctactaccttgacgagggagacggtagaatcagacctgatatttctggggctgctgatcttggagaatcgattgaaggaagagacaaaacctgtcttggaagagctcatctcagcccggataaggactgtaatgatcacaggtgacaatcttcagactgcaataacagtggccagaaaatctggaatggtttctgaaagccagaaagtcattctcattgaggcaaatgaaaccaccgggtcctcatcagcatctatatcttggacgttagtagaagagaagaaacacattatgtatgggaatcaggacaattacattaacatcagggatgaagtctctgataaaggcagagaaggaagttaccattttgccctaactggaaaatcctttcatgttataagtcaacatttcagcagcctactgccaaagatattgatcaatgggaccatctttgcaagaatgtctcctgggcagaagtccagtctggtggaagaatttcagaaactggattactttgtaggtatgtgtggtgatggagccaatgactgtggggctctgaaaatggctcatgtgggcatctcattatcagagcaggaggcatctgtggcctcacctttcacttccaaaactccaaacattgagtgcgtacctcaccttatcaaggaaggacgtgcagctctcgttacctccttttgcatgtttaagtacatggctctgtacagcatgattcagtatgttggtgttctgctgctctactgggagacaaacagcctttcaaattaccagtttctgttccaggatctggccattacaactcttattggtgtaacaatgaatctgaatggtgcctaccctaagctggtgcctttcagacctgcaggacggctgatctctccacctctgctactctctgtgattttcaacattcttctcagcctggccatgcatattgcaggcttcatcctggttcagaggcagccttggtattccgtggagatacacagtgcctgcacagtacaaaatgaaagcatctcagagttaaccatgtctccaactgctccagaaaaaatggaaagtaatagcaccttcacaagttttgagaacactacagtctggttcttgggaacaatcaactgtatcactgtggctcttgtgttctctaaaggaaaaccatttagacagccaacttatacaaactatatatttgtccttgtgctgataatacagcttggtgtatgtctattcattctatttgctgatataccagaattatatagacgtttggatctgctctgcactcccgtcctgtggagggcctccattgtcatcatgctcagcttgaatttcattgtgtcccttgtggccgagtcaaaaagccagtatcggatatggcagagggacttggcaaatgaccctagttggcccccgctaaaccaaacctcccactctgacatgccggagtgtggcagaggagtgtcttacagcaatccagtatttgagagyaatgaagaacaactc

SEQ ID NO: 1699 - DNA, 4109 bp, Homo sapiens
ggagatatttggctatcggactcaaggctgccggaaaagtctctgccttgccggatccatcttctcatttggaatcctccccttggtgttttactggagaccagcatggcacgtatgggcacattgtgtcccatgttccttgcaagaagcagacactgtgttgctgaggacaacggatgaattccaaatttactcttggaaaaaggtaatatggatctacctgtcagcattaaacagcgcatttggtctcactcctgaccaccctctcatgacagatgaggagtatatcataaatagagccataagaaagccagacctaaaggtgagatgcatcaaagtgcagaaaataagatatgtttggaactacttagaaggacagttccagaaaattggttctttggaagactggctyagttctgccaagatacatcaaaaatttggatcaggcttgacaagagaagaacaggagattaggaggttaatrtgtgggcctaatactatcgatgttgaagttacaccaatttggaaactgctcatcaaggaggttctaaatccattttatatatttcaactcttcagtgtctgtttgtggtttagtgaagactataaggaatatgcttttgccatcataatcatgtccataatttccatatctttgacagtatatgatctcagagagttaaatagatgttggattgtatttttgtgggaaaataacctgactcaactctgtctcctcccactttcagctggagttcaagagctggaatcacgcgtcctggtgcctggagatttattaattttgacagggaacaaagtgctaatgccatgtgatgccgttctgattgaaggcagctgtgtggtggatgaaggcatgctgacaggagaaagtattccagtcaccaaaactccgttacccaagatggatagctctgtgccctggaaaacacagagtgaagcggattacaagcggcatgtcctcttctgtggaacagaggttatccaggccaaggcagcttgctctgggaccgtgagagccgtggtactgcagactggattcaacactgcaaagggagaccttgtgagatccattctctaccctaagccagtgaattttcagttgtacagggatgccatcaggttcctcctgtgccttgtaggaacagccaccattgggatgatctatactctgtgtgtctatgtgcttagyggggaacctccagargaggtggtgaggaaagcccttgacgtcatcacaattgcggttcctccggctctacctgctgctctgaccacaggcattatctatgcccagaggaggctgaagaagagaggcatcttytgcattagcccccagaggatcaacgtatgtggacagttaaaccttgtctgctttgacaagacaggcaccttaacaagggayggcttggacctctggggagtcgtgtcctgtgataggaatggctttcaggaagttcacagctttgcctcaggccaggctttgccatggggcccactgtgtgcagcgatggccagctgccactctctgatccttcttgatgggaccatccagggagaccctctggacctcaaaatgtttgaagccaccacctgggaaatggctttttctggggacgatttccacatcaagggagtgccggcacatgccatggtagttaagccctgcagaacagccagccaggtcccagtggaaggaattgcaatcctgcatcagttcccattctcatcggcactgcaaagaatgacagtcattgtccaagagatgggaggtgaccgactggcattcatgaaaggtgcaccagagagggtggccagcttttgccaacctgagacagtacccactagttttgttagcgawcttcagatttacacgacacagggcttccgagtcatagcactggcctacaagaagctggaaaatgaccatcacgctactaccttgacgagggagacggtagaatcagacctgatatttctggggctgctgatcttggagaatcgattgaaggaagagacaaaacctgtcttggaagagctcatctcagcccggataaggactgtaatgatcacaggtgacaatcttcagactgcaataacagtggccagaaaatctggaatggtttctgaaagccagaaagtcattctcattgaggcaaatgaaaccaccgggtcctcatcagcatctatatcttggacgttagtagaagagaagaaacacattatgtatgggaatcaggacaattacattaacatcagggatgaagtctctgataaaggcagagaaggaagttaccattttgccctaactggaaaatcctttcatgttataagtcaacatttcagcagcctactgccaaagatattgatcaatgggaccatctttgcaagaatgtctcctgggcagaagtccagtctggtggaagaatttcagaaactggattactttgtaggtatgtgtggtgatggagccaatgactgtggggctctgaaaatggctcatgtgggcatctcattatcagagcaggaggcatctgtggcctcacctttcacttccaaaactccaaacattgagtgcgtacctcaccttatcaaggaaggacgtgcagctctcgttacctccttttgcatgtttaagtacatggctctgtacagcatgattcagtatgttggtgttctgctgctctactgggagacaaacagcctttcaaattaccagtttctgttccaggatctggccattacaactcttattggtgtaacaatgaatctgaatggtgcctaccctaagctggtgcctttcagacctgcaggacggctgatctctccacctctgctactctctgtgattttcaacattcttctcagcctggccatgcatattgcaggcttcatcctggttcagaggcagccttggtattccgtggagatacacagtgcctgcacagtacaaaatgaaagcatctcagagttaaccatgtctccaactgctccagaaaaaatggaaagtaatagcaccttcacaagttttgagaacactacagtctggttcttgggaacaatcaactgtatcactgtggctcttgtgttctctaaaggaaaaccatttagacagccaacttatacaaactatatatttgtccttgtgctgataatacagcttggtgtatgtctattcattctatttgctgatataccagaattatatagacgtttggatctgctctgcactcccgtcctgtggagggcctccattgtcatcatgctcagcttgaatttcattgtgtcccttgtggccgaggaggctgttattgaaaatcgagccctrtggatgatgattaaaagatgtttcggctatcagtcaaaaagccagtatcggatatggcagagggacttggcaaatgaccctagttggcccccgctaaaccaaacctcccactctgacatgccggagtgtggcagaggagtgtcttacagcaatccagtatttgagagyaatgaagaacaactctgaaggacatgtgatatccaagttgatattacagagaaacaatgacaaaagggaccagtttcattgattttaagaaatgagactcttgtaacatcagctggagttttggggctacctatcaaatcatggtgacaaactaaagtctgtttgataaaatactgtctacagagaagaacattgacccagaagagtgctttcctcttggcttctgaaggtattagaggcattcagtgaaggcaagaatgggccaagaatttctatgggccaagagacaagcaggctaaaggggaaaaatatgtgatctttcctcttaggacaggacaatactttcctttttataaaaatgagttgaggggaagtagtactgtgtatactcacggagttgtaatttttgaatttttacttcatcgatggaaaaactaatgcgtgggaaacattacaccaatctttactgtctgggttccttttctctgtagtacttttcagatttgaggctttttcttctgtttctggccttacccaacatattgttaaggataagcttagcctatgctgcaataaaaaacaactctcagatatc

SEQ ID NO: 1700 - DNA, 2378 bp, Homo sapiens
ggtgatgaccagttaaatgtatttggagaggacactatgggaggtttcatggaagatttgagaaagtgtaaaattattttcataattggtggtcctggctctggcaaaggcacacagtgtgaaaagctggtggaaaaatatggatttacacatctctcaactggcgagctcctgcrtgaggaactggcatcagaatctgaaagaagcaaattgatcagagacattatggaacgtggagacctggtgccctcaggcatcgttttggagctcctgaaggaggccatggtggccagcctcggggacaccaggggcttcctgattgacggctatcctcrggaggtgaagcaaggggaagagttcggacgcaggattggagacccacagttggtgatctgtatggactgctcggcagacaccatgaccaaccgccttctccaaaggagccggagcagcctgcctgtggacgacaccaccaagaccatcgccaagcgcctagaagcctactaccgagcgtccatccccgtgatcgcctactacgagacaaaaacacagctacacaagataaatgcagagggaacaccagaggacgtttttcttcaactctgcacagctattgactctattttctgaaggcaaaaatgcatgtttgttagaatggaaacagaaaaacattaaaaagttcattccttaacacaatgtttcaagttaaaccttttgtgtcaccgcccccaccaaccaccacctcctaaatcctgacagcactgtttgcttcccagctagacctgtgtgagaggtgtctggaaatcatgcatggtgtatttgggactatatcaacctattctccacacttcagacaactgtctgcactcacggcacacacactttgtatcatgcaggccacactcagagctagtcagtacatgaacagtggtgcggtgccagtctgtgtccgttgtgatcacaggccttgctagaccctgatcatctggttctcctctcattaagcatccctaacccccagtcacaccttcctcttacatactgttccccaatggaggcccctggcataggggacagccctgggcatcttcctttggtgtctggctgttttgtcaactctcatccactggtggctcagagccataaggtgggttgattacacaatgccttgtacatgatatagaggcatcaagcaagtaaaatttgacagaaattttaaaatatgaagatgtatagctttcccaagatgatggtaaaacccaggttagtcatcagtaaccttctctattattattattttttagaaacttggaatactgtcrtyatggctaagagaacaaatctgataaattgtgtaacctagtctcttctctacatggtgatgcatttcagcaattataaattaatataaatgaccaaaagtaacttaaaagcatgagatatttgctatttcattcattgggcacatatcaaattataattttgattttaaatggtcacccatgtatttatttgttgccaagcaagtaaaaaaataccctaacaaacctgatgtgggtgggaggggcatgtcagtaagtggtgtgttcaatgtgtttgtttcatatgggccctttccaggagtttgcaaaccttgtcatacccatatgcaaaactgtgtttccttgcattaaaccagtgaagtttgggttctcttttgtgctatcaatcagttgtaaaatcagagctkcttayatattctactggaataactgcatcttccactcagtcactacaaaaaagcatagtttcagtttgcatgaatttttttttttttcttcaatggytgtgcagataaggatccatttctgggatagaattgtattttttaagtcatttttttttcttgaaatggatatgtacaaataaaataaatggaagacaggataactctttttctatttatttgtaactcacatcattctggaaagcatttgaagccttattccaaacagaattagaagcgaacacagaaatagtcaagatgatttacgatacgcttatatggttttaattttagctatagatcagttttgagttattacagagagaactcaatgtattcatgatacatggtaactgtcatatttcctctttctctagcactcattctgaaacagaaatgttagtgtttgctaaagaagaaattaaatttctttggttacagttacgcctctattaacaaaaaggggcatgttcccataactcccaacagttgtcaaatactttaatactaccccaagttgtcacactctctatcggggagcataataagtacctgagcaaactggaaaaaaaaaaggttacaggatgaaaatcatcagttgtgccagaaaaca

SEQ ID NO: 1701 - DNA, 1932 bp, Homo sapiens
acccctggcggccgcgctgcctggcagcccgggaagccgckgcacagctgctcggcgcctgcagctccggctcgggggctgaggcggagggggtccctggcctgggcggagaggctgagctgagtgcgcgtgagaaagagggctgcaccgctgctcggcgcggactctgccagccccagcttcagccccggctcaggtcgccgcagcccgggagcctccccgcttgcgccccaaggcacgcgcggcacagccatgaacaccaacgatgccaaggagtatctggcccggagggaaatccctcagctttttgagagccttttgaatggactgatgtgttctaagcccgaagatccagtagaatacttggaaagttgtttacaaaaagtaaaggaactgggtggctgtgacaaggtgaaatgggatacatttgtaagccaggaaaagaagaccttacctccactaaatggaggacagtcacggagatcctttctaagaaatgtaatgcctgaaaactcaaactttccatatcggcggtatgaccggctccctccaatccatcaattctccatagaaagtgacacggatctctctgagactgcrgagttgattgaggagtatgaggtttttgatcctaccagacctcgaccaaaaatcattcttgttataggtggtccaggaagtggaaagggtactcagagtttgaaaattgcagaacgatatggattccaatacatttctgtgggagaattattaagaaagaagatccacagtaccagcagcaataggaaatggagtcttattgccaagataattacaactggagaattggccccacaggaaacaacaattacagagataaarcaaaaattgatgcaaatacctgatgaagagggcattgttattgatggatttccaagagatgttgcccaggctctatcttttgaggaccaaatctgtacccccgatttggtggtattcctggcttgtgctaatcagagactcaaagaaagattactgaagcgtgcagaacagcagggccgaccagacgacaatgtaaaagctacccaaaggagactaatgaacttcaagcagaatgctgctccattggttaaatacttccaggaaaaggggctcatcatgacatttgatgccgaccgcgatgaggatgaggtgttctatgacatcagcatggcagttgacaacaagttatttccaaacaaagaggctgcagcaggttcaagtgaccttgatccttcgatgatattggacactggagagatcattgatacaggatctgattatgaagatcagggtgatgaccagttaaatgtatttggagaggacactatgggaggtttcatggaagatttgagaaagtgtaaaattattttcataattggtggtcctggctctggcaaaggcacacagtgtgaaaagctggtggaaaaatatggatttacacatctctcaactggcgagctcctgcrtgaggaactggcatcagaatctgaaagaagcaaattgatcagagacattatggaacgtggagacctggtgccctcaggcatcgttttggagctcctgaaggaggccatggtggccagcctcggggacaccaggggcttcctgattgacggctatcctcrggaggtgaagcaaggggaagagttcggacgcaggattggagacccacagttggtgatctgtatggactgctcggcagacaccatgaccaaccgccttctccaaaggagccggagcagcctgcctgtggacgacaccaccaagaccatcgccaagcgcctagaagcctactaccgagcgtccatccccgtgatcgcctactacgagacaaaaacacagctacacaaggcgaagggaacaccagaggacgtttttcttcaactctgcacagctattgactctattttc

SEQ ID NO: 1702 - DNA, 3388 bp, Homo sapiens
gcggccgcgctgcctggcagcccgggaagccgckgcacagctgctcggcgcctgcagctccggctcgggggctggaaccgaagcgggggcggcgggagcgcggagaccacagcccccggggagaggcggagggggtccctggcctgggcggagaggctgagctgagtgcgcgtgagaaagagggctgcaccgctgctcggcgcggactctgccagccccagcttcagccccggctcaggtcgccgcagcccgggagcctccccgcttgcgccccaaggcacgcgcggcacagccatgaacaccaacgatgccaaggagtatctggcccggagggaaatccctcagctttttgagagccttttgaatggactgatgtgttctaagcccgaagatccagtagaatacttggaaagttgtttacaaaaagtaaaggaactgggtggctgtgacaaggtgaaatgggatacatttgtaagccaggaaaagaagaccttacctccactaaatggaggacagtcacggagatcctttctaagaaatgtaatgcctgaaaactcaaactttccatatcggcggtatgaccggctccctccaatccatcaattctccatagaaagtgacacggatctctctgagactgcrgagttgattgaggagtatgaggtttttgatcctaccagacctcgaccaaaaatcattcttgttataggtggtccaggaagtggaaagggtactcagagtttgaaaattgcagaacgatatggattccaatacatttctgtgggagaattattaagaaagaagatccacagtaccagcagcaataggaaatggagtcttattgccaagataattacaactggagaattggccccacaggaaacaacaattacagagataaarcaaaaattgatgcaaatacctgatgaagagggcattgttattgatggatttccaagagatgttgcccaggctctatcttttgaggaccaaatctgtacccccgatttggtggtattcctggcttgtgctaatcagagactcaaagaaagattactgaagcgtgcagaacagcagggccgaccagacgacaatgtaaaagctacccaaaggagactaatgaacttcaagcagaatgctgctccattggttaaatacttccaggaaaaggggctcatcatgacatttgatgccgaccgcgatgaggatgaggtgttctatgacatcagcatggcagttgacaacaagttatttccaaacaaagaggctgcagcaggttcaagtgaccttgatccttcgatgatattggacactggagagatcattgatacaggatctgattatgaagatcagcagggtgatgaccagttaaatgtatttggagaggacactatgggaggtttcatggaagatttgagaaagtgtaaaattattttcataattggtggtcctggctctggcaaaggcacacagtgtgaaaagctggtggaaaaatatggatttacacatctctcaactggcgagctcctgcrtgaggaactggcatcagaatctgaaagaagcaaattgatcagagacattatggaacaccagaggacgtttttcttcaactctgcacagctattgactctattttctgaaggcaaaaatgcatgtttgttagaatggaaacagaaaaacattaaaaagttcattccttaacacaatgtttcaagttaaaccttttgtgtcaccgcccccaccaaccaccacctcctaaatcctgacagcactgtttgcttcccagctagacctgtgtgagaggtgtctggaaatcatgcatggtgtatttgggactatatcaacctattctccacacttcagacaactgtctgcactcacggcacacacactttgtatcatgcaggccacactcagagctagtcagtacatgaacagtggtgcggtgccagtctgtgtccgttgtgatcacaggccttgctagaccctgatcatctggttctcctctcattaagcatccctaacccccagtcacaccttcctcttacatactgttccccaatggaggcccctggcataggggacagccctgggcatcttcctttggtgtctggctgttttgtcaactctcatccactggtggctcagagccataaggtgggttgattacacaatgccttgtacatgatatagaggcatcaagcaagtaaaatttgacagaaattttaaaatatgaagatgtatagctttcccaagatgatggtaaaacccaggttagtcatcagtaaccttctctattattattattttttagaaacttggaatactgtcrtyatggctaagagaacaaatctgataaattgtgtaacctagtctcttctctacatggtgatgcatttcagcaattataaattaatataaatgaccaaaagtaacttaaaagcatgagatatttgctatttcattcattgggcacatatcaaattataattttgattttaaatggtcacccatgtatttatttgttgccaagcaagtaaaaaaataccctaacaaacctgatgtgggtgggaggggcatgtcagtaagtggtgtgttcaatgtgtttgtttcatatgggccctttccaggagtttgcaaaccttgtcatacccatatgcaaaactgtgtttccttgcattaaaccagtgaagtttgggttctcttttgtgctatcaatcagttgtaaaatcagagctkcttayatattctactggaataactgcatcttccactcagtcactacaaaaaagcatagtttcagtttgcatgaatttttttttttttcttcaatggytgtgcagataaggatccatttctgggatagaattgtattttttaagtcatttttttttcttgaaatggatatgtacaaataaaataaatggaagacaggataactctttttctatttatttgtaactcacatcattctggaaagcatttgaagccttattccaaacagaattagaagcgaacacagaaatagtcaagatgatttacgatacgcttatatggttttaattttagctatagatcagttttgagttattacagagagaactcaatgtattcatgatacatggtaactgtcatatttcctctttctctagcactcattctgaaacagaaatgttagtgtttgctaaagaagaaattaaatttctttggttacagttacgcctctattaacaaaaaggggcatgttcccataactcccaacagttgtcaaatactttaatactaccccaagttgtcacactctctatcggggagcataataagtacctgagcaaactggaaaaaaaaaaggttacaggatgaaaatcatcagttgtgccagaaaaca

SEQ ID NO: 1703 - DNA, 3731 bp, Homo sapiens
gcggccgcgctgcctggcagcccgggaagccgckgcacagctgctcggcgcctgcagctccggctcgggggctggaaccgaagcgggggcggcgggagcgcggagaccacagcccccggggagaggcggagggggtccctggcctgggcggagaggctgagctgagtgcgcgtgagaaagagggctgcaccgctgctcggcgcggactctgccagccccagcttcagccccggctcaggtcgccgcagcccgggagcctccccgcttgcgccccaaggcacgcgcggcacagccatgaacaccaacgatgccaaggagtatctggcccggagggaaatccctcagctttttgagagccttttgaatggactgatgtgttctaagcccgaagatccagtagaatacttggaaagttgtttacaaaaagtaaaggaactgggtggctgtgacaaggtgaaatgggatacatttgtaagccaggaaaagaagaccttacctccactaaatggaggacagtcacggagatcctttctaagaaatgtaatgcctgaaaactcaaactttccatatcggcggtatgaccggctccctccaatccatcaattctccatagaaagtgacacggatctctctgagactgcrgagttgattgaggagtatgaggtttttgatcctaccagacctcgaccaaaaatcattcttgttataggtggtccaggaagtggaaagggtactcagagtttgaaaattgcagaacgatatggattccaatacatttctgtgggagaattattaagaaagaagatccacagtaccagcagcaataggaaatggagtcttattgccaagataattacaactggagaattggccccacaggaaacaacaattacagagataaarcaaaaattgatgcaaatacctgatgaagagggcattgttattgatggatttccaagagatgttgcccaggctctatcttttgaggaccaaatctgtacccccgatttggtggtattcctggcttgtgctaatcagagactcaaagaaagattactgaagcgtgcagaacagcagggccgaccagacgacaatgtaaaagctacccaaaggagactaatgaacttcaagcagaatgctgctccattggttaaatacttccaggaaaaggggctcatcatgacatttgatgccgaccgcgatgaggatgaggtgttctatgacatcagcatggcagttgacaacaagttatttccaaacaaagaggctgcagcaggttcaagtgaccttgatccttcgatgatattggacactggagagatcattgatacaggatctgattatgaagatcagggtgatgaccagttaaatgtatttggagaggacactatgggaggtttcatggaagatttgagaaagtgtaaaattattttcataattggtggtcctggctctggcaaaggcacacagtgtgaaaagctggtggaaaaatatggatttacacatctctcaactggcgagctcctgcrtgaggaactggcatcagaatctgaaagaagcaaattgatcagagacattatggaacgtggagacctggtgccctcaggcatcgttttggagctcctgaaggaggccatggtggccagcctcggggacaccaggggcttcctgattgacggctatcctcrggaggtgaagcaaggggaagagttcggacgcaggattggagacccacagttggtgatctgtatggactgctcggcagacaccatgaccaaccgccttctccaaaggagccggagcagcctgcctgtggacgacaccaccaagaccatcgccaagcgcctagaagcctactaccgagcgtccatccccgtgatcgcctactacgagacaaaaacacagctacacaagataaatgcagagggaacaccagaggacgtttttcttcaactctgcacagctattgactctattttctgaaggcaaaaatgcatgtttgttagaatggaaacagaaaaacattaaaaagttcattccttaacacaatgtttcaagttaaaccttttgtgtcaccgcccccaccaaccaccacctcctaaatcctgacagcactgtttgcttcccagctagacctgtgtgagaggtgtctggaaatcatgcatggtgtatttgggactatatcaacctattctccacacttcagacaactgtctgcactcacggcacacacactttgtatcatgcaggccacactcagagctagtcagtacatgaacagtggtgcggtgccagtctgtgtccgttgtgatcacaggccttgctagaccctgatcatctggttctcctctcattaagcatccctaacccccagtcacaccttcctcttacatactgttccccaatggaggcccctggcataggggacagccctgggcatcttcctttggtgtctggctgttttgtcaactctcatccactggtggctcagagccataaggtgggttgattacacaatgccttgtacatgatatagaggcatcaagcaagtaaaatttgacagaaattttaaaatatgaagatgtatagctttcccaagatgatggtaaaacccaggttagtcatcagtaaccttctctattattattattttttagaaacttggaatactgtcrtyatggctaagagaacaaatctgataaattgtgtaacctagtctcttctctacatggtgatgcatttcagcaattataaattaatataaatgaccaaaagtaacttaaaagcatgagatatttgctatttcattcattgggcacatatcaaattataattttgattttaaatggtcacccatgtatttatttgttgccaagcaagtaaaaaaataccctaacaaacctgatgtgggtgggaggggcatgtcagtaagtggtgtgttcaatgtgtttgtttcatatgggccctttccaggagtttgcaaaccttgtcatacccatatgcaaaactgtgtttccttgcattaaaccagtgaagtttgggttctcttttgtgctatcaatcagttgtaaaatcagagctkcttayatattctactggaataactgcatcttccactcagtcactacaaaaaagcatagtttcagtttgcatgaatttttttttttttcttcaatggytgtgcagataaggatccatttctgggatagaattgtattttttaagtcatttttttttcttgaaatggatatgtacaaataaaataaatggaagacaggataactctttttctatttatttgtaactcacatcattctggaaagcatttgaagccttattccaaacagaattagaagcgaacacagaaatagtcaagatgatttacgatacgcttatatggttttaattttagctatagatcagttttgagttattacagagagaactcaatgtattcatgatacatggtaactgtcatatttcctctttctctagcactcattctgaaacagaaatgttagtgtttgctaaagaagaaattaaatttctttggttacagttacgcctctattaacaaaaaggggcatgttcccataactcccaacagttgtcaaatactttaatactaccccaagttgtcacactctctatcggggagcataataagtacctgagcaaactggaaaaaaaaaaggttacaggatgaaaatcatcagttgtgccagaaaaca

SEQ ID NO: 1704 - DNA, 990 bp, Homo sapiens
atgaggactggaggaggccctggaggcgacgtgcgcgccccgcgagcccagggcgaggccactccagacgcagctctgctcagcacagctcccgagtctctgacgytggccctggaaacgaggacacgtcagccacgaggacctggctctgtctgtccagctccaggagatggctggctgtggactcrgcaggacaagctggtcaggagacggctggctgtggactcagcaggacaaattgagatctggtgcccacagggcaaaggagagcctgtgccttgtcaggccacctccaacctcaagcctgtgtatggctggcaggaagggctgggcccttcggagctgcacactctggtccaggacatgggcattggaaggagctgtatgaagagattttccrtttctgtcattgttgagactgtggttgtgccaagaaagaaattcttaagcattaagtttaaggaggacttttcagcaggctgtgggcctagaggtgggggatgtggaatcaagctaaagacccagaaccagagaaagaaggaagcagcagtgaggaagcaggacaagaacatctcggaaattcagcccggcgcgccactcgtgacgtcattgcccggactccactgcctcccgcgccgcgcttttgccaccctgggcacgtcatccgcagcggcggccgcagccaaccgcaaacgcgcggcctactacagcgccgcggggcccaggccgggagccgaccggcacrgcagcccaccgcaggaacccggagccgggcgggtctggggtcgctaccggcgcgccccatctgttcgctgggagccgggagtccttggcgttctgagcgcgccgcagctgtggcgtccgccggtggtgagggccgcgggcagctgccggggcgagcggctgcatccccgggacgcctgggccgagcgtaggagccagaacgggagcagagaaccgcggtccagtgttgaggggtggctgctctcc

SEQ ID NO: 1705 - DNA, 4344 bp, Homo sapiens
gcggccgcagccaaccgcaaacgcgcggcctactacagcgccgcggggcccaggccgggagccgaccggcacrgcaggaacgagcatccggcacccttgtgcatgtaccctacaatgactgccaggcttggatggatgtccccactcctgacttggtctgccctgacaccacctgggcaatggggagagtgtcttcctacggctggggcgtgtgggagtccaggcttcacgcactctttgctgttcaatgtaccagctggaggatgagtctgcgcatytggatgaaatgccactaatgatgtctgaagaaggctttgagaatgaggaaagtgattaccacaccttaccacgagccaggataatgcaaaggaaaagaggactggagtggtttgtctgtgatggctggaagttcctctgtaccagttgctgtggttggctgataaatatttgtcraagaaagaaagarctgaaagctcgcacmgtatggcttggatgtcctgaaaagtgtgaagaaaaacatcccaggaattctataaaaaatcaaaaatacaatgtgtttacctttatacctggggttttgtatgaacaattcaagtttttcttgaatctctattttctagtratatcctgctcacagtttgtaccagcattgaaaataggctatctctacacctactgggctcctctgggatttgtcttggctgttactatgacacgggaagcaattgatgaatttcggcgttttcagcgtgacaaggaagtgaattcacaactatatagcaagcttacagtaagaggtaaagtgcaagttaagagttcagacatacaagttggagacctcatcatagtggaaaagaatcaaagaattccatcggacatggtgtttcttaggacttcagaaaaagcaggttcgtgttttattcgaactgatcaactagatggtgaaactgactggaagctgaaggtggcagtgagctgcacgcaacagctgccggctctgggggaccttttttctatcagtgcttatgtttatgctcagaaaccacaaatggacattcacagtttcgaaggcacatttaccagggaagacagtgacccgcccattcatgaaagtctcagcatagaaaatacattgtgggcaagcaccattgttgcatcaggtactgtaataggtgttgtcatttataccggaaaagagactcgaagtgtaatgaacacatccaatccaaaaaataaggttggtttgttggaccttgaactcaatcggctgacgaaagcgctrtttttggctttagttgctctttccattgtwatggtaaccttacaaggatttgtgggtccatggtaccgcaatctttttcggttccttctcctcttttcttacatcattcccataagtttgcgtgtgaacttggacatgggcaaagcggtgtatggatggatgatgatgaaagatgagaacatccctggcacggtcgttcggaccagcactatcccagaggaacttgggcgcctggtgtatttattgacagacaaaacaggaaccctcacccagaatgaaatgatatttaagcggctgcacctgggcaccgtgtcctatggcgccgacacgatggatgagatccagarccatgtcaggractcctactcacagatgcagtctcaagckggtggaaacaatactggttcaactccactaagaaaagcccaatcttcagctcccaaagttaggaaaagtgtcagtagtcgaatccatgaagccgtgaaagccatcgtgctgtgtcacaacgtgacccccgtgtatgagtctcrggccggcgttactgaggagactgagttygcagaggctgaycaagacttcagtgatgagaatcgcacctaccaggcttccagcccggatgaggtcgctctggtgcagtggacagagagtgtgggcctcacrctggtcagcagggacctcacctccatgcagctgaagacccccagtggccaggtcctcagcttctgcattctgcagctgtttcccttcacctccsagagcaagcggatgggcgtcatcgtcagggatgaatccacrgcagaaatcacattctacatgaagggcgctgacgtggccatgtctcctatcgtgcagtataatgactggctggaagaggagtgcggaaacatggctcgcgaaggactgcggaccctcgtggttgcaaagaaggcgttgacagaggagcagtaccaggactttgagagccgatacactcaagccaagctgagcatgcacgacaggtccctcaaggtggccgcggtagtcgagagcctggagagggagwtggaactgctgtgcctcaccggcgtggaggaccagctgcaggcagacgtgcggcccacgctggagatgctgcgcaacgccgggatcaagatatggatgctaacaggcgataaactcgagacagctacctgcattgccaaaagttcacatctcgtgtctagaacacaagatattcatattttcagacaggtaaccagtcggggagaggcacatttggagctgaatgcatttcgaaggaagcatgattgtgcactagtcatatctggggactctctggaggtttgtctaaagtactacgagcatgaatttgtggagctggcctgccagtgccctgccgtggtttgctgccgctgctcacccacccagaaggcccgcattgtgacactgctgcagcagcacacagggagacgcacctgcgccatcggtgatggaggaaatgatgtcagcatgattcaggcagcagactgtgggattgggattgagggaaaggagggtaaacaggcctcgctggcggccgacttctccatcacgcagttccggcacataggcaggctgctcatggtgcacgggcggaacagctacaagaggtcggcggcactcggccagttcgtcatgcacaggggccttatcatctccaccatgcaggctgtgttttcctcagtcttctacttcgcatccgtccctttgtatcagggcttcctcatggtggggtatgccaccatatacaccatgttcccagtgttctccttagtgctggaccaggacgtgaagccagagatggcgatgctctacccggagctgtacaaggacctcaccaagggaagatccttgtccttcaaaaccttcctcatctgggttttaataagtatttaccaaggcggcatcctcatgtatggggccctggtgctcttcgagtctgagttcgtccacgtggtggccatctccttcaccgcactgatcctgaccgagctgctgatggtggcgctgaccgtccgcacgtggcactggctgatggtggtggccgagttcctcagcttaggctgctacgtgtcctcactcgcttttctcaatgaatattttggtataggcagagtgtcttttggagctttcttagatgttgcctttatcaccaccgtgaccttcctgtggaaagtgtcggcgatcaccgtggtcagctgcctcccgctgtatgtcctcaagtacctgaggcgcaagctctctcctcccagctactgcaagctggcctcctaaggggctgtgcacccccagcgggctggccccagcaccttctgcccttcccagcaccttgtgcccttgccagtgaacgcagggtttgccattgctaccaagcaagcaccacaagaaagggagggtacgccaggcgagcccagggcacagatgctgagacagcctctccttctcagtgcagggacgtcacccctgccaggcaagcccagggcacagatgccaggatggcttctccctctcagtgcgaggcttcacccctgccaggcaagcccagggcatagatgctgagacagsctctccctctcagtgcagggacgtcaccyctgccaggcaagcccagggcacagaggccgggacggcctctccctctcagtgtgaggcttcacccatgctaggcaagcccagggcacagatgccgggatggcccctccctctcagtgcgggaacgtcacccctgccaggcaagcccagggcacagatgctgcgatggcctcttcctcttaagtgtggggcctcacccctgcttttctttctttttttgtattgtcaaaattgtatttccatattgaagcagcttgagtttctactgaaaatgagcccgaattatttcactattactgtaaagggttcatcttactctggcattctgagaatyagactgaaagtttaatttctgcagttccctcayattcagattctttctttgatgttataacacaaagtcattcctactcaaatgtaataaaattgaggctccacggaggcccgtgtcc

SEQ ID NO: 1706 - DNA, 720 bp, Homo sapiens
atgcaaggggactcgagcctggatttcagcagtgaccatggaggcagtgacatccaaggggactcaagcctggatttcagcggtgaccatggaggcagtgacatccaaggggacttgagtcaggatttcagaggtgatcatggaggcagtgacatccaaggggactcgagccaggagttcagcggtgaccatggaggcagtgacatccagggggacttgagtcaggatttcagaggtgatcatggaggcagtgacatccaaggggactcgagccaggagttcagcggtgaccatggaggcagtgacatccaaggggactcgagccaggatttcagtggtgactgggaaagggggggccccagaaacaaaggcctggaggtgacaaatcccagagcagccaggcctggcttggctggaagttgcttcagctccacttccactcagagcttaaatataatagaagaacgggttcttaagctacgggagaggcgctctgtggcactcctggagcaaaaacatccggaagtggcccaaatcctgcggaaggttttccgggagaatgggagagcccagggcgaggccactccagacgcagctctgctcagcacagctcccgagtctctgacgytggccctggaaacgaggacacgtcagccacgaggacctggctctgtctgtccagctccaggtagtttaattgccggagcaaaagccctcact

SEQ ID NO: 1707 - DNA, 579 bp, Homo sapiens
atgagcccctgccatgggggaaggcgactcagagtagaagagagcacagagcagtcgcagtctgcatggcaccacagcagggatgctggagggaaggaggcatgtgagagtgttcgagatggacagtacaagcaagaggtaagttgctgtggttggctgataaatatttgtcraagaaagaaagarctgaaagctcgcacmgtatggcttggatgtcctgaaaagtgtgaagaaaaacatcccaggaattctataaaaaatcaaaaatacaatgtgtttacctttatacctggggttttgtatgaacaattcaagtttttcttgaatctctattttctagtratatcctgctcacagtttgtaccagcattgaaaataggctatctctacacctactgggctcctctgggatttgtcttggctgttactatgacacgggaagcaattgatgaatttcggcgttttcagcgtgacaaggaagtgaattcacaactatatagcaagcttacaataacattcagagtacgagttctcatatccagcatcgtccaagcgggagttgatgtgctctccgagttc

SEQ ID NO: 1708 - DNA, 2309 bp, Homo sapiens
gcggccgcagccaaccgcaaacgcgcggcctactacagcgccgcggggcccaggccgggagccgaccggcacrgcaggaacgagcatccggcacccttgtgcatgtaccctacaatgactgccaggcttggatggatgtccccactcctgacttggtctgccctgacaccacctgggcaatggggagagtgtcttcctacggctggggcgtgtgggagtccaggcttcacgcactctttgctgttcaatgtaccagctggaggatgagtctgcgcatytggatgaaatgccactaatgatgtctgaagaaggctttgagaatgaggaaagtgattaccacaccttaccacgagccaggataatgcaaaggaaaagaggactggagtggtttgtctgtgatggctggaagttcctctgtaccagttgctgtggttggctgataaatatttgtcraagaaagaaagarctgaaagctcgcacmgtatggcttggatgtcctgaaaagtgtgaagaaaaacatcccaggaattctataaaaaatcaaaaatacaatgtgtttacctttatacctggggttttgtatgaacaattcaagtttttcttgaatctctattttctagtratatcctgctcacagtttgtaccagcattgaaaataggctatctctacacctactgggctcctctgggatttgtcttggctgttactatgacacgggaagcaattgatgaatttcggcgttttcagcgtgacaaggaagtgaattcacaactatatagcaagcttacagtaagaggtaaagtgcaagttaagagttcagacatacaagttggagacctcatcatagtggaaaagaatcaaagaattccatcggacatggtgtttcttaggacttcagaaaaagcaggttcgtgttttattcgaactgatcaactagatggtgaaactgactggaagctgaaggtggcagtgagctgcacgcaacagctgccggctctgggggaccttttttctatcagtgcttatgtttatgctcagaaaccacaaatggacattcacagtttcgaaggcacatttaccagggaagacagtgacccgcccattcatgaaagtctcagcatagaaaatacattgtgggcaagcaccattgttgcatcaggtactgtaataggtgttgtcatttataccggaaaagagactcgaagtgtaatgaacacatccaatccaaaaaataaggttggtttgttggaccttgaactcaatcggctgacgaaagcgctrtttttggctttagttgctctttccattgtwatggtaaccttacaaggatttgtgggtccatggtaccgcaatctttttcggttccttctcctcttttcttacatcattcccataagtttgcgtgtgaacttggacatgggcaaagcggtgtatggatggatgatgatgaaagatgagaacatccctggcacggtcgttcggaccagcactatcccagaggaacttgggcgcctggtgtatttattgacagacaaaacaggaaccctcacccagaatgaaatgatatttaagcggctgcacctgggcaccgtgtcctatggcgccgacacgatggatgagatccagarccatgtcaggractcctactcacagatgcagtctcaagckggtggaaacaatactggttcaactccactaagaaaagcccaatcttcagctcccaaagttaggaaaagtgtcagtagtcgaatccatgaagccgtgaaagccatcgtgctgtgtcacaacgtgacccccgtgtatgagtctcrggccggcgttactgaggagactgagttygcagaggctgaycaagacttcagtgatgagaatcgcacctaccaggcttccagcccggatgaggtcgctctggtgcagtggacagagagtgtgggcctcacrctggtcagcagggacctcacctccatgcagctgaagacccccagtggccaggtcctcagcttctgcattctgcagctgtttcccttcacctccsagagcaagcggatgggcgtcatcgtcagggatgaatccacrgcagaaatcacattctacatgaagggcgctgacgtggccatgtctcctatcgtgcagtataatgactggctggaagaggaggagacgggaagagacacagctgttggatgcataaagaagggtgctagacccacgcctctcctccagcccttcctgccatccctgcagcctccagtccaacgtcaaatacaatcaactggatgaattaaaaagaaattgcaaataatatgaa

SEQ ID NO: 1709 - DNA, 4141 bp, Homo sapiens
ggaaaggggcggtcggaacatggcggaccagatcccgctttacccggtaccagctggaggatgagtctgcgcatytggatgaaatgccactaatgatgtctgaagaaggctttgagaatgaggaaagtgattaccacaccttaccacgagccaggataatgcaaaggaaaagaggactggagtggtttgtctgtgatggctggaagttcctctgtaccagttgctgtggttggctgataaatatttgtcraagaaagaaagarctgaaagctcgcacmgtatggcttggatgtcctgaaaagtgtgaagaaaaacatcccaggaattctataaaaaatcaaaaatacaatgtgtttacctttatacctggggttttgtatgaacaattcaagtttttcttgaatctctattttctagtratatcctgctcacagtttgtaccagcattgaaaataggctatctctacacctactgggctcctctgggatttgtcttggctgttactatgacacgggaagcaattgatgaatttcggcgttttcagcgtgacaaggaagtgaattcacaactatatagcaagcttacagtaagaggtaaagtgcaagttaagagttcagacatacaagttggagacctcatcatagtggaaaagaatcaaagaattccatcggacatggtgtttcttaggacttcagaaaaagcaggttcgtgttttattcgaactgatcaactagatggtgaaactgactggaagctgaaggtggcagtgagctgcacgcaacagctgccggctctgggggaccttttttctatcagtgcttatgtttatgctcagaaaccacaaatggacattcacagtttcgaaggcacatttaccagggaagacagtgacccgcccattcatgaaagtctcagcatagaaaatacattgtgggcaagcaccattgttgcatcaggtactgtaataggtgttgtcatttataccggaaaagagactcgaagtgtaatgaacacatccaatccaaaaaataaggttggtttgttggaccttgaactcaatcggctgacgaaagcgctrtttttggctttagttgctctttccattgtwatggtaaccttacaaggatttgtgggtccatggtaccgcaatctttttcggttccttctcctcttttcttacatcattcccataagtttgcgtgtgaacttggacatgggcaaagcggtgtatggatggatgatgatgaaagatgagaacatccctggcacggtcgttcggaccagcactatcccagaggaacttgggcgcctggtgtatttattgacagacaaaacaggaaccctcacccagaatgaaatgatatttaagcggctgcacctgggcaccgtgtcctatggcgccgacacgatggatgagatccagarccatgtcaggractcctactcacagatgcagtctcaagckggtggaaacaatactggttcaactccactaagaaaagcccaatcttcagctcccaaagttaggaaaagtgtcagtagtcgaatccatgaagccgtgaaagccatcgtgctgtgtcacaacgtgacccccgtgtatgagtctcrggccggcgttactgaggagactgagttygcagaggctgaycaagacttcagtgatgagaatcgcacctaccaggcttccagcccggatgaggtcgctctggtgcagtggacagagagtgtgggcctcacrctggtcagcagggacctcacctccatgcagctgaagacccccagtggccaggtcctcagcttctgcattctgcagctgtttcccttcacctccsagagcaagcggatgggcgtcatcgtcagggatgaatccacrgcagaaatcacattctacatgaagggcgctgacgtggccatgtctcctatcgtgcagtataatgactggctggaagaggagtgcggaaacatggctcgcgaaggactgcggaccctcgtggttgcaaagaaggcgttgacagaggagcagtaccaggactttgagagccgatacactcaagccaagctgagcatgcacgacaggtccctcaaggtggccgcggtagtcgagagcctggagagggagwtggaactgctgtgcctcaccggcgtggaggaccagctgcaggcagacgtgcggcccacgctggagatgctgcgcaacgccgggatcaagatatggatgctaacaggcgataaactcgagacagctacctgcattgccaaaagttcacatctcgtgtctagaacacaagatattcatattttcagacaggtaaccagtcggggagaggcacatttggagctgaatgcatttcgaaggaagcatgattgtgcactagtcatatctggggactctctggaggtttgtctaaagtactacgagcatgaatttgtggagctggcctgccagtgccctgccgtggtttgctgccgctgctcacccacccagaaggcccgcattgtgacactgctgcagcagcacacagggagacgcacctgcgccatcggtgatggaggaaatgatgtcagcatgattcaggcagcagactgtgggattgggattgagggaaaggagggtaaacaggcctcgctggcggccgacttctccatcacgcagttccggcacataggcaggctgctcatggtgcacgggcggaacagctacaagaggtcggcggcactcggccagttcgtcatgcacaggggccttatcatctccaccatgcaggctgtgttttcctcagtcttctacttcgcatccgtccctttgtatcagggcttcctcatggtggggtatgccaccatatacaccatgttcccagtgttctccttagtgctggaccaggacgtgaagccagagatggcgatgctctacccggagctgtacaaggacctcaccaagggaagatccttgtccttcaaaaccttcctcatctgggttttaataagtatttaccaaggcggcatcctcatgtatggggccctggtgctcttcgagtctgagttcgtccacgtggtggccatctccttcaccgcactgatcctgaccgagctgctgatggtggcgctgaccgtccgcacgtggcactggctgatggtggtggccgagttcctcagcttaggctgctacgtgtcctcactcgcttttctcaatgaatattttggtataggcagagtgtcttttggagctttcttagatgttgcctttatcaccaccgtgaccttcctgtggaaagtgtcggcgatcaccgtggtcagctgcctcccgctgtatgtcctcaagtacctgaggcgcaagctctctcctcccagctactgcaagctggcctcctaaggggctgtgcacccccagcgggctggccccagcaccttctgcccttcccagcaccttgtgcccttgccagtgaacgcagggtttgccattgctaccaagcaagcaccacaagaaagggagggtacgccaggcgagcccagggcacagatgctgagacagcctctccttctcagtgcagggacgtcacccctgccaggcaagcccagggcacagatgccaggatggcttctccctctcagtgcgaggcttcacccctgccaggcaagcccagggcatagatgctgagacagsctctccctctcagtgcagggacgtcaccyctgccaggcaagcccagggcacagaggccgggacggcctctccctctcagtgtgaggcttcacccatgctaggcaagcccagggcacagatgccgggatggcccctccctctcagtgcgggaacgtcacccctgccaggcaagcccagggcacagatgctgcgatggcctcttcctcttaagtgtggggcctcacccctgcttttctttctttttttgtattgtcaaaattgtatttccatattgaagcagcttgagtttctactgaaaatgagcccgaattatttcactattactgtaaagggttcatcttactctggcattctgagaatyagactgaaagtttaatttctgcagttccctcayattcagattctttctttgatgttataacacaaagtcattcctactcaaatgtaataaaattgaggctccacggaggcccgtgtcc

SEQ ID NO: 1710 - DNA, 5237 bp, Homo sapiens
cgcccagctctgcgggcgccgccaccttcgccgccaccgctgcctttctcctcctcctgtcggcgtgcgggggccgcgcccggcggcagctctgccctaggtgggcggcggcgcggcccaggctgcagctgagcgctctgcgcggcgcagccgggtctcccgcgtgtaccacgccgtgacaggtgcagagtccgggctgaggacccacctgcagccgccgccgcgatgcccaccatgcggaggaccgtgtcggagatccgctcgcgcgccgaaggttatgagaagacagatgatgtttcagagaagacctcactggctgaccaggaggaagtaaggactattttcatcaaccagccccagctracaaaattctgcaataaccatgtcagcactgcaaaatacaacataatcacattccttccaagatttctctactctcagttcagaagagctgctaattcattttttctctttattgcactgctgcagcaaatacctgatgtgtcaccaacaggtcgttatacaacactggttcctctcttatttattttagctgtggcagctatcaaagagataatagaagatattaaacgacataaagctgataatgcagtgaacaagaaacaaacgcaagttttgagaaatggtgcttgggaaattgtccactgggaaaaggtggcagtaggggagatagtgaaagtgaccaatggggaacatctcccagcagatctcatcagtctgtcctcaagtgagccccaagccatgtgctacattgaaacatccaacttagatggtgaaacaaacttgaaaattagacagggcttaccagcaacatcagatatcaaagacgttgacagtttgatgaggatttctggcagaattgagtgtgaaagtccaaacagacatctctacgattttgttggaaacataaggcttgatggacatggcaccgttccactgggagcagatcagattcttcttcgaggagctcagttgagaaatacacagtgggttcatggaatagttgtctacactggacatgacaccaagctgatgcagaattcaacaagtccaccacttaagctctcaaatgtggaacggattacaaatgtacaaattttgattttattttgtatcttaattgccatgtctcttgtctgttctgtgggctcagccatttggaatcgaaggcattctggaaaagactggtatctcaatctaaactatggtggcgctagtaattttggactgaatttcttgaccttcatcatccttttcaacaatctcattcctatcagcttattggttacattagaagttgtgaaatttacccaggcatacttcataaattgggatcttgacatgcactatgaacccacagacactgctgctatggctcgaacatctaatctgaatgaggaacttggccaggttaaatacatattttctgacaaaactggtactctgacatgcaatgtaatgcagtttaagaagtgcaccatagcgggarttgcttatggccatgtccctgaacctgaggattatggctgctctcctgatgaatggcagaactcacagtttggagatgaaaaaacatttagtgattcatcattgctggaaaatctccaaaataatcatccaactgcacctataatatgtgaatttcttacaatgatggcagtctgtcacacagcagtgccagagcgagaaggtgacaagattatttatcaagcagcatctccagatgagggagcattggtcagagcagccaagcaattgaattttgttttcactggaagaacacccgactcggtgattatagattcactggggcaggaagaaagatatgaattgctcartgtcttggagtttaccagtgctaggaaaagaatgtcagtgattgttcgcactccatctggaaagttacgactctactgcaaaggagctgacactgtaatttatgatcgactggcagagacgtcaaaatacaaagaaattaccctaaaacatttagagcagtttgctacagaagggttaagaactttatgttttgctgtggctgagatttcagagagcgactttcaggagtggcgagcagtctatcagcgagcatctacatctgtgcagaacaggctactcaaactcgaagagagttatgagttgattgaaaagaatcttcagctacttggagcaacagccattgaggataaattacaagatcaagtgcctgaaaccatagaaaygctaatgaaagcagacatcaaaatctggatccttacaggggacaagcaagaaactgccattaacatcggacactcctgcaaactgttgaagaagaacatgggaatgattgttataaatgaaggctctcttgatggaacaagggaaactctcagtcgtcactgtactacccttggtgatgctctccggaaagagaatgattttgctcttataattgatgggaaaaccctcaaatatgccttaacctttggagtacgacagtatttcctggacttagctttgtcatgcaaagctgtcatttgctgtcgggtttctcctcttcaaaaatctgaagttgttgagatggttaagaaacaagtcaaagtcgtaacgcttgcaatcggtgatggagcaaatgatgtcagcatgatacagacagcgcacgttggtgttggtatcagtggcaatgaaggcctgcaggcagctaattcctctgactactccatagctcagttcaaatatttgaagaatttactgatgattcatggtgcctggaactataacagagtctccaagtgcatcttatactgcttctacaagaatatagtgctctatattatcgagatctggtttgcctttgttaatggcttttctggacagatcctctttgaaagatggtgtataggtctctataaygtgatgtttacagcaatgcctcctttaactcttggaatatttgagagatcatgcagaaaagagaacatgttgaagtaccctgaattatacaaaacatctcagaatgccctggacttcaacaccaaggttttctgggttcattgtttaaatggcctcttccactcagttattctgttttggtttccactaaaagcccttcagtatggtactgcatttggaaatgggaaaacctcggattatctgctactgggaaactttgtgtacacttttgtggtgataactgtgtgtttgaaagctggattggagacatcatattggacatggttcagccacatagcgatatgggggagcatcgcactctgggtggtgttttttggaatctactcatctctgtggcctgccattccgatggcccctgatatgtcaggagaggcagccatgttgttcagttctggagtcttttggatgggcttgttattcatccctgtggcatctctgctccttgatgtggtgtacaaggttatcaagaggactgcttttaaaacattggtcgatgaagttcaggagctggaggcaaaatctcaagacccaggagcagttgtacttggaaaaagcctgaccgagagggcgcaactgctcaagaacgtctttaagaagaaccacgtgaacttgtaccgctctgaatccttgcaacaaaatctgctccatgggtatgcgttctctcaagatgaaaatggaatcgtttcacagtctgaagtgataagagcatatgataccacgaaacagaggcccgacgaatggtgatggggagagcctgaaaggcaggctctgttacctctctaaggagagctaccaggttgtcaccgcagtctgctaaccaattccagtctggtccatgaagaggaaaggtagatctgagctcatctcgctgatggacattcagattcatgtatattatagacataagcactgtgcaactgtactgtaacaccatctcttttggatttttttaaggtatttgctaagtctttgtaaacggaaattgaaaatgacctggtatcttgccagagggctttcttaaacggagaataagtcagtattcttatgccattactgtggggctgtaactgactgtcagtttattggctgtaccacaaggtaaccaaccattaaaaaactctaaatgatatttagttaaagggactcttggtatccagacttagatttcaggatatgctgaaacaaaccagcattcttaaggaactgactcaccttcctgagcaaaatttctaaacaagcatttgtgtccaaaattgtcttgataaatgtttgccaaagaggttcagtaagtgtttttctagttcagtagtcatatgcccagaaatgtaagagaaagtttacttccagttccgctgtaagatctgcatgcctgactttccaaatgtaagagtgatttacaaaaatgaatatttcaaggcatttgctactaaaatcggtgatgttgcacctttggccttacaaatgcttctttgttgtttgtcgtgtttatttgttagaggacacacgtgttaatgtgactctgttgttatgacactgatttttcaaactatgtatgtttcaggtatttctgatgaagtttcatcatcatttagatttttctaaaaatctggctaatgcagtagattgagtgatgtcattttgtcttaaagtttttcctcttaagaaacatatgctacgtatttacgtgggatttccaaagcttctgttgcaatatttggaataacatgtcagataaatgcatgggcttttgtcctgtgttccagttcccactagagatgcctgtgtcttgtgtagcacacccagtgttatggtgactgccccctatactgaagactgaaaattatttcacagttcactcatcaaatagttcccaaaattcgtcacatgctgcttattgggacaaataggtagtacattttccccatttaaaaaatgcggattttactcaggccggtaactttacagtcagaggacacgttcatcatgagtagcttttgttagtatgttttaaaatgtatcttcagttcaattattttcagcatttacaagacatctgaaaatggctattttgctaccaacagtaaatgaaggggctgtttaaaaaccacaaccagttttctacactattttttaaataatactttcatttgaaaaaaaggaattagttttcagatacacttcagagattgaagcaaactatttgccttttactcaaaagcctgcttgcctttacatggacttaccagcaaaataggtagaac

SEQ ID NO: 1711 - DNA, 5192 bp, Homo sapiens
cgcccagctctgcgggcgccgccaccttcgccgccaccgctgcctttctcctcctcctgtcggcgtgcgggggccgcgcccggcggcagctctgccctaggtgggcggcggcgcggcccaggctgcagctgagcgctctgcgcggcgcagccgggtctcccgcgtgtaccacgccgtgacaggtgcagagtccgggctgaggacccacctgcagccgccgccgcgatgcccaccatgcggaggaccgtgtcggagatccgctcgcgcgccgaaggttatgagaagacagatgatgtttcagagaagacctcactggctgaccaggaggaagtaaggactattttcatcaaccagccccagctracaaaattctgcaataaccatgtcagcactgcaaaatacaacataatcacattccttccaagatttctctactctcagttcagaagagctgctaattcattttttctctttattgcactgctgcagcaaatacctgatgtgtcaccaacaggtcgttatacaacactggttcctctcttatttattttagctgtggcagctatcaaagagataatagaagatattaaacgacataaagctgataatgcagtgaacaagaaacaaacgcaagttttgagaaatggtgcttgggaaattgtccactgggaaaaggtaaatgttggagatatagttataataaaaggcaaagagtatatacctgctgacactgtacttctctcatcaagtgagccccaagccatgtgctacattgaaacatccaacttagatggtgaaacaaacttgaaaattagacagggcttaccagcaacatcagatatcaaagacgttgacagtttgatgaggatttctggcagaattgagtgtgaaagtccaaacagacatctctacgattttgttggaaacataaggcttgatggacatggcaccgttccactgggagcagatcagattcttcttcgaggagctcagttgagaaatacacagtgggttcatggaatagttgtctacactggacatgacaccaagctgatgcagaattcaacaagtccaccacttaagctctcaaatgtggaacggattacaaatgtacaaattttgattttattttgtatcttaattgccatgtctcttgtctgttctgtgggctcagccatttggaatcgaaggcattctggaaaagactggtatctcaatctaaactatggtggcgctagtaattttggactgaatttcttgaccttcatcatccttttcaacaatctcattcctatcagcttattggttacattagaagttgtgaaatttacccaggcatacttcataaattgggatcttgacatgcactatgaacccacagacactgctgctatggctcgaacatctaatctgaatgaggaacttggccaggttaaatacatattttctgacaaaactggtactctgacatgcaatgtaatgcagtttaagaagtgcaccatagcgggarttgcttatgggcagaactcacagtttggagatgaaaaaacatttagtgattcatcattgctggaaaatctccaaaataatcatccaactgcacctataatatgtgaatttcttacaatgatggcagtctgtcacacagcagtgccagagcgagaaggtgacaagattatttatcaagcagcatctccagatgagggagcattggtcagagcagccaagcaattgaattttgttttcactggaagaacacccgactcggtgattatagattcactggggcaggaagaaagatatgaattgctcartgtcttggagtttaccagtgctaggaaaagaatgtcagtgattgttcgcactccatctggaaagttacgactctactgcaaaggagctgacactgtaatttatgatcgactggcagagacgtcaaaatacaaagaaattaccctaaaacatttagagcagtttgctacagaagggttaagaactttatgttttgctgtggctgagatttcagagagcgactttcaggagtggcgagcagtctatcagcgagcatctacatctgtgcagaacaggctactcaaactcgaagagagttatgagttgattgaaaagaatcttcagctacttggagcaacagccattgaggataaattacaagatcaagtgcctgaaaccatagaaaygctaatgaaagcagacatcaaaatctggatccttacaggggacaagcaagaaactgccattaacatcggacactcctgcaaactgttgaagaagaacatgggaatgattgttataaatgaaggctctcttgatggaacaagggaaactctcagtcgtcactgtactacccttggtgatgctctccggaaagagaatgattttgctcttataattgatgggaaaaccctcaaatatgccttaacctttggagtacgacagtatttcctggacttagctttgtcatgcaaagctgtcatttgctgtcgggtttctcctcttcaaaaatctgaagttgttgagatggttaagaaacaagtcaaagtcgtaacgcttgcaatcggtgatggagcaaatgatgtcagcatgatacagacagcgcacgttggtgttggtatcagtggcaatgaaggcctgcaggcagctaattcctctgactactccatagctcagttcaaatatttgaagaatttactgatgattcatggtgcctggaactataacagagtctccaagtgcatcttatactgcttctacaagaatatagtgctctatattatcgagatctggtttgcctttgttaatggcttttctggacagatcctctttgaaagatggtgtataggtctctataaygtgatgtttacagcaatgcctcctttaactcttggaatatttgagagatcatgcagaaaagagaacatgttgaagtaccctgaattatacaaaacatctcagaatgccctggacttcaacaccaaggttttctgggttcattgtttaaatggcctcttccactcagttattctgttttggtttccactaaaagcccttcagtatggtactgcatttggaaatgggaaaacctcggattatctgctactgggaaactttgtgtacacttttgtggtgataactgtgtgtttgaaagctggattggagacatcatattggacatggttcagccacatagcgatatgggggagcatcgcactctgggtggtgttttttggaatctactcatctctgtggcctgccattccgatggcccctgatatgtcaggagaggcagccatgttgttcagttctggagtcttttggatgggcttgttattcatccctgtggcatctctgctccttgatgtggtgtacaaggttatcaagaggactgcttttaaaacattggtcgatgaagttcaggagctggaggcaaaatctcaagacccaggagcagttgtacttggaaaaagcctgaccgagagggcgcaactgctcaagaacgtctttaagaagaaccacgtgaacttgtaccgctctgaatccttgcaacaaaatctgctccatgggtatgcgttctctcaagatgaaaatggaatcgtttcacagtctgaagtgataagagcatatgataccacgaaacagaggcccgacgaatggtgatggggagagcctgaaaggcaggctctgttacctctctaaggagagctaccaggttgtcaccgcagtctgctaaccaattccagtctggtccatgaagaggaaaggtagatctgagctcatctcgctgatggacattcagattcatgtatattatagacataagcactgtgcaactgtactgtaacaccatctcttttggatttttttaaggtatttgctaagtctttgtaaacggaaattgaaaatgacctggtatcttgccagagggctttcttaaacggagaataagtcagtattcttatgccattactgtggggctgtaactgactgtcagtttattggctgtaccacaaggtaaccaaccattaaaaaactctaaatgatatttagttaaagggactcttggtatccagacttagatttcaggatatgctgaaacaaaccagcattcttaaggaactgactcaccttcctgagcaaaatttctaaacaagcatttgtgtccaaaattgtcttgataaatgtttgccaaagaggttcagtaagtgtttttctagttcagtagtcatatgcccagaaatgtaagagaaagtttacttccagttccgctgtaagatctgcatgcctgactttccaaatgtaagagtgatttacaaaaatgaatatttcaaggcatttgctactaaaatcggtgatgttgcacctttggccttacaaatgcttctttgttgtttgtcgtgtttatttgttagaggacacacgtgttaatgtgactctgttgttatgacactgatttttcaaactatgtatgtttcaggtatttctgatgaagtttcatcatcatttagatttttctaaaaatctggctaatgcagtagattgagtgatgtcattttgtcttaaagtttttcctcttaagaaacatatgctacgtatttacgtgggatttccaaagcttctgttgcaatatttggaataacatgtcagataaatgcatgggcttttgtcctgtgttccagttcccactagagatgcctgtgtcttgtgtagcacacccagtgttatggtgactgccccctatactgaagactgaaaattatttcacagttcactcatcaaatagttcccaaaattcgtcacatgctgcttattgggacaaataggtagtacattttccccatttaaaaaatgcggattttactcaggccggtaactttacagtcagaggacacgttcatcatgagtagcttttgttagtatgttttaaaatgtatcttcagttcaattattttcagcatttacaagacatctgaaaatggctattttgctaccaacagtaaatgaaggggctgtttaaaaaccacaaccagttttctacactattttttaaataatactttcatttgaaaaaaaggaattagttttcagatacacttcagagattgaagcaaactatttgccttttactcaaaagcctgcttgcctttacatggacttaccagcaaaataggtagaac

SEQ ID NO: 1712 - DNA, 3437 bp, Homo sapiens
cgcccagctctgcgggcgccgccaccttcgccgccaccgctgcctttctcctcctcctgtcggcgtgcgggggccgcgcccggcggcagctctgccctaggtgggcggcggcgcggcccaggctgcagctgagcgctctgcgcggcgcagccgggtctcccgcgtgtaccacgccgtgacaggtgcagagtccgggctgaggacccacctgcagccgccgccgcgatgcccaccatgcggaggaccgtgtcggagatccgctcgcgcgccgaaggttatgagaagacagatgatgtttcagagaagacctcactggctgaccaggaggaagtaaggactattttcatcaaccagccccagctracaaaattctgcaataaccatgtcagcactgcaaaatacaacataatcacattccttccaagatttctctactctcagttcagaagagctgctaattcattttttctctttattgcactgctgcagcaaatacctgatgtgtcaccaacaggtcgttatacaacactggttcctctcttatttattttagctgtggcagctatcaaagagataatagaagatattaaacgacataaagctgataatgcagtgaacaagaaacaaacgcaagttttgagaaatggtgcttgggaaattgtccactgggaaaaggtggcagtaggggagatagtgaaagtgaccaatggggaacatctcccagcagatctcatcagtctgtcctcaagtgagccccaagccatgtgctacattgaaacatccaacttagatggtgaaacaaacttgaaaattagacagggcttaccagcaacatcagatatcaaagacgttgacagtttgatgaggatttctggcagaattgagtgtgaaagtccaaacagacatctctacgattttgttggaaacataaggcttgatggacatggcaccgttccactgggagcagatcagattcttcttcgaggagctcagttgagaaatacacagtgggttcatggaatagttgtctacactggacatgacaccaagctgatgcagaattcaacaagtccaccacttaagctctcaaatgtggaacggattacaaatgtacaaattttgattttattttgtatcttaattgccatgtctcttgtctgttctgtgggctcagccatttggaatcgaaggcattctggaaaagactggtatctcaatctaaactatggtggcgctagtaattttggactgaatttcttgaccttcatcatccttttcaacaatctcattcctatcagcttattggttacattagaagttgtgaaatttacccaggcatacttcataaattgggatcttgacatgcactatgaacccacagacactgctgctatggctcgaacatctaatctgaatgaggaacttggccaggttaaatacatattttctgacaaaactggtactctgacatgcaatgtaatgcagtttaagaagtgcaccatagcgggarttgcttatggccatgtccctgaacctgaggattatggctgctctcctgatgaatggcagaactcacagtttggagatgaaaaaacatttagtgattcatcattgctggaaaatctccaaaataatcatccaactgcacctataatatgtgaatttcttacaatgatggcagtctgtcacacagcagtgccagagcgagaaggtgacaagattatttatcaagcagcatctccagatgagggagcattggtcagagcagccaagcaattgaattttgttttcactggaagaacacccgactcggtgattatagattcactggggcaggaagaaagatatgaattgctcartgtcttggagtttaccagtgctaggaaaagaatgtcagtgattgttcgcactccatctggaaagttacgactctactgcaaaggagctgacactgtaatttatgatcgactggcagagacgtcaaaatacaaagaaattaccctaaaacatttagagcagtttgctacagaagggttaagaactttatgttttgctgtggctgagatttcagagagcgactttcaggagtggcgagcagtctatcagcgagcatctacatctgtgcagaacaggctactcaaactcgaagagagttatgagttgattgaaaagaatcttcagctacttggagcaacagccattgaggataaattacaagatcaagtgcctgaaaccatagaaaygctaatgaaagcagacatcaaaatctggatccttacaggggacaagcaagaaactgccattaacatcggacactcctgcaaactgttgaagaagaacatgggaatgattgttataaatgaaggctctcttgatggaacaagggaaactctcagtcgtcactgtactacccttggtgatgctctccggaaagagaatgattttgctcttataattgatgggaaaaccctcaaatatgccttaacctttggagtacgacagtatttcctggacttagctttgtcatgcaaagctgtcatttgctgtcgggtttctcctcttcaaaaatctgaagttgttgagatggttaagaaacaagtcaaagtcgtaacgcttgcaatcggtgatggagcaaatgatgtcagcatgatacagacagcgcacgttggtgttggtatcagtggcaatgaaggcctgcaggcagctaattcctctgactactccatagctcagttcaaatatttgaagaatttactgatgattcatggtgcctggaactataacagagtctccaagtgcatcttatactgcttctacaagaatatagtgctctatattatcgagatctggtttgcctttgttaatggcttttctggacagatcctctttgaaagatggtgtataggtctctataaygtgatgtttacagcaatgcctcctttaactcttggaatatttgagagatcatgcagaaaagagaacatgttgaagtaccctgaattatacaaaacatctcagaatgccctggacttcaacaccaaggttttctgggttcattgtttaaatggcctcttccactcagttattctgttttggtttccactaaaagcccttcagtatggtactgcatttggaaatgggaaaacctcggattatctgctactgggaaactttgtgtacacttttgtggtgataactgtgtgtttgaaagctggattggagacatcatattggacatggttcagccacatagcgatatgggggagcatcgcactctgggtggtgttttttggaatctactcatctctgtggcctgccattccgatggcccctgatatgtcaggagaggcagccatgttgttcagttctggagtcttttggatgggcttgttattcatccctgtggcatctctgctccttgatgtggtgtacaaggt

SEQ ID NO: 1713 - DNA, 7736 bp, Homo sapiens
tcactcagggatgatggcgccacttcctcagtttcgkcactcaagcgcctggaacggagtcagtggacggataagatggatttgcggtttggttttgagcggctgaaggagcctggtgagaagacaggctggctcattaacatgcatcctaccgagattttagatgaagataagcgcttaggcagtgcagtggattactactttattcaagatgacggaagcagatttaaggtggctttgccctataaaccgtatttctacattgcgaccagaaagggttgtgagcgagaagtttcatcttttctctccaagaagtttcagggcaaaattgcaaaagtggagactgtccccaaagaggatctggacttgccaaatcacttggtgggtttgaagcgaaattacatcaggctgtccttccacactgtggaggatcttgtcaaagtgaggaaggagatctcccctgccgtgaagaagaacagggagcaggatcacgccagcgacgcgtacacagctctgctttccagtgttctgcagaggggcggtgtcattactgatgaagaggaaacctctaagaagatagctgaccagttggacaacattgtggacatgcgcgagtacgatgttccctaccacatccgcctctccattgacctgaagatccacgtggctcattggtacaatgtcagataccgaggaaatgyttttccggtagaaatcacccrccgagatgaccttgttgaacgacctgaccctgtggttttggcatttgacattgagacgaccaaactgcccctcaagtttcctgatgctgagacagaccagattatgatgatttcctacatgatcgatggccagggctacctcatcaccaacagggagattgtttcagaagatattgaagattttgagttcacccccaagccagaatatgaaggccccttttgtgtcttcaatgaacccgatgaggctcatctgatccaaaggtggtttgaacacgtccaggagaccaaacccaccatcatggtcacctacaacggggacttttttgactggccatttgtggaggcccgggcagcagtccacggtctgagcatgcagcaggagataggcttccagaaggacagccagggggagtacaaggcgccccagtgcatccacatggactgcctcaggtgggtgaagagggacagttaccttcctgtgggcagtcataatctcaaggcggccgccaaggccaagctaggctatgatcccgtggagctagacccggaggacatgtgccggatggccacggagcagccccagactctggccacgtattctgtgtcagatgctgtcgccacttactacctgtacatgaagtacgtccacccattcatctttgctctgtgcaccattattcccatggagcccgacgaggtgctgcggaagggctctggcactctgtgtgaggccttgctgatggtgcaggccttccacgccaacatcatcttccccaacaagcaagagcaggagttcaataagctgacggacgacggacacgtgctggactctgagacctacgtcgggggccacgtggaggccctcgagtctggggttttccgcagcgatatcccttgccggtttaggatgaatcctgccgcctttgacttcctgctgcagcgggttgagaagaccttgcgccacgcccttgaggaagaggagaaagtgcctgtggagcaagtcaccaactttgaagaggtgtgtgatgagattaagagcaagcttgcctccctgaaggacgttcccagccgcatcgagtgtccactcatctaccacctggacgtgggggccatgtaccccaacatcatcctgaccaaccgcctgcagccctctgccatggtggacgaagccacctgtgctgcctgtgacttcaataagcctggagcaaactgccagcggaagatggcctggcagtggaggggcgagttcatgccagccagtcgcagcgaataccatcggatccagcaccagctggagtcagagaagwtcccccscttgttcccagaggggccagctcgggcctttcatgaactgtcccgcgaggaacaggcgaaatacgagaagagaaggctggyggattactgccggaaagcctacaagaagatccacatcaccaaggtggaagagcgtctcaccaccatctgccagcgggaaaactccttctacgtggacaccgtgcgtgccttccgggacaggcgttacgagttcaaagggctccacaaggtgtggaaaaagaagctctcggcggccgtggaggtgggcgacgcggctgaggtgaagcgctgcaagaacatggaggtgctgtatgactcgctgcagctggcccacaagtgcatcctgaactccttctatggctatgtcatgcgcaagggggctcgctggtactccatggagatggctggcatcgtctgcttcacaggggccaacatcatcacccaggcacgggagctgatygagcagattgggaggcccttagagctggacacagatggtatatggtgcgtcctgcccaacagcttcccagaaaattttgtcttcaagacgaccaatgtgaagaagcccaaagtgaccatctcctacccaggcgccatgttgaacatcatggtcaaggaaggcttcaccaatgaccagtaccaggagctggctgagccgtcctcactcacctacgtcacccgctcagagaacagcatcttttttgaggttgatgggccctaccttgccatgattcttccagcctccaaggaagaaggcaagaaattgaagaagaggtatgctgtgttcaatgaagacggttctctggctgagctcaagggctttgaggtcaaacgccgyggggaactgcagctgattaagatcttccaatcctcggtgtttgaggccttcctcaagggcagcacgctggaagaggtgtatggctctgtagccaaggtggctgactactggctggacgtgctgtacagcaaggcagccaacatgcctgactctgagctattcgagctcatctctgagaaccgttccatgtctcggaarctggaagattacggggagcagaagtctacrtccatcagcacagcaaagcgcctggccgagttcctgggagaccagatggtcaaggatgcagggctgagttgccgctacatcatctcccgcaagcccgagggctcccctgtcacggagagggccatcccacttgccattttccaagcagagcccacggtgaggaagcactttctccggaaatggctcaagagctcttcccttcaagactttgatattcgagcaattctggattgggactactacattgagcggctgggaagcgccatccagaagatcatcaccatccctgcggccctgcagcaggtaaagaacccagtgccacgtgtcaaacaccccgactggctgcacaaaaaactgctggagaagaatgatgtctacaagcagaagaagatcagtgagctcttcaccctggagggcaggagacaggtcacgatggccgaggcctcagaagacagtccgaggccaagtgctcctgacatggaggacttcggcctcgtaaagctgcctcacccagcagcccctgtcactgtgaagaggaagcgagttctttgggagagccagraggagtcccaggacctcacgccgactgtgccctggcaggaaatcttggggcagcctcccgccctgggaaccagccaggaggaatggcttgtctggctccggttccacaagaagaagtggcagctgcaggcccggcagcgcctcgcccgcaggaagaggcagcgtctggagtcggcagagggtgtgctcaggcccggggccatccgggatggtcctgccacggggctggggagcttcttgcgaagaactgcccgcagcatcctggaccttccgtggcagattgtgcagatcagcgagaccagccaggccggcctgttcaggctgtgggcgctcgttggcagtgacttgcactgcatcaggctgagcatcccccgtgtgttctacgtgaaccagcgagtcgctaaagcggaggagggtgcttcgtatcgcaaggtaaatcgggtccttcctcgctccaacatggtctacaatctctatgagtattcagtgccagaggacatgtaccaggaacacatcaacgagatcaacgctgagctgtcagcgccagacatcgagggcgtatatgagactcaggttccgttactgttccgggccctggtgcacctgggctgtgtgtgtgtggtcaataaacagctggtgaggcacctttcaggctgggaagcagagacctttgctcttgagcacctggagatgcgctctctggcccagttcagctacctggaaccagggagtatccgccatatctacctgtaccaccacgcacaggcccacaaagcgctcttcgggatcttcatcccctcacagcgcagggcrtccgtctttgtgctggacactgtgcgcagcaaccagatgcccagccttggcgccctgtactcagcagagcacggcctcctcctggagaaggtgggccctgagctcctgccaccccccaaacacaccttcgaagttcgggcagaaactgacctgaagaccatctgcagagccatccagcgattcctgctcgcctacaaggaggagcgccgggggcccacactcatcgctgttcagtccagctgggagctgaagaggctggccagtgaaattcctgtcttggaggaattcccactggtgcctatctgtgtggctgacaagatcaactatggggtcctggactggcagcgccatggagcccggcgcatgatccgtcactacctcaacctggacacctgcctgtcgcaggccttcgagatgagcaggtactttcacattcccattgggaacctaccagaggacatctccacattcggctccgacctcttctttgcccgccacctccagcgccacaaccacctgctctggctgtcccctacagcccgccctgacctgggtggaaaggaggctgatgacaactgtcttgtcatggagttcgatgaccaagccactgttgagatcaacagttcaggctgttactccacagtgtgtgtggagctggaccttcagaacctggccgtcaacaccattctccagtctcaccatgtcaacgacatggagggggccgacagcatggggatcagcttcgacgtgatccagcaggcctccctggaggacatgatcacgggtggtcaggctgccagtgccccggccagctacgatgagacagccctgtgctctaacaccttcaggatcctgaagagcatggtcgtgggctgggtgaaggagatcacccagtaccacaacatctatgcagacaaccaggtgatgcacttctaccgctggcttcggtcgccatcctctctgcttcatgaccctgccctgcaccgcacactccacaacatgatgaagaagctcttcctgcagctcatcgctgagttcaagcgcctggggtcatcagtcatctacgccaacttcaaccgcatcatcctctgtacaaagaagcgccgtgtggaagatgccatcgcttacgtggagtacatcaccagcagcatccattcaaaggagaccttccattctctgacaatttctttctctcgatgctgggaatttcttctctggatggatccatctaactatggcggaatcaaaggaaaagtttcatctcgtattcactgtggactgcaagactcccagaaagcagggggagcagaggatgagcaggaaaatgaggacgatgaggaggaaagagatggggaggaggaggaagaggcggaggaatccaacgtggaggatttactggaaaacaactggaacattttgcagtttttgccacaggcagcctcctgccagaactacttcctcatgattgtttcagcgtacatcgtggccgtgtaccactgcatgaaggacgggctgaggcgcagtgctccagggagcacccccgtgaggaggaggggggccagccagctctcccaggaggccgagggggcggtcggagcccttcccggaatgatcaccttctctcaggattatgtcgcaaatgagctcactcagagcttcttcaccatcactcagaagattcagaagaaagtcacaggctctcggaactccactgagctctcrgagatgtttcctgtcctccccggttcccacttgctgctcaataaccctgccctggagttcatcaaatacgtgtgcaaggtgctgtccctggacaccaacatcacaaaccaggtgaataagctgaaccgagacctgcttcgcctggtggatgtcggcgagttctccgaggaggcccagttccgagacccctgccgctcctacgtgcttcctgaggtcatctgccgcagctgtaacttctgccgcgacctggacctgtgtaaagactcttccttctcagaggatggggcggtcctgcctcagtggctctgctccaactgtcaggcgccctacgactcctctgccatcgagatgacgctggtggaagttctacagaagaagctgatggccttcaccctgcaggacctggtctgcctgaagtgccgcggggtgaaggagaccagcatgcctgtgtactgcagctgcgcgggagacttcgccctcaccatccacacccaggtcttcatggaacagatcggaatattccggaacattgcccagcactacggcatgtcgtacctcctggagaccctggagtggctgctgcagaagaacccacagctgggccattagccagccccgggccccgggtgcctctgcgtccgtgccaggcctcctgatgccaaggccacatccccgtgcttccagtgaccagaccactgaccaccctgactgtccaaacctgtgaccccaggccagggaacggggaggaaaccaaagaaaaccattttcagggagctcagacgtcacaggagggagcgggagcaggatgtggccctggcctcgccagagcacctgaagaagcaggccgtgagcgaggctgcgagtgccctgggcgccgtttctcacgcagtgaatgcttttccaggcctctgttgcttcctgcaccacacctggtggggtgggagcgtcctctaggtgcccctagttctttgtcctgcctcccagagggaggaaaagcccctgggggcttctggctccctgagattgggctctgagacgagacgggttcccaaggccctggtggggctggagtctcacctgtttgcatggagaaatgggctggccccacagcctcacaggagcagtttgtgggctggtttccccrggaatccagaccctaacccgtgagaatctggattttggcttgtgagccctgcttatttggagccgggtctagagggaaccctctatcagcctcaggaaaacaagacctctgtgcacctcacttttggctcactgcagcccttgtccttcacctccacacaggaccagctggaagcagaaagaagaaaggccaatttcacagggcaccaaacaagtatgaaatgtaaatcagaaatgcagacaccccagacragagcctcacaggagggagggggccccacaggctccccaggaggctcgtgtctttggcccagagccagccttagtttgtccctgccatctactgtctgaggccatcgctgctacactttktttttatttgtatttcatactga

SEQ ID NO: 1714 - DNA, 7190 bp, Homo sapiens
agggatgatggcgccacttcctcagtttcgkcactcaagcgcctggaacggagtcagtggacggataagatggatttgcggtttggttttgagcggctgaaggagcctggtgagaagacaggctggctcattaacatgcatcctgtggctttgccctataaaccgtatttctacattgcgaccagaaagggttgtgagcgagaagtttcatcttttctctccaagaagtttcagggcaaaattgcaaaagtggagactgtccccaaagaggatctggacttgccaaatcacttggtgggtttgaagcgaaattacatcaggctgtccttccacactgtggaggatcttgtcaaagtgaggaaggagatctcccctgccgtgaagaagaacagggagcaggatcacgccagcgacgcgtacacagctctgctttccagtgttctgcagaggggcggtgtcattactgatgaagaggaaacctctaagaagatagctgaccagttggacaacattgtggacatgcgcgagtacgatgttccctaccacatccgcctctccattgacctgaagatccacgtggctcattggtacaatgtcagataccgaggaaatgyttttccggtagaaatcacccrccgagatgaccttgttgaacgacctgaccctgtggttttggcatttgacattgagacgaccaaactgcccctcaagtttcctgatgctgagacagaccagattatgatgatttcctacatgatcgatggccagggctacctcatcaccaacagggagattgtttcagaagatattgaagattttgagttcacccccaagccagaatatgaaggccccttttgtgtcttcaatgaacccgatgaggctcatctgatccaaaggtggtttgaacacgtccaggagaccaaacccaccatcatggtcacctacaacggggacttttttgactggccatttgtggaggcccgggcagcagtccacggtctgagcatgcagcaggagataggcttccagaaggacagccagggggagtacaaggcgccccagtgcatccacatggactgcctcaggtgggtgaagagggacagttaccttcctgtgggcagtcataatctcaaggcggccgccaaggccaagctaggctatgatcccgtggagctagacccggaggacatgtgccggatggccacggagcagccccaggcacactctggccacgtattctgtgtcagatgctgtcgccacttactacctgtacatgaagtacgtccacccattcatctttgctctgtgcaccattattcccatggagcccgacgaggtgctgcggaagggctctggcactctgtgtgaggccttgctgatggtgcaggccttccacgccaacatcatcttccccaacaagcaagagcaggagttcaataagctgacggacgacggacacgtgctggactctgagacctacgtcgggggccacgtggaggccctcgagtctggggttttccgcagcgatatcccttgccggtttaggatgaatcctgccgcctttgacttcctgctgcagcgggttgagaagaccttgcgccacgcccttgaggaagaggagaaagtgcctgtggagcaagtcaccaactttgaagaggtgtgtgatgagattaagagcaagcttgcctccctgaaggacgttcccagccgcatcgagtgtccactcatctaccacctggacgtgggggccatgtaccccaacatcatcctgaccaaccgcctgcagccctctgccatggtggacgaagccacctgtgctgcctgtgacttcaataagcctggagcaaactgccagcggaagatggcctggcagtggaggggcgagttcatgccagccagtcgcagcgaataccatcggatccagcaccagctggagtcagagaagwtcccccscttgttcccagaggggccagctcgggcctttcatgaactgtcccgcgaggaacaggcgaaatacgagaagagaaggctggyggattactgccggaaagcctacaagaagatccacatcaccaaggtggaagagcgtctcaccaccatctgccagcgggaaaactccttctacgtggacaccgtgcgtgccttccgggacaggcgttacgagttcaaagggctccacaaggtgtggaaaaagaagctctcggcggccgtggaggtgggcgacgcggctgaggtgaagcgctgcaagaacatggaggtgctgtatgactcgctgcagctggcccacaagtgcatcctgaactccttctatggctatgtcatgcgcaagggggctcgctggtactccatggagatggctggcatcgtctgcttcacaggggccaacatcatcacccaggcacgggagctgatygagcagattgggaggcccttagagctggacacagatggtatatggtgcgtcctgcccaacagcttcccagaaaattttgtcttcaagacgaccaatgtgaagaagcccaaagtgaccatctcctacccaggcgccatgttgaacatcatggtcaaggaaggcttcaccaatgaccagtaccaggagctggctgagccgtcctcactcacctacgtcacccgctcagagaacagcatcttttttgaggttgatgggccctaccttgccatgattcttccagcctccaaggaagaaggcaagaaattgaagaagaggtatgctgtgttcaatgaagacggttctctggctgagctcaagggctttgaggtcaaacgccgyggggaactgcagctgattaagatcttccaatcctcggtgtttgaggccttcctcaagggcagcacgctggaagaggtgtatggctctgtagccaaggtggctgactactggctggacgtgctgtacagcaaggcagccaacatgcctgactctgagctattcgagctcatctctgagaaccgttccatgtctcggaarctggaagattacggggagcagaagtctacrtccatcagcacagcaaagcgcctggccgagttcctgggagaccagatggtcaaggatgcagggctgagttgccgctacatcatctcccgcaagcccgagggctcccctgtcacggagagggccatcccacttgccattttccaagcagagcccacggtgaggaagcactttctccggaaatggctcaagagctcttcccttcaagactttgatattcgagcaattctggattgggactactacattgagcggctgggaagcgccatccagaagatcatcaccatccctgcggccctgcagcaggtaaagaacccagtgccacgtgtcaaacaccccgactggctgcacaaaaaactgctggagaagaatgatgtctacaagcagaagaagatcagtgagctcttcaccctggagggcaggagacaggtcacgatggccgaggcctcagaagacagtccgaggccaagtgctcctgacatggaggacttcggcctcgtaaagctgcctcacccagcagcccctgtcactgtgaagaggaagcgagttctttgggagagccagraggagtcccaggacctcacgccgactgtgccctggcaggaaatcttggggcagcctcccgccctgggaaccagccaggaggaatggcttgtctggctccggttccacaagaagaagtggcagctgcaggcccggcagcgcctcgcccgcaggaagaggcagcgtctggagtcggcagagggtgtgctcaggcccggggccatccgggatggtcctgccacggggctggggagcttcttgcgaagaactgcccgcagcatcctggaccttccgtggcagattgtgcagatcagcgagaccagccaggccggcctgttcaggctgtgggcgctcgttggcagtgacttgcactgcatcaggctgagcatcccccgtgtgttctacgtgaaccagcgagtcgctaaagcggaggagggtgcttcgtatcgcaaggtaaatcgggtccttcctcgctccaacatggtctacaatctctatgagtattcagtgccagaggacatgtaccaggaacacatcaacgagatcaacgctgagctgtcagcgccagacatcgagggcgtatatgagactcaggttccgttactgttccgggccctggtgcacctgggctgtgtgtgtgtggtcaataaacagctggtgaggcacctttcaggctgggaagcagagacctttgctcttgagcacctggagatgcgctctctggcccagttcagctacctggaaccagggagtatccgccatatctacctgtaccaccacgcacaggcccacaaagcgctcttcgggatcttcatcccctcacagcgcagggcrtccgtctttgtgctggacactgtgcgcagcaaccagatgcccagccttggcgccctgtactcagcagagcacggcctcctcctggagaaggtgggccctgagctcctgccaccccccaaacacaccttcgaagttcgggcagaaactgacctgaagaccatctgcagagccatccagcgattcctgctcgcctacaaggaggagcgccgggggcccacactcatcgctgttcagtccagctgggagctgaagaggctggccagtgaaattcctgtcttggaggaattcccactggtgcctatctgtgtggctgacaagatcaactatggggtcctggactggcagcgccatggagcccggcgcatgatccgtcactacctcaacctggacacctgcctgtcgcaggccttcgagatgagcaggtactttcacattcccattgggaacctaccagaggacatctccacattcggctccgacctcttctttgcccgccacctccagcgccacaaccacctgctctggctgtcccctacagcccgccctgacctgggtggaaaggaggctgatgacaactgtcttgtcatggagttcgatgaccaagccactgttgagatcaacagttcaggctgttactccacagtgtgtgtggagctggaccttcagaacctggccgtcaacaccattctccagtctcaccatgtcaacgacatggagggggccgacagcatggggatcagcttcgacgtgatccagcaggcctccctggaggacatgatcacgggtggtcaggctgccagtgccccggccagctacgatgagacagccctgtgctctaacaccttcaggatcctgaagagcatggtcgtgggctgggtgaaggagatcacccagtaccacaacatctatgcagacaaccaggtgatgcacttctaccgctggcttcggtcgccatcctctctgcttcatgaccctgccctgcaccgcacactccacaacatgatgaagaagctcttcctgcagctcatcgctgagttcaagcgcctggggtcatcagtcatctacgccaacttcaaccgcatcatcctctgtacaaagaagcgccgtgtggaagatgccatcgcttacgtggagtacatcaccagcagcatccattcaaaggagaccttccattctctgacaatttctttctctcgatgctgggaatttcttctctggatggatccatctaactatggcggaatcaaaggaaaagtttcatctcgtattcactgtggactgcaagactcccagaaagcagggggagcagaggatgagcaggaaaatgaggacgatgaggaggaaagagatggggaggaggaggaagaggcggaggaatccaacgtggaggatttactggaaaacaactggaacattttgcagtttttgccacaggcagcctcctgccagaactacttcctcatgattgtttcagcgtacatcgtggccgtgtaccactgcatgaaggacgggctgaggcgcagtgctccagggagcacccccgtgaggaggaggggggccagccagctctcccaggaggccgagggggcggtcggagcccttcccggaatgatcaccttctctcaggattatgtcgcaaatgagctcactcagagcttcttcaccatcactcagaagattcagaagaaagtcacaggctctcggaactccactgagctctcrgagatgtttcctgtcctccccggttcccacttgctgctcaataaccctgccctggagttcatcaaatacgtgtgcaaggtgctgtccctggacaccaacatcacaaaccaggtgaataagctgaaccgagacctgcttcgcctggtggatgtcggcgagttctccgaggaggcccagttccgagacccctgccgctcctacgtgcttcctgaggtcatctgccgcagctgtaacttctgccgcgacctggacctgtgtaaagactcttccttctcagaggatggggcggtcctgcctcagtggctctgctccaactgtcaggcgccctacgactcctctgccatcgagatgacgctggtggaagttctacagaagaagctgatggccttcaccctgcaggacctggtctgcctgaagtgccgcggggtgaaggagaccagcatgcctgtgtactgcagctgcgcgggagacttcgccctcaccatccacacccaggtcttcatggaacagatcggaatattccggaacattgcccagcactacggcatgtcgtacctcctggagaccctggagtggctgctgcagaagaacccacagctgggccattagccagccccgggccccgggtgcctctgcgtccgtgccaggcctcctgatgccaaggccacatccccgtgcttccagtgaccagaccactgaccaccctgactgtccaaacctgtgaccccaggccagggaacggggaggaaaccaaagaaaaccattttcagggagctcagacgtcacaggagggagcgggagcaggatgtggccctggcctcgccagagcacctgaagaagcaggccgaccagctggaagcagaaagaagaaaggccaatttcacagggcaccaaacaagtatgaaatgtaaatcagaaatgcagacaccccagacragagcctcacaggagggagggggccccacaggctccccaggaggctcgtgtctttggcccagagccagccttagtttgtccctgccatctactgtctgaggccatcgctgctacactttktttttatttgtatttcata

SEQ ID NO: 1715 - DNA, 7420 bp, Homo sapiens
ctcagggatgatggcgccacttcctcagtttcgkcactcaagcgcctggaacggagtcagtggacggataagatggatttgcggtttggttttgagcggctgaaggagcctggtgagaagacaggctggctcattaacatgcatcctaccgagattttagatgaagataagcgcttaggcagtgcagtggattactactttattcaagatgacggaagcagatttaaggtggctttgccctataaaccgtatttctacattgcgaccagaaagggttgtgagcgagaagtttcatcttttctctccaagaagtttcagggcaaaattgcaaaagtggagactgtccccaaagaggatctggacttgccaaatcacttggtgggtttgaagcgaaattacatcaggctgtccttccacactgtggaggatcttgtcaaagtgaggaaggagatctcccctgccgtgaagaagaacagggagcaggatcacgccagcgacgcgtacacagctctgctttccagtgttctgcagaggggcggtgtcattactgatgaagaggaaacctctaagaagatagctgaccagttggacaacattgtggacatgcgcgagtacgatgttccctaccacatccgcctctccattgacctgaagatccacgtggctcattggtacaatgtcagataccgaggaaatgyttttccggtagaaatcacccrccgagatgaccttgttgaacgacctgaccctgtggttttggcatttgacattgagacgaccaaactgcccctcaagtttcctgatgctgagacagaccagattatgatgatttcctacatgatcgatggccagggctacctcatcaccaacagggagattgtttcagaagatattgaagattttgagttcacccccaagccagaatatgaaggccccttttgtgtcttcaatgaacccgatgaggctcatctgatccaaaggtggtttgaacacgtccaggagaccaaacccaccatcatggtcacctacaacggggacttttttgactggccatttgtggaggcccgggcagcagtccacggtctgagcatgcagcaggagataggcttccagaaggacagccagggggagtacaaggcgccccagtgcatccacatggactgcctcaggtgggtgaagagggacagttaccttcctgtgggcagtcataatctcaaggcggccgccaaggccaagctaggctatgatcccgtggagctagacccggaggacatgtgccggatggccacggagcagccccagactctggccacgtattctgtgtcagatgctgtcgccacttactacctgtacatgaagtacgtccacccattcatctttgctctgtgcaccattattcccatggagcccgacgaggtgctgcggaagggctctggcactctgtgtgaggccttgctgatggtgcaggccttccacgccaacatcatcttccccaacaagcaagagcaggagttcaataagctgacggacgacggacacgtgctggactctgagacctacgtcgggggccacgtggaggccctcgagtctggggttttccgcagcgatatcccttgccggtttaggatgaatcctgccgcctttgacttcctgctgcagcgggttgagaagaccttgcgccacgcccttgaggaagaggagaaagtgcctgtggagcaagtcaccaactttgaagaggtgtgtgatgagattaagagcaagcttgcctccctgaaggacgttcccagccgcatcgagtgtccactcatctaccacctggacgtgggggccatgtaccccaacatcatcctgaccaaccgcctgcagccctctgccatggtggacgaagccacctgtgctgcctgtgacttcaataagcctggagcaaactgccagcggaagatggcctggcagtggaggggcgagttcatgccagccagtcgcagcgaataccatcggatccagcaccagctggagtcagagaagwtcccccscttgttcccagaggggccagctcgggcctttcatgaactgtcccgcgaggaacaggcgaaatacgagaagagaaggctggyggattactgccggaaagcctacaagaagatccacatcaccaaggtggaagagcgtctcaccaccatctgccagcgggaaaactccttctacgtggacaccgtgcgtgccttccgggacaggcgttacgagttcaaagggctccacaaggtgtggaaaaagaagctctcggcggccgtggaggtgggcgacgcggctgaggtgaagcgctgcaagaacatggaggtgctgtatgactcgctgcagctggcccacaagtgcatcctgaactccttctatggctatgtcatgcgcaagggggctcgctggtactccatggagatggctggcatcgtctgcttcacaggggccaacatcatcacccaggcacgggagctgatygagcagattgggaggcccttagagctggacacagatggtatatggtgcgtcctgcccaacagcttcccagaaaattttgtcttcaagacgaccaatgtgaagaagcccaaagtgaccatctcctacccaggcgccatgttgaacatcatggtcaaggaaggcttcaccaatgaccagtaccaggagctggctgagccgtcctcactcacctacgtcacccgctcagagaacagcatcttttttgaggttgatgggccctaccttgccatgattcttccagcctccaaggaagaaggcaagaaattgaagaagaggtatgctgtgttcaatgaagacggttctctggctgagctcaagggctttgaggtcaaacgccgyggggaactgcagctgattaagatcttccaatcctcggtgtttgaggccttcctcaagggcagcacgctggaagaggtgtatggctctgtagccaaggtggctgactactggctggacgtgctgtacagcaaggcagccaacatgcctgactctgagctattcgagctcatctctgagaaccgttccatgtctcggaarctggaagattacggggagcagaagtctacrtccatcagcacagcaaagcgcctggccgagttcctgggagaccagatggtcaaggatgcagggctgagttgccgctacatcatctcccgcaagcccgagggctcccctgtcacggagagggccatcccacttgccattttccaagcagagcccacggtgaggaagcactttctccggaaatggctcaagagctcttcccttcaagactttgatattcgagcaattctggattgggactactacattgagcggctgggaagcgccatccagaagatcatcaccatccctgcggccctgcagcaggtaaagaacccagtgccacgtgtcaaacaccccgactggctgcacaaaaaactgctggagaagaatgatgtctacaagcagaagaagatcagtgagctcttcaccctggagggcaggagacaggtcacgatggccgaggcctcagaagacagtccgaggccaagtgctcctgacatggaggacttcggcctcgtaaagctgcctcacccagcagcccctgtcactgtgaagaggaagcgagttctttgggagagccagraggagtcccaggacctcacgccgactgtgccctggcaggaaatcttggggcagcctcccgccctgggaaccagccaggaggaatggcttgtctggctccggttccacaagaagaagtggcagctgcaggcccggcagcgcctcgcccgcaggaagaggcagcgtctggagtcggcagagggtgtgctcaggcccggggccatccgggatggtcctgccacggggctggggagcttcttgcgaagaactgcccgcagcatcctggaccttccgtggcagattgtgcagatcagcgagaccagccaggccggcctgttcaggctgtgggcgctcgttggcagtgacttgcactgcatcaggctgagcatcccccgtgtgttctacgtgaaccagcgagtcgctaaagcggaggagggtgcttcgtatcgcaaggtaaatcgggtccttcctcgctccaacatggtctacaatctctatgagtattcagtgccagaggacatgtaccaggaacacatcaacgagatcaacgctgagctgtcagcgccagacatcgagggcgtatatgagactcaggttccgttactgttccgggccctggtgcacctgggctgtgtgtgtgtggtcaataaacagctggtgaggcacctttcaggctgggaagcagagacctttgctcttgagcacctggagatgcgctctctggcccagttcagctacctggaaccagggagtatccgccatatctacctgtaccaccacgcacaggcccacaaagcgctcttcgggatcttcatcccctcacagcgcagggcrtccgtctttgtgctggacactatgcccagccttggcgccctgtactcagcagagcacggcctcctcctggagaaggtgggccctgagctcctgccaccccccaaacacaccttcgaagttcgggcagaaactgacctgaagaccatctgcagagccatccagcgattcctgctcgcctacaaggaggagcgccgggggcccacactcatcgctgttcagtccagctgggagctgaagaggctggccagtgaaattcctgtcttggaggaattcccactggtgcctatctgtgtggctgacaagatcaactatggggtcctggactggcagcgccatggagcccggcgcatgatccgtcactacctcaacctggacacctgcctgtcgcaggccttcgagatgagcaggtactttcacattcccattgggaacctaccagaggacatctccacattcggctccgacctcttctttgcccgccacctccagcgccacaaccacctgctctggctgtcccctacagcccgccctgacctgggtggaaaggaggctgatgacaactgtcttgtcatggagttcgatgaccaagccactgttgagatcaacagttcaggctgttactccacagtgtgtgtggagctggaccttcagaacctggccgtcaacaccattctccagtctcaccatgtcaacgacatggagggggccgacagcatggggatcagcttcgacgtgatccagcaggcctccctggaggacatgatcacgggtggtcaggctgccagtgccccggccagctacgatgagacagccctgtgctctaacaccttcaggatcctgaagagcatggtcgtgggctgggtgaaggagatcacccagtaccacaacatctatgcagacaaccaggtgatgcacttctaccgctggcttcggtcgccatcctctctgcttcatgaccctgccctgcaccgcacactccacaacatgatgaagaagctcttcctgcagctcatcgctgagttcaagcgcctggggtcatcagtcatctacgccaacttcaaccgcatcatcctctgtacaaagaagcgccgtgtggaagatgccatcgcttacgtggagtacatcaccagcagcatccattcaaaggagaccttccattctctgacaatttctttctctcgatgctgggaatttcttctctggatggatccatctaactatggcggaatcaaaggaaaagtttcatctcgtattcactgtggactgcaagactcccagaaagcagggggagcagaggatgagcaggaaaatgaggacgatgaggaggaaagagatggggaggaggaggaagaggcggaggaatccaacgtggaggatttactggaaaacaactggaacattttgcagtttttgccacaggcagcctcctgccagaactacttcctcatgattgtttcagcgtacatcgtggccgtgtaccactgcatgaaggacgggctgaggcgcagtgctccagggagcacccccgtgaggaggaggggggccagccagctctcccaggaggccgagggggcggtcggagcccttcccggaatgatcaccttctctcaggattatgtcgcaaatgagctcactcagagcttcttcaccatcactcagaagattcagaagaaagtcacaggctctcggaactccactgagctctcrgagatgtttcctgtcctccccggttcccacttgctgctcaataaccctgccctggagttcatcaaatacgtgtgcaaggtgctgtccctggacaccaacatcacaaaccaggtgaataagctgaaccgagacctgcttcgcctggtggatgtcggcgagttctccgaggaggcccagttccgagacccctgccgctcctacgtgcttcctgaggtcatctgccgcagctgtaacttctgccgcgacctggacctgtgtaaagactcttccttctcagaggatggggcggtcctgcctcagtggctctgctccaactgtcaggcgccctacgactcctctgccatcgagatgacgctggtggaagttctacagaagaagctgatggccttcaccctgcaggacctgraggaggcagacactcccaagtgtgaagagaaggaaaggaggaagagggagttgcrcagctcggccacaggaaggtcttgccgaggggcatctgagcagaggctgggggacgcgccaagctgccgtgtggtggtgcacggcgttcaggcctgcaggatggagggagtctgcctgaagtgccgcggggtgaaggagaccagcatgcctgtgtactgcagctgcgcgggagacttcgccctcaccatccacacccaggtcttcatggaacagatcggaatattccggaacattgcccagcactacggcatgtcgtacctcctggagaccctggagtggctgctgcagaagaacccacagctgggccattagccagccccgggccccgggtgcctctgcgtccgtgccaggcctcctgatgccaaggccacatccccgtgcttccagtgaccagaccactgaccaccctgactgtccaaacctgtgaccccaggccagggaacggggaggaaaccaaagaaaaccattttcagggagctcagacgtcacaggagggagcgggagcaggatgtggccctggcctcgccagagcacctgaagaagcaggccgaccagctggaagcagaaagaagaaaggccaatttcacagggcaccaaacaagtatgaaatgtaaatcagaaatgcagacaccccagacragagcctcacaggagggagggggccccacaggctccccaggaggctcgtgtctttggcccagagccagccttagtttgtccctgccatctactgtctgaggccatcgctgctacactttktttttatttgtatttcata

SEQ ID NO: 1716 - DNA, 7274 bp, Homo sapiens
ctcagggatgatggcgccacttcctcagtttcgkcactcaagcgcctggaacggagtcagtggacggataagatggatttgcggtttggttttgagcggctgaaggagcctggtgagaagacaggctggctcattaacatgcatcctaccgagattttagatgaagataagcgcttaggcagtgcagtggattactactttattcaagatgacggaagcagatttaaggtggctttgccctataaaccgtatttctacattgcgaccagaaagggttgtgagcgagaagtttcatcttttctctccaagaagtttcagggcaaaattgcaaaagtggagactgtccccaaagaggatctggacttgccaaatcacttggtgggtttgaagcgaaattacatcaggctgtccttccacactgtggaggatcttgtcaaagtgaggaaggagatctcccctgccgtgaagaagaacagggagcaggatcacgccagcgacgcgtacacagctctgctttccagtgttctgcagaggggcggtgtcattactgatgaagaggaaacctctaagaagatagctgaccagttggacaacattgtggacatgcgcgagtacgatgttccctaccacatccgcctctccattgacctgaagatccacgtggctcattggtacaatgtcagataccgaggaaatgyttttccggtagaaatcacccrccgagatgaccttgttgaacgacctgaccctgtggttttggcatttgacattgagacgaccaaactgcccctcaagtttcctgatgctgagacagaccagattatgatgatttcctacatgatcgatggccagggctacctcatcaccaacagggagattgtttcagaagatattgaagattttgagttcacccccaagccagaatatgaaggccccttttgtgtcttcaatgaacccgatgaggctcatctgatccaaaggtggtttgaacacgtccaggagaccaaacccaccatcatggtcacctacaacggggacttttttgactggccatttgtggaggcccgggcagcagtccacggtctgagcatgcagcaggagataggcttccagaaggacagccagggggagtacaaggcgccccagtgcatccacatggactgcctcaggtgggtgaagagggacagttaccttcctgtgggcagtcataatctcaaggcggccgccaaggccaagctaggctatgatcccgtggagctagacccggaggacatgtgccggatggccacggagcagccccaggcacactctggccacgtattctgtgtcagatgctgtcgccacttactacctgtacatgaagtacgtccacccattcatctttgctctgtgcaccattattcccatggagcccgacgaggtgctgcggaagggctctggcactctgtgtgaggccttgctgatggtgcaggccttccacgccaacatcatcttccccaacaagcaagagcaggagttcaataagctgacggacgacggacacgtgctggactctgagacctacgtcgggggccacgtggaggccctcgagtctggggttttccgcagcgatatcccttgccggtttaggatgaatcctgccgcctttgacttcctgctgcagcgggttgagaagaccttgcgccacgcccttgaggaagaggagaaagtgcctgtggagcaagtcaccaactttgaagaggtgtgtgatgagattaagagcaagcttgcctccctgaaggacgttcccagccgcatcgagtgtccactcatctaccacctggacgtgggggccatgtaccccaacatcatcctgaccaaccgcctgcagccctctgccatggtggacgaagccacctgtgctgcctgtgacttcaataagcctggagcaaactgccagcggaagatggcctggcagtggaggggcgagttcatgccagccagtcgcagcgaataccatcggatccagcaccagctggagtcagagaagwtcccccscttgttcccagaggggccagctcgggcctttcatgaactgtcccgcgaggaacaggcgaaatacgagaagagaaggctggyggattactgccggaaagcctacaagaagatccacatcaccaaggtggaagagcgtctcaccaccatctgccagcgggaaaactccttctacgtggacaccgtgcgtgccttccgggacaggcgttacgagttcaaagggctccacaaggtgtggaaaaagaagctctcggcggccgtggaggtgggcgacgcggctgaggtgaagcgctgcaagaacatggaggtgctgtatgactcgctgcagctggcccacaagtgcatcctgaactccttctatggctatgtcatgcgcaagggggctcgctggtactccatggagatggctggcatcgtctgcttcacaggggccaacatcatcacccaggcacgggagctgatygagcagattgggaggcccttagagctggacacagatggtatatggtgcgtcctgcccaacagcttcccagaaaattttgtcttcaagacgaccaatgtgaagaagcccaaagtgaccatctcctacccaggcgccatgttgaacatcatggtcaaggaaggcttcaccaatgaccagtaccaggagctggctgagccgtcctcactcacctacgtcacccgctcagagaacagcatcttttttgaggttgatgggccctaccttgccatgattcttccagcctccaaggaagaaggcaagaaattgaagaagaggtatgctgtgttcaatgaagacggttctctggctgagctcaagggctttgaggtcaaacgccgyggggaactgcagctgattaagatcttccaatcctcggtgtttgaggccttcctcaagggcagcacgctggaagaggtgtatggctctgtagccaaggtggctgactactggctggacgtgctgtacagcaaggcagccaacatgcctgactctgagctattcgagctcatctctgagaaccgttccatgtctcggaarctggaagattacggggagcagaagtctacrtccatcagcacagcaaagcgcctggccgagttcctgggagaccagatggtcaaggatgcagggctgagttgccgctacatcatctcccgcaagcccgagggctcccctgtcacggagagggccatcccacttgccattttccaagcagagcccacggtgaggaagcactttctccggaaatggctcaagagctcttcccttcaagactttgatattcgagcaattctggattgggactactacattgagcggctgggaagcgccatccagaagatcatcaccatccctgcggccctgcagcaggtaaagaacccagtgccacgtgtcaaacaccccgactggctgcacaaaaaactgctggagaagaatgatgtctacaagcagaagaagatcagtgagctcttcaccctggagggcaggagacaggtcacgatggccgaggcctcagaagacagtccgaggccaagtgctcctgacatggaggacttcggcctcgtaaagctgcctcacccagcagcccctgtcactgtgaagaggaagcgagttctttgggagagccagraggagtcccaggacctcacgccgactgtgccctggcaggaaatcttggggcagcctcccgccctgggaaccagccaggaggaatggcttgtctggctccggttccacaagaagaagtggcagctgcaggcccggcagcgcctcgcccgcaggaagaggcagcgtctggagtcggcagagggtgtgctcaggcccggggccatccgggatggtcctgccacggggctggggagcttcttgcgaagaactgcccgcagcatcctggaccttccgtggcagattgtgcagatcagcgagaccagccaggccggcctgttcaggctgtgggcgctcgttggcagtgacttgcactgcatcaggctgagcatcccccgtgtgttctacgtgaaccagcgagtcgctaaagcggaggagggtgcttcgtatcgcaaggtaaatcgggtccttcctcgctccaacatggtctacaatctctatgagtattcagtgccagaggacatgtaccaggaacacatcaacgagatcaacgctgagctgtcagcgccagacatcgagggcgtatatgagactcaggttccgttactgttccgggccctggtgcacctgggctgtgtgtgtgtggtcaataaacagctggtgaggcacctttcaggctgggaagcagagacctttgctcttgagcacctggagatgcgctctctggcccagttcagctacctggaaccagggagtatccgccatatctacctgtaccaccacgcacaggcccacaaagcgctcttcgggatcttcatcccctcacagcgcagggcrtccgtctttgtgctggacactgtgcgcagcaaccagatgcccagccttggcgccctgtactcagcagagcacggcctcctcctggagaaggtgggccctgagctcctgccaccccccaaacacaccttcgaagttcgggcagaaactgacctgaagaccatctgcagagccatccagcgattcctgctcgcctacaaggaggagcgccgggggcccacactcatcgctgttcagtccagctgggagctgaagaggctggccagtgaaattcctgtcttggaggaattcccactggtgcctatctgtgtggctgacaagatcaactatggggtcctggactggcagcgccatggagcccggcgcatgatccgtcactacctcaacctggacacctgcctgtcgcaggccttcgagatgagcaggtactttcacattcccattgggaacctaccagaggacatctccacattcggctccgacctcttctttgcccgccacctccagcgccacaaccacctgctctggctgtcccctacagcccgccctgacctgggtggaaaggaggctgatgacaactgtcttgtcatggagttcgatgaccaagccactgttgagatcaacagttcaggctgttactccacagtgtgtgtggagctggaccttcagaacctggccgtcaacaccattctccagtctcaccatgtcaacgacatggagggggccgacagcatggggatcagcttcgacgtgatccagcaggcctccctggaggacatgatcacgggtggtcaggctgccagtgccccggccagctacgatgagacagccctgtgctctaacaccttcaggatcctgaagagcatggtcgtgggctgggtgaaggagatcacccagtaccacaacatctatgcagacaaccaggtgatgcacttctaccgctggcttcggtcgccatcctctctgcttcatgaccctgccctgcaccgcacactccacaacatgatgaagaagctcttcctgcagctcatcgctgagttcaagcgcctggggtcatcagtcatctacgccaacttcaaccgcatcatcctctgtacaaagaagcgccgtgtggaagatgccatcgcttacgtggagtacatcaccagcagcatccattcaaaggagaccttccattctctgacaatttctttctctcgatgctgggaatttcttctctggatggatccatctaactatggcggaatcaaaggaaaagtttcatctcgtattcactgtggactgcaagactcccagaaagcagggggagcagaggatgagcaggaaaatgaggacgatgaggaggaaagagatggggaggaggaggaagaggcggaggaatccaacgtggaggatttactggaaaacaactggaacattttgcagtttttgccacaggcagcctcctgccagaactacttcctcatgattgtttcagcgtacatcgtggccgtgtaccactgcatgaaggacgggctgaggcgcagtgctccagggagcacccccgtgaggaggaggggggccagccagctctcccaggaggccgagggggcggtcggagcccttcccggaatgatcaccttctctcaggattatgtcgcaaatgagctcactcagagcttcttcaccatcactcagaagattcagaagaaagtcacaggctctcggaactccactgagctctcrgagatgtttcctgtcctccccggttcccacttgctgctcaataaccctgccctggagttcatcaaatacgtgtgcaaggtgctgtccctggacaccaacatcacaaaccaggtgaataagctgaaccgagacctgcttcgcctggtggatgtcggcgagttctccgaggaggcccagttccgagacccctgccgctcctacgtgcttcctgaggtcatctgccgcagctgtaacttctgccgcgacctggacctgtgtaaagactcttccttctcagaggatggggcggtcctgcctcagtggctctgctccaactgtcaggcgccctacgactcctctgccatcgagatgacgctggtggaagttctacagaagaagctgatggccttcaccctgcaggacctggtctgcctgaagtgccgcggggtgaaggagaccagcatgcctgtgtactgcagctgcgcgggagacttcgccctcaccatccacacccaggtcttcatggaacagatcggaatattccggaacattgcccagcactacggcatgtcgtacctcctggagaccctggagtggctgctgcagaagaacccacagctgggccattagccagccccgggccccgggtgcctctgcgtccgtgccaggcctcctgatgccaaggccacatccccgtgcttccagtgaccagaccactgaccaccctgactgtccaaacctgtgaccccaggccagggaacggggaggaaaccaaagaaaaccattttcagggagctcagacgtcacaggagggagcgggagcaggatgtggccctggcctcgccagagcacctgaagaagcaggccgaccagctggaagcagaaagaagaaaggccaatttcacagggcaccaaacaagtatgaaatgtaaatcagaaatgcagacaccccagacragagcctcacaggagggagggggccccacaggctccccaggaggctcgtgtctttggcccagagccagccttagtttgtccctgccatctactgtctgaggccatcgctgctacactttktttttatttgtatttcata

SEQ ID NO: 1717 - DNA, 4775 bp, Homo sapiens
gcgcttgggggcgtggccgaggagccaagmgagccgggggcggggccgcctgggggatgaagtgggggcgctcgcctttcctgcctcactcgcagctgccgggtgttggggaaagagtcgcctgcctccggacyggagtgcagacctctgaccctggagtcgctcggccgctgggaaccgtccccttgggtcgtcgcctgggccgcccgtcgttccccggccccgaggggtccggctggccgcggtgtgggtagaggtcagcatgagccaaggggtccgccgggcaggcgctgggcagggggtagcggccgcggtgcagctgctggtcaccctgagcttcctgcggagcgtcgtcgaggcgcaggtcactggagttctggatgattgcttgtgtgatattgacagcatcgataacttcaatacctacaaaatcttccccaaaataaaaaamttgcaagagagagactattttcgttattacaaggttaatctgaagcgaccttgtcctttctgggcagaagatggccactgttcaataaaagactgtcatgtggagccctgtccagagagtaaaattccggttggaataaaagctgggcattctaataagtacttgaaaatggcaaacaataccaaagaattagaagwttgtgagcaagctaataaactgggagcaattaacagcacattaagtaatcaaagcaaagaagctttcattgactgggcaagatatgatgattcacgggatcacttttgtgaacttgatgatgagagatctccagctgctcagtatgtagacctattgctgaacccagagcgttacactggctataaagggacctctgcatggagagtgtggaacagcatctatgaagagaactgtttcaagcctcgatctgtttatcgtcctttaaatcctctggcgcctagccgaggtaggagaatcattctacacatggctagaaggtttgtgtctggagaaaagagtcttctataagcttatatcrggacttcatgctagcatcaatttacatctatgcgcaaattatcttttggaagaaacctggggtaagcccagttggggacctaatattaaagaattcaaacaccgctttgaccctgtggaaaccaagggagaaggtccaagaaggctcaagaatctttactttttatacttgattgagcttcgagctttgtcaaaggtggctccatattttgagcgctcaattgtcgatctttacactggaaatgcagaagaagatgctgacacaaaaactcttctactgaatatctttcaagatacaaagtcctttcccatgcactttgatgagaaatccatgtttgcaggtgacaaaaaaggggccaagtcactaaaggaggaattccgattacatttcaagaatatctcccgtataatggactgtgttggatgtgacaaatgcagattatggggaaaattacagactcagggtttaggaactgccctgaagatattattctctgaaaaagaaatccaaaagcttccagagaatagtccatctaaaggcttccaactcacccgacaggaaatagttgctcttttaaatgcttttggaaggctttctacaagtataagagacttacagaattttaaagtcttaytacaacasrgtaggtaataaaggcttttatgtgtctaactagagacataaagtgactgtggaaagccttttaattatggacattcatcagaaagacactaatctgacttcaagaattctgaactattaaatagaaaatttaaatgctcacttgaatatttatgattcttaatagattattatcaactagagatatttataaatgaagtatatacttttaaaacatgtaagttatactaattttgtgtttaatttcatatgttttcatgtaatgaaaattctattttttttagaattggttttgtttttattctattatcctttatttccagttgtcaaactttaaatggctatgtctgcattctaataacactgttcagtctgttatggaaaaggagaactagggaacaaatgttgctcagggctggtgtcagtgagaaaaatttatcaatgctttttaatgtgtttttacccttgcctcactstgtgtgtgtcactttctataatataaagaaatactataatatttctagaatctggaactgtcaccatgatgaatggccctttcaatgcatagttacagaaattcctgaagattccccaggacttcaatttcattggtttttatttgcagtttttagttgctgtaattgttgctgtttccagtctaaaggacctcctttggtaaaggtgaacaagacctctcccctatgctacccagccagattttgtgtgtgtaatgggctggcccaagagtgttcttttacttagaactccttttgattttgcttttctctgcccctagaaattttagggacaaagacattttggaaattgtcagttacttttagaaagaaaacactgcagaaatatttaacagattacttcttgataaaatttaaatgggattatatgaatttrtaatgccaattgaaaatattatatacacaaaatttgctattttcacttaaagtaagcatttttaaaggatttattttagaatacaatctatgcaatcctcgaactcagtgtgcttttccctgacaggatatataaaaaggtagattaggtcaaccctcctttaagcttmctctcccctcaccttttcttttcactgtatataaacggtactttctgtgattcataccaacagtcctaaactgtcattttctaaatctgggatttaaaatctttaracaatatttaaaatcttgattttttttaaatgtcagcagatacaatttggaagattgcatctgtgtagaagtaatgcaggtacaagatctagagtttttccttagactctttagtcttttctgaattaaagaataagtgctcttaaatccatattttatcctgtcaaagtctgaaatgtgttcattgatgatttggtgacatctaaaaaattgtatttagttggcttggctcacccctcttaaaaatacttagccatctcttggtgggatgtggtgggggtattaaggtctcagagttatttattttctcacctaatttcaaacctttataaacttggggttttgttgttgatggtggtagtattttttgttaagttgtttaaaaggctgacttgattggagcctcctctactttttcttgagggttgcaagtattgtatggtgggggaggggggccttaaggcaaactgtctaaaaagtgactatccaattaatttaactagtaaattagtaagaattattcttagtattcaytcagagtttaagatgtgaaaaatctgcactttgtttatcactctaaatgtaaagaactttttgatagtgttatttcaccactccctcagttaaaggctattatttaaactgtttactggagaaaatcctcgctcatgtccatttattgtttttttctgtactgtgatttgtttcaagcttaggaaaactagtatattagagtatgttctaggaaattaaaagatctggttagagtaaaaagttctttttaaggttcttaactaattttttcacaactaagaaaataaatgaagtattcttaggctgaaattcatcttattttatcataaattagattgtaggggcagcctacatttttgtgtatgtgtttttatttcttaaatgattgtgtgagcctggtgacattttatggttcttgtgatctaaactgtttttccaattcacatcttttgtygtgaagtgatattatactagagtactgtttgcattgtaaaaatgctttgctggtgctctggcattttgtctttatctcatcacctaatttaaaaacccagcacttgataatataactgacagaaatgattgtacccactgatgaagtaatgaaaatgaagaaaaggaaaatattccttccttcaatggcgtaagtttattttttacttaagtggcatctatgtaagttagacaaactatatattaaaattggtaaactttgaatgtttctcctgttttgattcttagattatgaggaggatcagacagaataagactccacacttttgaaatttgataagtcaaaacgttttattttgacatttttaacattgtgaattattcgatatttgtaatcbatgtatatgaaactctgccatgtttttcaactttgcctatgtgccactgtatataagaaaggacagctatttkgatcttcatcagcattgccttcagctgaaaatttgggaacagttcacagtaaacctctcagtagtttgcaaactgaggtacctgcagaaaccatagctactcaccaaaatacacagattaggtgcatggtatcgtggaaattatttggtaaaaaaacacacacacaaatctatgtgtactgtattttaaggaatatctacaggtgcagctttgattttgaacagaattccaartaatttactgttgtacccaccagaatctagaaaatgtgaattaaagtacatgtttctgcaatcttttctgtcttgtttttccccgctattttaagtgtttctttttatggcatgagaatttgattgtaacctgtggagaagggagaaaatgtatttataagtagtctgaggttgtttcttatcataatggcaagcattggctggcaytgtattaagggcttttacatgcatagtttggctttaaaaga

SEQ ID NO: 1718 - DNA, 4688 bp, Homo sapiens
gcgcttgggggcgtggccgaggagccaagmgagccgggggcggggccgcctgggggatgaagtgggggcgctcgcctttcctgcctcactcgcagctgccgggtgttggggaaagagtcgcctgcctccggacyggagtgcagacctctgaccctggagtcgctcggccgctgggaaccgtccccttgggtcgtcgcctgggccgcccgtcgttccccggccccgaggggtccggctggccgcggtgtgggtagaggtcagcatgagccaaggggtccgccgggcaggcgctgggcagggggtagcggccgcggtgcagctgctggtcaccctgagcttcctgcggagcgtcgtcgaggcgcaggtcactggagttctggatgattgcttgtgtgatattgacagcatcgataacttcaatacctacaaaatcttccccaaaataaaaaamttgcaagagagagactattttcgttattacaaggttaatctgaagcgaccttgtcctttctgggcagaagatggccactgttcaataaaagactgtcatgtggagccctgtccagagagtaaaattccggttggaataaaagctgggcattctaataagtaatcaaagcaaagaagctttcattgactgggcaagatatgatgattcacgggatcacttttgtgaacttgatgatgagagatctccagctgctcagtatgtagacctattgctgaacccagagcgttacactggctataaagggacctctgcatggagagtgtggaacagcatctatgaagagaactgtttcaagcctcgatctgtttatcgtcctttaaatcctctggcgcctagccgaggagaatcattctacacatggctagaaggtttgtgtctggagaaaagagtcttctataagcttatatcrggacttcatgctagcatcaatttacatctatgcgcaaattatcttttggaagaaacctggggtaagcccagttggggacctaatattaaagaattcaaacaccgctttgaccctgtggaaaccaagggagaaggtccaagaaggctcaagaatctttactttttatacttgattgagcttcgagctttgtcaaaggtggctccatattttgagcgctcaattgtcgatctttacactggaaatgcagaagaagatgctgacacaaaaactcttctactgaatatctttcaagatacaaagtcctttcccatgcactttgatgagaaatccatgtttgcaggtgacaaaaaaggggccaagtcactaaaggaggaattccgattacatttcaagaatatctcccgtataatggactgtgttggatgtgacaaatgcagattatggggaaaattacagactcagggtttaggaactgccctgaagatattattctctgaaaaagaaatccaaaagcttccagagaatagtccatctaaaggcttccaactcacccgacaggaaatagttgctcttttaaatgcttttggaaggctttctacaagtataagagacttacagaattttaaagtcttaytacaacasrgtaggtaataaaggcttttatgtgtctaactagagacataaagtgactgtggaaagccttttaattatggacattcatcagaaagacactaatctgacttcaagaattctgaactattaaatagaaaatttaaatgctcacttgaatatttatgattcttaatagattattatcaactagagatatttataaatgaagtatatacttttaaaacatgtaagttatactaattttgtgtttaatttcatatgttttcatgtaatgaaaattctattttttttagaattggttttgtttttattctattatcctttatttccagttgtcaaactttaaatggctatgtctgcattctaataacactgttcagtctgttatggaaaaggagaactagggaacaaatgttgctcagggctggtgtcagtgagaaaaatttatcaatgctttttaatgtgtttttacccttgcctcactstgtgtgtgtcactttctataatataaagaaatactataatatttctagaatctggaactgtcaccatgatgaatggccctttcaatgcatagttacagaaattcctgaagattccccaggacttcaatttcattggtttttatttgcagtttttagttgctgtaattgttgctgtttccagtctaaaggacctcctttggtaaaggtgaacaagacctctcccctatgctacccagccagattttgtgtgtgtaatgggctggcccaagagtgttcttttacttagaactccttttgattttgcttttctctgcccctagaaattttagggacaaagacattttggaaattgtcagttacttttagaaagaaaacactgcagaaatatttaacagattacttcttgataaaatttaaatgggattatatgaatttrtaatgccaattgaaaatattatatacacaaaatttgctattttcacttaaagtaagcatttttaaaggatttattttagaatacaatctatgcaatcctcgaactcagtgtgcttttccctgacaggatatataaaaaggtagattaggtcaaccctcctttaagcttmctctcccctcaccttttcttttcactgtatataaacggtactttctgtgattcataccaacagtcctaaactgtcattttctaaatctgggatttaaaatctttaracaatatttaaaatcttgattttttttaaatgtcagcagatacaatttggaagattgcatctgtgtagaagtaatgcaggtacaagatctagagtttttccttagactctttagtcttttctgaattaaagaataagtgctcttaaatccatattttatcctgtcaaagtctgaaatgtgttcattgatgatttggtgacatctaaaaaattgtatttagttggcttggctcacccctcttaaaaatacttagccatctcttggtgggatgtggtgggggtattaaggtctcagagttatttattttctcacctaatttcaaacctttataaacttggggttttgttgttgatggtggtagtattttttgttaagttgtttaaaaggctgacttgattggagcctcctctactttttcttgagggttgcaagtattgtatggtgggggaggggggccttaaggcaaactgtctaaaaagtgactatccaattaatttaactagtaaattagtaagaattattcttagtattcaytcagagtttaagatgtgaaaaatctgcactttgtttatcactctaaatgtaaagaactttttgatagtgttatttcaccactccctcagttaaaggctattatttaaactgtttactggagaaaatcctcgctcatgtccatttattgtttttttctgtactgtgatttgtttcaagcttaggaaaactagtatattagagtatgttctaggaaattaaaagatctggttagagtaaaaagttctttttaaggttcttaactaattttttcacaactaagaaaataaatgaagtattcttaggctgaaattcatcttattttatcataaattagattgtaggggcagcctacatttttgtgtatgtgtttttatttcttaaatgattgtgtgagcctggtgacattttatggttcttgtgatctaaactgtttttccaattcacatcttttgtygtgaagtgatattatactagagtactgtttgcattgtaaaaatgctttgctggtgctctggcattttgtctttatctcatcacctaatttaaaaacccagcacttgataatataactgacagaaatgattgtacccactgatgaagtaatgaaaatgaagaaaaggaaaatattccttccttcaatggcgtaagtttattttttacttaagtggcatctatgtaagttagacaaactatatattaaaattggtaaactttgaatgtttctcctgttttgattcttagattatgaggaggatcagacagaataagactccacacttttgaaatttgataagtcaaaacgttttattttgacatttttaacattgtgaattattcgatatttgtaatcbatgtatatgaaactctgccatgtttttcaactttgcctatgtgccactgtatataagaaaggacagctatttkgatcttcatcagcattgccttcagctgaaaatttgggaacagttcacagtaaacctctcagtagtttgcaaactgaggtacctgcagaaaccatagctactcaccaaaatacacagattaggtgcatggtatcgtggaaattatttggtaaaaaaacacacacacaaatctatgtgtactgtattttaaggaatatctacaggtgcagctttgattttgaacagaattccaartaatttactgttgtacccaccagaatctagaaaatgtgaattaaagtacatgtttctgcaatcttttctgtcttgtttttccccgctattttaagtgtttctttttatggcatgagaatttgattgtaacctgtggagaagggagaaaatgtatttataagtagtctgaggttgtttcttatcataatggcaagcattggctggcaytgtattaagggcttttacatgcatagtttggctttaaaaga

SEQ ID NO: 1719 - DNA, 7742 bp, Homo sapiens
gtaggtgctcaatatatgtttactgtcaataagttacaattaacacccccatatggtaattcagagttttcatagcgcggtcaaacgatctcatttaacgcctactacaaccctaaaaaattctaattactaccatcctatcattcttgtttgtagagtgtggagactgagaggttaactgtcttgcccagcgcaagtcaacagcaaaacggaactaaaatttcaggctcgacaccacacagcgtgtcgagatcagcacgaacttggcgctgtgacttttccttagaggggccacttaggcttacacttccggatcctgggcacacagagacgcgaaaagctcccgcgggaaactggggagcgggactacatctcccagagagccccggggctaaacagcaggtgattggttgatattgacagccaatgcggctgcgaggagctcgggcagaccaatcacaggccggaaggggcgggacctcccacgccgaggatagattgagcgcagaactaaccgcgctctgaaaggttctaaatgtctgcggggctcagagccggatgtcacgtcgtcctcctctgccggttttctcttgggtccttttccgtgccgtcccgcgactccgcctctggccgcgcgtgtctggctgctaggccgacaccaaggactggccgggtacccgggaagaaagcacgtgctccagcagttgccgcgcccagscccgagagaggccctagggcgctgcggrctttcggggtccgcagtccccccgcgacgcgagccaacgggaggcgtcaaaagacccgggcyttgtgtggcaggctcgcctggcgctggctggcgtggcccttggycgtcgtcacctgtggagagcacgtcttctctgccgcgccctctgcgcaaggaggagactcgacaacatgtcacccgcgctccaagacctgtcgcaacccgaaggtctgaagaaaaccctgcgggatgagatcaatgccattctgcagaagaggattatggtgctggatggagggatggggaccatgatccagcgggagaagctaaacgaagaacacttccgaggtcaggaatttaaagatcatgccaggcygctgaaaggcaacaatgacattttaagtataactcagcctgatgtcatttaccaaatccataaggaatacttgctggctggggcagatatcattgaaacaaatacttttagcagcactagtattgcccaagctgactatggccttgaacacttggcctaccggatgaacatgtgctctgcaggagtggccagaaaagctgccgaggaggtaactctccagacaggaattaagaggtttgtggcaggggctctgggtccgactaataagacactctctgtgtccccatctgtggaaaggccggattataggaacatcacatttgatgagcttgttgaagcataccaagagcaggccaaaggacttctggatggcggggttgatatcttactcattgaaactatttttgatactgccaatgccaaggcagccttgtttgcactccaaaatctttttgaggagaaatatgctccccggcctatctttatttcagggacgatcrttgataaaagtgggcggactctttccggacagacaggagagggatttgtcatcagcgtgtctcatggagaaccactctgcattggattaaattgtgctttgggtgcagctgaaatgagaccttttattgaaataattggaaaatgtacaacagcctatgtcctctgttatcccaatgcaggtcttcccaacacctttggtgactatgatgaaacgccttctatgatggccaagcacctaaaggattttgctatggatggcttggtcaatatagttggaggatgctgtgggtcaacaccagatcatatcagggaaattgctgaagctgtgaaaaattgtaagcctagagttccacctgccactgcttttgaaggacatatgttactgtctggtctagagcccttcaggattggaccgtacaccaactttgttaacattggagagcgctgtaatgttgcaggatcaaggaagtttgctaaactcatcatggcaggaaactatgaagaagccttgtgtgttgccaaagtgcaggtggaaatgggagcccaggtgttggatgtcaacatggatgatggcatgctagatggtccaagtgcaatgaccagattttgcaacttaattgcttmcgagccagacatcgcaaaggtacctttgtgcatcgactcctccaattttgctgtgattgaagctgggttaaagtgctgccaagggaagtgcattgtcaatagcattagtctgaaggaaggagaggacgacttcttggagaaggccaggaagattaaaaagtatggagctgctatggtggtcatggcttttgatgaagaaggacaggcaacagaaacagacacaaaaatcagagtgtgcacccgggcctaccatctgcttgtgaaaaaactgggctttaatccaaatgacattatttttgaccctaatatcctaaccattgggactggaatggaggaacacaacttgtatgccattaattttatccatgcaacaaaagtcattaaagaaacattacctggagccagaataagtggaggtctttccaacttgtccttctccttcygaggaatggaagccattcgagaagcaatgcatggggttttcctttaccatgcaatcaagtctggcatggacatggggatagtgaatgctggaaacctccctgtgtatgrtgatatccataaggaacttctgcagctctgtgaagatctcatctggaataaagaccctgaggccactgagaagctcttacgttatgcccagactcaaggcacaggagggaagaaagtcattcagactgatgagtggagaaatggccctgtcgaagaacgccttgagtatgcccttgtgaagggcattgaaaaacatattattgaggatactgaggaagccaggttaaaccaaaaaaaatatccccgacctctcaatataattgaaggacccctgatgaatggaatgaaaattgttggtgatctttttggagctggaaaaatgtttctacctcaggttataaagtcagcccgggttatgaagaaggctgttggccaccttatccctttcatggaaaaagaaagagaagaaaccagagtgcttaacggcacagtagaagaagaggacccttaccagggcaccatcgtgctggccactgttaaaggcgacgtgcacgacataggcaagaacatagttggagtagtccttggctgcaataatttccgagttattgatttaggagtcatgactccatgtgataagatactgaaagctgctcttgaccacaaagcagatataattggcctgtcaggactcatcactccttccctggatgaaatgatttttgttgccaaggaaatggagagattagctataaggattccattgttgattggaggagcaaccacttcaaaaacccacacagcagttaaaatagctccgagatacagtgcacctgtaatccatgtcctggacgcgtccaagagtgtggtggtgtgttcccagctgttagatgaaaatctaaaggatgaatactttgaggaaatcatggaagaatatgaagatattagacaggrcsattatgagtctctcaaggagaggagatacttacccttaagtcaagccagaaaaagtggtttccaaatggattggctgtctgaacctcacccagtgaagcccacgtttattgggacccaggtctttgaagactatgacctgcagaagctggtggactacattgactggaagcctttctttgatgtctggcagctccggggcaagtacccgaatcgaggctttcccaagatatttaacgacaaaacagtaggtggagaggccaggaaggtctacgatgatgcccacaatatgctgaacacactgattagtcaaaagaaactccgggcccggggtgtggttgggttctggccagcacagagtatccaagacgacattcacctgtacgcrgaggctgctgtgccccaggctgcagagcccatagccaccttctatgggttaaggcaacaggctgagaaggactctgccagcacggagccatactactgcctctcagacttcatcgctcccttgcattctggcatccgtgactacctgggcctgtttgccgttgcctgctttggggtagaagagctgagcaaggcctatgaggatgatggtgacgactacagcagcatcatggtcaaggcgctgggggaccggctggcagaggcctttgcagaagagctccatgaaagagttcgccgagaactgtgggcctactgtggcagtgagcagctggacgtcgcagacctgcrmaggctgcggtacaagggcatccgccyggctcctggctaccccagccagcccgaccacaccgagaagctcaccatgtggagactygcagacatcgagcagtctacaggcattaggttaacakaatcattagcaatggcacctgcttcagcagtctcaggcctctacttctccartttgaagtccaaatattttgctgtggggaagatttccaaggatcaggttgaggattatgcattgaggaagaacatatctgtggctgaggttgagaaatggcttggacccattttgggatatgatacagactaactttttttttttttttgccttttttattcttgatgatcctcaaggaaatacaacctagggtgccttaaaaataacaacaacaaaaaacctgtgtgcatctggctgacacttmcctgcttctggttttcgaagactatttagtggaaccttgtrgaggagcagggtcttcctgcagtgcctggaaaacaggcgctgtttttttgggaccttgcgtgaagagcagtgagcagggttcctgtggtttccctggtccctctgagatggggacagactgaagacagaggtcgtttgatttcaaagcaagtcaacctgcttttttctgtttttacagtggaatctaggaggccacttagtcgtctttttttcctcttagaagaaaagcctgaaactgagttgaatagagaagtgtgaccctgtgacaaaatgatactgtgaraaatggggcattttaatctaagtggttataacagtggattctgacggggaaggtgtagctctgttctcttcggaagacctcgttttctaaaggctggactaaatggctgcagaactccctttggcaaaaggcatgcgctcactgcttgcttgtcagaaacactgaagccatttgccccagtgtggtcaagcagccatgctttctgggcattttcgtcctcccataatttcatatttccgtacccctgaggaaacaaaaargaaatgaggagagaaagttactgttaagggtggttaacattttttttgttttgttttgttttggtttttttttttttgagacagagtctggctctgtcgcccaggctggagtgcaggggcgcaatctcggctcatagcaagctccgcctcctgggttcatgccattctcctgcctcagcctccagagtagctgggactacaggtgcccrccaccacacccggctaattttttgtgtttttacaaaatacaaaaaagtagagacaggatttcactgtgttagccaggatggtcttgatctcccgacctcgtgatctgcccacctcagcctcccaaaatgctgggattacaggcgtgagccaccgagcctggccggttaacatcttttaattgtttccaggattgagcaggttctcagctgggctctgatatcccgtgcggagttggacaagtgggcagcataaagtcactcatttcttaccattttattcccctcaattctcaatatattcagtaatgaagaatggtgccaccactcaagcaacaagcctcaaactcamccatgtcatctttttcttggatgattgcagttatttcaaaaatttgcatgcaaaatatacactcatcctacttcaagatggtggtggcaatagtcaggagaaggtarcattggagtcctggtttgattcgaaggatgaagacgaagaagcaagggaggaacaaatgaagaaccatctttgttcatgaataggaatattcaagattataaaggtaycaggtctcctaaaattgayctatggatttaataccattttcaatggaaattccaacagattttattgaatgaaacaagcaggtgtttatatggagtagcaaaggacttaaaattaccaaatgcttctaaatatgaaggagaggttggggacacgcaccctatgtgataccaagttttattgtcaagacagtgtcatggtgcagaggtaggcattytgagcaggggaacaaaataagggcctagaaactcacccgtgcatatgttgacctttgcaaaatgacctggtgacatggcaagtcagtggggacaggaaggaccactccctaagtaatcccagaacaatggctattcatgtgggaaaaaaagaaattttactttctctcaccttacctggtgataagttccaaatatgttaagggctttaatacaaaaagcaaaaattgtcagtgtttggatgaaaaaagccttagggcaggaaagaatctcttgagacataaagtagtaatcataaaggacaagatggttaagtcaattctgttaaaactcaaggcttatattaagcaaacacttgaagtgagaagatgatccacaacttgagaagacatttataatacaaataactgatgaaggattcataatcacaaatatagagaattcctatttaaaaaaatagaaaaatagtgaagactacacaagaggaaatagggcttttaaataaatagatgttctgtagcattggtcagggaaatatgaattaggaccacaatgagattccattttatatccataagatttgcaaaggttgggtctgacagtaccagttgttagatctgtagggacttgtacaacattgtggatgtgtaaacaggcaccactgctttaaaaaacaattatcccttacagacttgaacatttgcagacsttatgatcttgcttccaactcccacctgtatgtccagcaaactcttgcatgtggccactaggaggaatgtgtaagaatgttcatagttacatatttataatagttaataactggaaaaagtgaaatgtatgtctgtctacaggaaaataggtgaataattagatatatrtattcattctacgggatattattcagtagtggaaatgagtgaactacagctatacctcacaataagaatgaatctcagaaaatattaaggaaaaaagcaagtttgaagagaccacatggggcgtactatttttattgrgcccaaaaacaagcaaaaccaaagaatatgtagtctaagcatacgtatacaataaaactatgctattaaaaaaaaaaggtaactgataaaccaaaattgagcatagtaattacccacagaaggaggaagtggaagggacaggagcacataggtagatgccaagttatgcagctgttctggttcctcctggtaggcttacaagtgtttactatatgctattaatacattatactttataactaatagataacagttttttacatattaaatatgttctacttaaatatattataaaaaataaaggcaaagtggaatgataacctaaaat

SEQ ID NO: 1720 - DNA, 1711 bp, Homo sapiens
tctatcttactgggcactgctaaactgcgaagtcggggcgacacggcagcaactttaaaatcaaaccgcatccccaagggctcggcgtgttttttggcctctgcagcttcacgtacttcgtacgacaggagcgcacttgttctctgtccgagaacttcgtcccgagagaacctcaggaactcgccgggccacaccccctgtccagggaaggaacacgcccccggtgacagccggtacggccccgggtttgggcaacctcgattacgggcggcctccagccccgccagcagcgccccgcgcccgcccgcccgcgcccctgccgccccccggttccggccgcggaccccactctctgccgttccggctgcggctccgctgccggtagcgccgtcccccgggaccacccttcggctggcgccctcccatgctctcggccacccggagggcttgccagctcctcctcctccacagcctctttcccgtcccgaggatgggcaactcggcctcgaacatcgtcagcccccaggaggccttgccgggccggaaggaacagacccctgtagcggccaaacatcatgtcaatggcaacagaacagtcgaacctttcccagagggaacacagatggctgtatttggaatgggatgtttctggggagctgaaaggaaattctgggtcttgaaaggagtgtattcaactcaagttggttttgcaggaggctatacttcaaatcctacttataaagaagtctgctcagaaaaaactggccatgcagaagtcgtccgagtggtgtaccagccagaacacatgagttttgaggaactgctcaaggtcttctgggagaatcacgacccgacccaaggtatgcgccaggggaacgaccatggcactcagtaccgctcggccatctacccgacctctgccaagcaaatggaggcagccctgagctccaaagagaactaccaaaaggttctttcagagcacggcttcggccccatcactaccgacatccgggagggacagactttctactatgcggaagactaccaccagcagtacctgagcaagaaccccaatggctactgcggccttgggggcaccggcgtgtcctgcccagtgggyattaaaaaataattkctccccacatggtgggcctttgaggttccagtaaaaatgctttcaacaaattgggcaatgcttgtgtgattcacaatcgtggcatttaaagtgcacaaagtacaaaggaatttatacagattgggtttaccgaagtataatctataggaggcgygatggcaagttgataaaatgtgacttatctcctaataagttatggtgggagtggagctgtgcggtttcctrtgtcttctggggtctgagtgaagatagcagggatgctgtgttyacccttcttggtagaagctaaggtgtgagctgggaggttgctggacaggatgggggaccccagaagtcctttatctgtgctctctgcccgccagtgccttacaatttgcaaacgtgtatagcctcagtgactcattcgctgaaatccttcgctttaccaaatctagacawacataagggrctttctctcccttttcagccctctctgtgcagagaaaagatgtgagtccgcttgatgaattctaatgctttgcttagagctatgagaaatgtttgttttaataaaaacctacagtccaataatgccaa

SEQ ID NO: 1721 - DNA, 3024 bp, Homo sapiens
atctttctcctcacattcctgggtctgtctgggctggttggcacagttaccagaacgtactacattgggattgtggaagaatactggaactatgtaccccaagggaagaatgttattactgggaaaagtttcacagaagacaaacttgcaaccttatttctcgaaagagggcccaacaggataggcagtatttacaaaaaggctgtttacagacgcttcacggatggaacctactccatagagatccccaaacctccctggcttggattcctgggccccatcttgagggccgaagtgggtgatgtgattgtcattcatttaaagaactttgcttctcgaccttactctctgcatccacatggcgttttctacaacaaagattcagaaggagccctatacccagatggaacatctggaaggaacaaaaatgatgacatggttcctcctgggaaaaactacacctacgtctggccggtgagagaagaatatgcacctactccagccgatgccaactgcctgacctgggtgtaccattcgcacatcgacgccccaaaggacatctgctctgggctaattgggcccctgctggtctgcaaggaaggtatcctgaatagatattcagggacacggaatgatgtggatcgagagtttgttataatgtttactcttgtggatgagaatcaaagctggtacctcaatgaaaatatcaaacatttctgcaccraccctgattcagttgacaagaaagatgctgttttccagaggagtaacaaaatgcatgccctcaatggatacctcttcggaaacttcccggagcctgatatgtgtgttggagaatctgtgtcctggcacctatttggaatggggaatgaaatagacatccattctatctatttctatggtaacaccttcatcagcagagggcatcggactgatgtcgtcaacctgttcccagccaccttccttacaacagaaatgatagccgagaatcctgggaagtggatgataacctgccaggtcagcgaccacctacaagctggtatgctggggcaatacaatgttgataactgcaaaagtgatattttctaccccaagatgaagggtcaacagaggygctactttatagcagctgaaaaaattctttgggattatgctcctcaaggctatarcaaattcagtggtcttcctctaaacgcctctggcagtgactctgatctctacttcacacaaggggacaacagaataggaggaaaatactggaaggttcggtatactgaatttgttgatgcaacttttactaaaagaaagagactctctgctgaagaagcccatcttggaattcttggcccagtcatcaaggcagaggtgggtgataccctgttagtgacctttgccaacaaagccgacaaggtctatagcattttaccccatggtgtgatctatgacaaggcatctgatgcagccccaaacctagatggatttgtgaaaccaggggcgcatgttaaaccaggtgaaaccttcacatacaagtggacagtgcctgagagygtaagcccaactgctggtgatcctccctgtctgacctatctttacttctcagcagttgatccaattaaggacaccagctctggcctggtagggcctttgctagtctgtaaaaagggcgtcctcaatgctgatgggacacagaaaggaatagacaaggagttttacctactgttcacagtctttgatgagaatctgagcagatattttgatgaaaacattcagaagtttatctggcatcccttcagcattgacaaagaagataaagagtttgtgaaatccaaccgaatgcatgctgttaacggctacatgtatggcaaccagccaggcttaaacatgtgtaaaagggatagagtttcctggcatctgattggattgggcactgacactgacatgcatggaattgtttttcaagggaacaccatccacctacgagggactcaccgagactccctggccctgtttccccacatggccacaacagcattcatgcagccagaccatgcaggtatttttagggtgttttgtgccaccatgccccacctctcgagaggcatgggtcagatctatgaggtcagcagctgtgacaacagggacccttctgagcagcggtacgggatgataagaactttttacatcgccgctgaagaagtagaatgggattatgcccctaacaaaaactgggagttcgaaaagcagcacgtggacgcaagaggggaaagacatggagatatatttatgaaccgcactgaaaattggattggctctcagtacaagaaggtggtttacagggaatatacggatggagaatttgtggagatcaaagcccgaccaccacgagaggagcacttagaactcctgggcccaatgattcatgctgaggtgggcaacaccgtcctgatcatatttaagaacaaagcyagtaggccctactccatctcagcccagggtgtggaggagatggatagtggaaagcaattccaagtgcccatgacaaaaccaggagaagtaaaaacttatagatggaatatccctaaaagatccggtccagggccttctgatcccaattgtattccatgggtttactattcaacagtaaactttgtgaaggatacgtatagtggtttgatgggtcctctgattacatgccgaaaaggagtcttgaatgaaaagggaagaagaagtgacgttgattatgaatttgctctcttgtttttggtatttaatgagaatgaatcctggtatctggatgacaatattaagaagtatctcaacaaagatccacgagattttaagcgcactgatgattttgaggaaagcaacagaatgcatgccattaatggaaagatttttgggaatctccatggcctcataatgaacgaagatacaatgacaaactggtatttgttagggataggaagtgaagtggacatacataccatccattatcatgctgagagctttcttttcaaagtaagt

SEQ ID NO: 1722 - DNA, 2540 bp, Homo sapiens
aagtgacgcatggtacttgcgcaaagacgacgaggaggctgcgaaaagttaagggccggaccgcaggctgtgctcgcttccggaagtggcttctgcgacaacatgcttgcggacctcggcttaatcggaaccataggcgaggatgacgaggtgccggtggagcccgagtctgactccggggacgaggaagaggaggggcccattgtgctgggcagacgacaaaaagctttggggaagaaccgcagtgctgatttcaaccctgatttcgttttcactgagaaggaggggacgtacgatggcagctgggccctggctgatgtcatgagccaactcaagaagaagagggcagccactacattagatgagaagattgagaaagttcgaaagaaaaggaaaacagaggataaagaagccaagtctgggaagttggaaaaggagaaagaagcaaaggaaggctctgaaccaaaggagcaggaagaccttcaagagaatgatgaggaaggctcagaagatgaagcctcggagactgactactcatcagctgatgagaacatcctcaccaaagcagatacactcaaagtaaaggatcggaagaagaagaagaagaaaggacaggaagcaggagkattttttgaagatgcatctcagtacgatgaaaacctctcgttccaggacatgaacctttcccgccctcttctgaaggccattacagccatgggcttcaagcagcccaccccgatccagaaggcgtgcatacctgtgggtctattggggaaggacatctgtgcctgtgcagccactgggacaggtaaaactgcygcctttgccctgcctgttttggagcgtctgatttataaaccccgccaggctccagtcacccgcgtgctggtgctagtgcccacccgagagctgggcatccaggtgcactctgtcaccagacagctggcccagttctgcaacatcaccacctgcctggctgtgggcggcttggatgtgaagtctcaggaagcagctcttcgggcagcgcctgacatcctcatcgccaccccaggccggctcatcgatcacctccacaactgcccttccttccacctgagcagcatcgaggtgctcatcctggacgaggctgacaggatgctggatgagtactttgaggagcagatgaaggagatcatccgaatgtgttcccaccaccgccagaccatgctcttctcggccaccatgacagacgaggtgaaagatctggcttctgtctccttgaagaatcctgtccggatatttgtgaacagcaacacagatgtggctcccttyctgcggcaggagttcatccggatccggcctaatcgtgaaggagaccgggaagccatcgtggcagctttgttgacgaggaccttcactgaccatgtgatgctgttcacgcaaaccaagaagcaggcccaccgcatgcacatcctcctggggctcatggggctgcaggtgggtgagctccatggcaacttgtcacagacgcagcggctggaggccctcyggcgttttaaggatgaacagattgacatcctcgtggccactgatgtggcagcccgtggacttgacattgagggggtcaaaacggtaatcaacttcacaatgcctaataccatcaaacattatgtccaccgggtggggcgaacagcacgtgctggcagggctgggcgctcagtctctctggtgggagaagatgagcggaagatgctgaaggagattgtaaaagctgccaaggcccctgtgaaggccaggatacttccccaagatgtcatcctcaaattccgggacaagattgagaaaatggagaaagatgtgtatgcagttctgcagctagaggcggaggaaaaagagatgcagcagtcagaagcccagatcaatacagcaaagcggctcctggagaaggggaaggaggcagtggtccaagagcccgagaggagctggttccagaccaaagaagagaggaagaaggagaaaaaggaaaggtctcagtttgaaatcctcaaggcgcagatgtttgctgaacggctagyraagaggaatcgcagagccaagcgggcccgagcaatgcccgaggaggagccagtgagaggtcctgccaagaagcaaaagcaggggaagaaatctgtatttgatgaagaactcaccaacacaagcaagaaggccctgaaacagtatcgagctrgcccttcctttgaagaaaggaaacagttgggcttgccccaccagagacgaggaggaaactttaaatctaaatccagatacaagaggaggaagtagctgtcgtggcctgaagaaattcatgggggcagcccttaaatcccttccctgtgggaagtcatcctggctggtctgtcttttctccatttgtttaaaaaaaaaacaaaaacaaaaaacaacactttggtgtggtggtatggtacgtagctattttcctaagcatgtctgtcaatctcccttcttgctgattagctttcatatgactatattaaatggaagtatttttgggaaaagagaaa

SEQ ID NO: 1723 - DNA, 1601 bp, Homo sapiens
aagtgacgcatggtacttgcgcaaagacgacgaggaggctgcgaaaagttaagggccggaccgcaggctgtgctcgcttccggaagtggcttctgcgacaacatgcttgcggacctcggcttaatcggaaccataggcgaggatgacgaggtgccggtggagcccgagtctgactccggggacgaggaagaggaggggcccattgtgctgggcagacgacaaaaagctttggggaagaaccgcagtgctgatttcaaccctgatttcgttttcactgagaaggaggggacgtacgatggcagctgggccctggctgatgtcatgagccaactcaagaagaagagggcagccactacattagatgagaagattgagaaagttcgaaagaaaaggaaaacagagcgcatgcacatcctcctggggctcatggggctgcaggtgggtgagctccatggcaacttgtcacagacgcagcggctggaggccctcyggcgttttaaggatgaacagattgacatcctcgtggccactgatgtggcagcccgtggacttgacattgagggggtcaaaacggtaatcaacttcacaatgcctaataccatcaaacattatgtccaccgggtggggcgaacagcacgtgctggcagggctgggcgctcagtctctctggtgggagaagatgagcggaagatgctgaaggagattgtaaaagctgccaaggcccctgtgaaggccaggatacttccccaagatgtcatcctcaaattccgggacaagattgagaaaatggagaaagatgtgtatgcagttctgcagctagaggcggaggaaaaagagatgcagcagtcagaagcccagatcaatacagcaaagcggctcctggagaaggggaaggaggcagtggtccaagagcccgagaggagctggttccagaccaaagaagagaggaagaaggagaaaattgccaaagctctgcaggaatttgacttggccttaagaggaaagaagaaaaggaagaagtttatgaaggatgccaaaaaaaagggggagatgacagcagaggaaaggtctcagtttgaaatcctcaaggcgcagatgtttgctgaacggctagyraagaggaatcgcagagccaagcgggcccgagcaatgcccgaggaggagccagtgagaggtcctgccaagaagcaaaagcaggggaagaaatctgtatttgatgaagaactcaccaacacaagcaagaaggccctgaaacagtatcgagctrgcccttcctttgaagaaaggaaacagttgggcttgccccaccagagacgaggaggaaactttaaatctaaatccagatacaagaggaggaagtagctgtcgtggcctgaagaaattcatgggggcagcccttaaatcccttccctgtgggaagtcatcctggctggtctgtcttttctccatttgtttaaaaaaaaaacaaaaacaaaaaacaacactttggtgtggtggtatggtacgtagctattttcctaagcatgtctgtcaatctcccttcttgctgattagctttcatatgactatattaaatggaagtatttttgggaaaagagaaa

SEQ ID NO: 1724 - DNA, 2639 bp, Homo sapiens
aagtgacgcatggtacttgcgcaaagacgacgaggaggctgcgaaaagttaagggccggaccgcaggctgtgctcgcttccggaagtggcttctgcgacaacatgcttgcggacctcggcttaatcggaaccataggcgaggatgacgaggtgccggtggagcccgagtctgactccggggacgaggaagaggaggggcccattgtgctgggcagacgacaaaaagctttggggaagaaccgcagtgctgatttcaaccctgatttcgttttcactgagaaggaggggacgtacgatggcagctgggccctggctgatgtcatgagccaactcaagaagaagagggcagccactacattagatgagaagattgagaaagttcgaaagaaaaggaaaacagaggataaagaagccaagtctgggaagttggaaaaggagaaagaagcaaaggaaggctctgaaccaaaggagcaggaagaccttcaagagaatgatgaggaaggctcagaagatgaagcctcggagactgactactcatcagctgatgagaacatcctcaccaaagcagatacactcaaagtaaaggatcggaagaagaagaagaagaaaggacaggaagcaggagkattttttgaagatgcatctcagtacgatgaaaacctctcgttccaggacatgaacctttcccgccctcttctgaaggccattacagccatgggcttcaagcagcccaccccgatccagaaggcgtgcatacctgtgggtctattggggaaggacatctgtgcctgtgcagccactgggacaggtaaaactgcygcctttgccctgcctgttttggagcgtctgatttataaaccccgccaggctccagtcacccgcgtgctggtgctagtgcccacccgagagctgggcatccaggtgcactctgtcaccagacagctggcccagttctgcaacatcaccacctgcctggctgtgggcggcttggatgtgaagtctcaggaagcagctcttcgggcagcgcctgacatcctcatcgccaccccaggccggctcatcgatcacctccacaactgcccttccttccacctgagcagcatcgaggtgctcatcctggacgaggctgacaggatgctggatgagtactttgaggagcagatgaaggagatcatccgaatgtgttcccaccaccgccagaccatgctcttctcggccaccatgacagacgaggtgaaagatctggcttctgtctccttgaagaatcctgtccggatatttgtgaacagcaacacagatgtggctcccttyctgcggcaggagttcatccggatccggcctaatcgtgaaggagaccgggaagccatcgtggcagctttgttgacgaggaccttcactgaccatgtgatgctgttcacgcaaaccaagaagcaggcccaccgcatgcacatcctcctggggctcatggggctgcaggtgggtgagctccatggcaacttgtcacagacgcagcggctggaggccctcyggcgttttaaggatgaacagattgacatcctcgtggccactgatgtggcagcccgtggacttgacattgagggggtcaaaacggtaatcaacttcacaatgcctaataccatcaaacattatgtccaccgggtggggcgaacagcacgtgctggcagggctgggcgctcagtctctctggtgggagaagatgagcggaagatgctgaaggagattgtaaaagctgccaaggcccctgtgaaggccaggatacttccccaagatgtcatcctcaaattccgggacaagattgagaaaatggagaaagatgtgtatgcagttctgcagctagaggcggaggaaaaagagatgcagcagtcagaagcccagatcaatacagcaaagcggctcctggagaaggggaaggaggcagtggtccaagagcccgagaggagctggttccagaccaaagaagagaggaagaaggagaaaattgccaaagctctgcaggaatttgacttggccttaagaggaaagaagaaaaggaagaagtttatgaaggatgccaaaaaaaagggggagatgacagcagaggaaaggtctcagtttgaaatcctcaaggcgcagatgtttgctgaacggctagyraagaggaatcgcagagccaagcgggcccgagcaatgcccgaggaggagccagtgagaggtcctgccaagaagcaaaagcaggggaagaaatctgtatttgatgaagaactcaccaacacaagcaagaaggccctgaaacagtatcgagctrgcccttcctttgaagaaaggaaacagttgggcttgccccaccagagacgaggaggaaactttaaatctaaatccagatacaagaggaggaagtagctgtcgtggcctgaagaaattcatgggggcagcccttaaatcccttccctgtgggaagtcatcctggctggtctgtcttttctccatttgtttaaaaaaaaaacaaaaacaaaaaacaacactttggtgtggtggtatggtacgtagctattttcctaagcatgtctgtcaatctcccttcttgctgattagctttcatatgactatattaaatggaagtatttttgggaaaagagaaa

SEQ ID NO: 1725 - DNA, 3793 bp, Homo sapiens
agcgcatggcctgccgggagggggcaggtagccggcgggcccggtccaatgggtgccggcttccgaggagagggcggaggagaggaggaaggaggcgaactgtgggccccggccccattcattgccgtggccggcgggcactggggccccgtgttttcagagtcatggaggcgctaattcctgtcataaacaagctccaggacgtcttcaacacggtgggcgccgacatcatccagctgcctcaaatcgtcgtagtgggaacgcagagcagcggaaagagctcmgtgctagaaagcctggtggggagggacctgcttcccagaggtactggaattgtcacccggagacctctcattctgcaactggtccatgtktcacaagaagataaacggaaaacaacaggagaagaaaatggrgtggaagcagaagaatggggtaaatttcttcacaccaaaaataagctttacacggattttgatgaaattcgacaagaaattgaaaatgaaacagaaagaatttcaggaaataataagggagtaagccctgaaccaattcatcttaagattttttcacccaacgttgtcaatttgacacttgtggatttgccaggaatgaccaaggtgcctgtaggtgatcaacctaaggatattgagcttcaaatcagagagctcattcttcggttcatcagtaatcctaattccattatcctcgctgtcactgctgctaatacagatatggcaacatcagaggcacttaaaatttcaagagaggtagatccagatggtcgcagaaccctagctgtaatcactaaacttgatctcatggatgcgggtactgatgccatggatgtattgatgggaagggttattccagtcaaacttggaataattggagtagttaacaggagccagctagatattaacaacaagaagagtgtaactgattcaatccgtgatgagtatgcttttcttcaaaagaaatatccatctctggccaatagaaatggaacaaagtatcttgctaggactctaaacaggttactgatgcatcacatcagagattgtttaccagagttgaaaacragaataaatgttctagctgctcagtatcagtctcttctaaatagctacggtgaacccgtggatgataaaagtgctactttactccaacttattaccaaatttgccacagaatattgtaacactattgaaggaactgcaaaatatattgaaacttcggagctatgcggtggtgctagaatttgttatattttccatgagacttttgggcgaaccttagaatctgttgatccacttggtggccttaacactattgacattttgactgccattagaaatgctactggtcctcgtcctgctttatttgtgcctgaggtttcatttgagttactggkgaagcggcaaatcaaacgtctagaagakcccagcctccgctgtgtggaactggttcatgaggaaatgcaaaggatcattcagcactgtagcaattacagtacacaggaattgttacgatttcctaaacttcatgatgccatagttgaagtggtgacttgtcttcttcgtaaaaggttgcctgttacaaatgaaatggtccataacttagtggcaattgaactggcttatatcaacacaaaacatccagactttgctgatgcttgtgggctaatgaacaataatatagaggaacaaaggagaaacaggctagccagagaattaccttcagctgtatcacgagacaaggttgcatctggaggtggtggggttggagatggtgttcaagaaccaaccacaggcaactggagaggaatgctgaaaacttcaaaagctgaagagttattagcagaagaaaaatcaaaacccattccaattatgccagccagtccacaaaaaggtcatgccgtgaacctgctagatgtgccagttcctgttgcacgaaaactatctgctcgggaacagcgagattgtgaggttattgaacgactcattaaatcatattttctcattgtcagaaagaatattcaagacagtgtgccaaaggcagtaatgcattttttggttaatcatgtgaaagacactcttcagagtgagctagtaggccagctgtataaatcatccttattggatgatcttctgacagaatctgaggacatggcacagcgcaggaaagaagcagctgatatgctaaaggcattacaaggagccagtcaaattattgctgaaatccgggagactcatctttggtgaagagaactatgtaatactgaswctttgttgactcaaaacttgctagttactgcctacctgagtagaakcttatttatgaactcctgtgtattgcaatggtatgaatctgctcatgtggagactggctataaactgaaaagtgtattccaaattgcagaacacatcacacatttaatccaaataataaatggctgtttctaaagtttcccagtatatataaaatacatcaagtctgtcttgtgacagtttcatctgaacttaacttaaaaasaactgttaatgttctagttgtgcaaagcagtttgcctgtggataagatgacctgtgtaataatctttgttagtagtcttaaagctgctgccatagtcctccaagaagaaagcaccaagacaacatttcatatgactataatgcatgtactatataagctgatctggctttgaaagatgtgagttggcaagttcctcacatagagtcattgtattccacctgtccttcaatttagttttttctgagcttctttgcagcctttgatgtgtttttaagaaagctgaatgcacaagaggatctgtgacactgacatggctgtggtgtgcataytgtgtagttacatagcccttccaattctgggtccatttgcactagcaaattaaaatatgctttgattcatacttaaacctgaaagcaggaatgcctacattaattcctacattaaaaacagccatctacccttgattatctagwaagacttggtaatgatggtcagttccttttagatttcagaaaatcaaatgatgacctaaatttcccttaatttgcaaatacagtagtaattaaggtacatctctaaagtggagcacttacaccaggctctaagattcactttgaggtggaacttaaaaccagtgtactgtatgtatgcattggtaatagctacttttgcttcatagcttcataccaacaaaatatatttattagaatagtatgaaagtactggaggagctgaaagaaaaacacccaagtgctgggattacaggtgtgagccaccatgcccagcctcacaattccttacactacctctttttcattgttcctcatcactacaaaaaggagagcaggaagggtaagataggaaagcagcatttctttctcttctgaagtataattttaaaaagagattaaccctgaaaatcatggttttctatggtaatcaagctttgtacatcagaaaataaaacatcccattattaaacaaatatttattaaccggcccataaaaataatgaagttactcacactgagtcctagtccattctgtttttctgatttgcataagcaaaggtctaagttctggagccaacccttcagaggtcttgagaatgaatgatgggtaagtttatttggacaaccagaaggacttttcatcacaactgaagccattttataatgtagaaatttctttttcctattttaagtaaggaaagtccattcttgagaatatgttgtccaacaattaaaacactctcagg

SEQ ID NO: 1726 - DNA, 3871 bp, Homo sapiens
agcgcatggcctgccgggagggggcaggtagccggcgggcccggtccaatgggtgccggcttccgaggagagggcggaggagaggaggaaggaggcgaactgtgggccccggccccattcattgccgtggccggcgggcactggggccccgtgttttcagagtcatggaggcgctaattcctgtcataaacaagctccaggacgtcttcaacacggtgggcgccgacatcatccagctgcctcaaatcgtcgtagtgggaacgcagagcagcggaaagagctcmgtgctagaaagcctggtggggagggacctgcttcccagaggtactggaattgtcacccggagacctctcattctgcaactggtccatgtktcacaagaagataaacggaaaacaacaggagaagaaaatggrgtggaagcagaagaatggggtaaatttcttcacaccaaaaataagctttacacggattttgatgaaattcgacaagaaattgaaaatgaaacagaaagaatttcaggaaataataagggagtaagccctgaaccaattcatcttaagattttttcacccaacgttgtcaatttgacacttgtggatttgccaggaatgaccaaggtgcctgtaggtgatcaacctaaggatattgagcttcaaatcagagagctcattcttcggttcatcagtaatcctaattccattatcctcgctgtcactgctgctaatacagatatggcaacatcagaggcacttaaaatttcaagagaggtagatccagatggtcgcagaaccctagctgtaatcactaaacttgatctcatggatgcgggtactgatgccatggatgtattgatgggaagggttattccagtcaaacttggaataattggagtagttaacaggagccagctagatattaacaacaagaagagtgtaactgattcaatccgtgatgagtatgcttttcttcaaaagaaatatccatctctggccaatagaaatggaacaaagtatcttgctaggactctaaacaggttactgatgcatcacatcagagattgtttaccagagttgaaaacragaataaatgttctagctgctcagtatcagtctcttctaaatagctacggtgaacccgtggatgataaaagtgctactttactccaacttattaccaaatttgccacagaatattgtaacactattgaaggaactgcaaaatatattgaaacttcggagctatgcggtggtgctagaatttgttatattttccatgagacttttgggcgaaccttagaatctgttgatccacttggtggccttaacactattgacattttgactgccattagaaatgctactggtcctcgtcctgctttatttgtgcctgaggtttcatttgagttactggkgaagcggcaaatcaaacgtctagaagakcccagcctccgctgtgtggaactggttcatgaggaaatgcaaaggatcattcagcactgtagcaattacagtacacaggaattgttacgatttcctaaacttcatgatgccatagttgaagtggtgacttgtcttcttcgtaaaaggttgcctgttacaaatgaaatggtccataacttagtggcaattgaactggcttatatcaacacaaaacatccagactttgctgatgcttgtgggctaatgaacaataatatagaggaacaaaggagaaacaggctagccagagaattaccttcagctgtatcacgagacaagtcttctaaagttccaagtgctttggcacctgcctcccaggagccctcccccgctgcttctgctgaggctgatggcaaggttgcatctggaggtggtggggttggagatggtgttcaagaaccaaccacaggcaactggagaggaatgctgaaaacttcaaaagctgaagagttattagcagaagaaaaatcaaaacccattccaattatgccagccagtccacaaaaaggtcatgccgtgaacctgctagatgtgccagttcctgttgcacgaaaactatctgctcgggaacagcgagattgtgaggttattgaacgactcattaaatcatattttctcattgtcagaaagaatattcaagacagtgtgccaaaggcagtaatgcattttttggttaatcatgtgaaagacactcttcagagtgagctagtaggccagctgtataaatcatccttattggatgatcttctgacagaatctgaggacatggcacagcgcaggaaagaagcagctgatatgctaaaggcattacaaggagccagtcaaattattgctgaaatccgggagactcatctttggtgaagagaactatgtaatactgaswctttgttgactcaaaacttgctagttactgcctacctgagtagaakcttatttatgaactcctgtgtattgcaatggtatgaatctgctcatgtggagactggctataaactgaaaagtgtattccaaattgcagaacacatcacacatttaatccaaataataaatggctgtttctaaagtttcccagtatatataaaatacatcaagtctgtcttgtgacagtttcatctgaacttaacttaaaaasaactgttaatgttctagttgtgcaaagcagtttgcctgtggataagatgacctgtgtaataatctttgttagtagtcttaaagctgctgccatagtcctccaagaagaaagcaccaagacaacatttcatatgactataatgcatgtactatataagctgatctggctttgaaagatgtgagttggcaagttcctcacatagagtcattgtattccacctgtccttcaatttagttttttctgagcttctttgcagcctttgatgtgtttttaagaaagctgaatgcacaagaggatctgtgacactgacatggctgtggtgtgcataytgtgtagttacatagcccttccaattctgggtccatttgcactagcaaattaaaatatgctttgattcatacttaaacctgaaagcaggaatgcctacattaattcctacattaaaaacagccatctacccttgattatctagwaagacttggtaatgatggtcagttccttttagatttcagaaaatcaaatgatgacctaaatttcccttaatttgcaaatacagtagtaattaaggtacatctctaaagtggagcacttacaccaggctctaagattcactttgaggtggaacttaaaaccagtgtactgtatgtatgcattggtaatagctacttttgcttcatagcttcataccaacaaaatatatttattagaatagtatgaaagtactggaggagctgaaagaaaaacacccaagtgctgggattacaggtgtgagccaccatgcccagcctcacaattccttacactacctctttttcattgttcctcatcactacaaaaaggagagcaggaagggtaagataggaaagcagcatttctttctcttctgaagtataattttaaaaagagattaaccctgaaaatcatggttttctatggtaatcaagctttgtacatcagaaaataaaacatcccattattaaacaaatatttattaaccggcccataaaaataatgaagttactcacactgagtcctagtccattctgtttttctgatttgcataagcaaaggtctaagttctggagccaacccttcagaggtcttgagaatgaatgatgggtaagtttatttggacaaccagaaggacttttcatcacaactgaagccattttataatgtagaaatttctttttcctattttaagtaaggaaagtccattcttgagaatatgttgtccaacaattaaaacactctcagg

SEQ ID NO: 1727 - DNA, 3875 bp, Homo sapiens
agcgcatggcctgccgggagggggcaggtagccggcgggcccggtccaatgggtgccggcttccgaggagagggcggaggagaggaggaaggaggcgaactgtgggccccggccccattcattgccgtggccggcgggcactggggccccgtgttttcagagtcatggaggcgctaattcctgtcataaacaagctccaggacgtcttcaacacggtgggcgccgacatcatccagctgcctcaaatcgtcgtagtgggaacgcagagcagcggaaagagctcmgtgctagaaagcctggtggggagggacctgcttcccagaggtactggaattgtcacccggagacctctcattctgcaactggtccatgtktcacaagaagataaacggaaaacaacaggagaagaaaatggrgtggaagcagaagaatggggtaaatttcttcacaccaaaaataagctttacacggattttgatgaaattcgacaagaaattgaaaatgaaacagaaagaatttcaggaaataataagggagtaagccctgaaccaattcatcttaagattttttcacccaacgttgtcaatttgacacttgtggatttgccaggaatgaccaaggtgcctgtaggtgatcaacctaaggatattgagcttcaaatcagagagctcattcttcggttcatcagtaatcctaattccattatcctcgctgtcactgctgctaatacagatatggcaacatcagaggcacttaaaatttcaagagaggtagatccagatggtcgcagaaccctagctgtaatcactaaacttgatctcatggatgcgggtactgatgccatggatgtattgatgggaagggttattccagtcaaacttggaataattggagtagttaacaggagccagctagatattaacaacaagaagagtgtaactgattcaatccgtgatgagtatgcttttcttcaaaagaaatatccatctctggccaatagaaatggaacaaagtatcttgctaggactctaaacaggttactgatgcatcacatcagagattgtttaccagagttgaaaacragaataaatgttctagctgctcagtatcagtctcttctaaatagctacggtgaacccgtggatgataaaagtgctactttactccaacttattaccaaatttgccacagaatattgtaacactattgaaggaactgcaaaatatattgaaacttcggagctatgcggtggtgctagaatttgttatattttccatgagacttttgggcgaaccttagaatctgttgatccacttggtggccttaacactattgacattttgactgccattagaaatgctactggtcctcgtcctgctttatttgtgcctgaggtttcatttgagttactggkgaagcggcaaatcaaacgtctagaagakcccagcctccgctgtgtggaactggttcatgaggaaatgcaaaggatcattcagcactgtagcaattacagtacacaggaattgttacgatttcctaaacttcatgatgccatagttgaagtggtgacttgtcttcttcgtaaaaggttgcctgttacaaatgaaatggtccataacttagtggcaattgaactggcttatatcaacacaaaacatccagactttgctgatgcttgtgggctaatgaacaataatatagaggaacaaaggagaaacaggctagccagagaattaccttcagctgtatcacgagacaagttaattcaggacagcagaagagaaactaaaaatgttgcatctggaggtggtggggttggagatggtgttcaagaaccaaccacaggcaactggagaggaatgctgaaaacttcaaaagctgaagagttattagcagaagaaaaatcaaaacccattccaattatgccagccagtccacaaaaaggtcatgccgtgaacctgctagatgtgccagttcctgttgcacgaaaactatctgctcgggaacagcgagattgtgaggttattgaacgactcattaaatcatattttctcattgtcagaaagaatattcaagacagtgtgccaaaggcagtaatgcattttttggttaatcatgtgaaagacactcttcagagtgagctagtaggccagctgtataaatcatccttattggatgatcttctgacagaatctgaggacatggcacagcgcaggaaagaagcagctgatatgctaaaggcattacaaggagccagtcaaattattgctgaaatccgggagactcatctttggtgaagagaactatgtaatactgaswctttgttgactcaaaacttgctagttactgcctacctgagtagaakcttatttatgaactcctgtgtattgcaatggtatgaatctgctcatgtggagactggctataaactgaaaagtgtattccaaattgcagaacacatcacacatttaatccaaataataaatggctgtttctaaagtttcccagtatatataaaatacatcaagtctgtcttgtgacagtttcatctgaacttaacttaaaaasaactgttaatgttctagttgtgcaaagcagtttgcctgtggataagatgacctgtgtaataatctttgttagtagtcttaaagctgctgccatagtcctccaagaagaaagcaccaagacaacatttcatatgactataatgcatgtactatataagctgatctggctttgaaagatgtgagttggcaagttcctcacatagagtcattgtattccacctgtccttcaatttagttttttctgagcttctttgcagcctttgatgtgtttttaagaaagctgaatgcacaagaggatctgtgacactgacatggctgtggtgtgcataytgtgtagttacatagcccttccaattctgggtccatttgcactagcaaattaaaatatgctttgattcatacttaaacctgaaagcaggaatgcctacattaattcctacattaaaaacagccatctacccttgattatctagwaagacttggtaatgatggtcagttccttttagatttcagaaaatcaaatgatgacctaaatttcccttaatttgcaaatacagtagtaattaaggtacatctctaaagtggagcacttacaccaggctctaagattcactttgaggtggaacttaaaaccagtgtactgtatgtatgcattggtaatagctacttttgcttcatagcttcataccaacaaaatatatttattagaatagtatgaaagtactggaggagctgaaagaaaaacacccaaggctgggcgtggtggcacacgcctgtaatcccagcactttgggaggccgaggcaggtggatcacctgaggttgggagttggagaccagcttgaccaacatggagaaaccccgtctctactaaaaatacaaaattggccgggcgtggtggcgcatgcctgtaatcccagctactcgggagggtgaggcaggagaattgcttgaccctgggaggtggaggttgtggtgagctaagatcgtgccattgcactccagccttggcaacaagagcgaaactccgtctcaaaaaaaaaaaataaaacaacacccagatagatacacatactccttcagacttacagacctaagctgcatttatggggtagtgatgaggtttagaacatatacatattttgttaaaattccccagatgattcttgktatgaacgactatattataaattttaagatgtacttagaaatccttaagacatctagccccgtctctaatagacaacacatttatattgcagatattacttttttttcagtttatgaccaggtatttatgaaggactat

SEQ ID NO: 1728 - DNA, 3842 bp, Homo sapiens
agcgcatggcctgccgggagggggcaggtagccggcgggcccggtccaatgggtgccggcttccgaggagagggcggaggagaggaggaaggaggcgaactgtgggccccggccccattcattgccgtggccggcgggcactggggccccgtgttttcagagtcatggaggcgctaattcctgtcataaacaagctccaggacgtcttcaacacggtgggcgccgacatcatccagctgcctcaaatcgtcgtagtgggaacgcagagcagcggaaagagctcmgtgctagaaagcctggtggggagggacctgcttcccagaggtactggaattgtcacccggagacctctcattctgcaactggtccatgtktcacaagaagataaacggaaaacaacaggagaagaaaatggrgtggaagcagaagaatggggtaaatttcttcacaccaaaaataagctttacacggattttgatgaaattcgacaagaaattgaaaatgaaacagaaagaatttcaggaaataataagggagtaagccctgaaccaattcatcttaagattttttcacccaacgttgtcaatttgacacttgtggatttgccaggaatgaccaaggtgcctgtaggtgatcaacctaaggatattgagcttcaaatcagagagctcattcttcggttcatcagtaatcctaattccattatcctcgctgtcactgctgctaatacagatatggcaacatcagaggcacttaaaatttcaagagaggtagatccagatggtcgcagaaccctagctgtaatcactaaacttgatctcatggatgcgggtactgatgccatggatgtattgatgggaagggttattccagtcaaacttggaataattggagtagttaacaggagccagctagatattaacaacaagaagagtgtaactgattcaatccgtgatgagtatgcttttcttcaaaagaaatatccatctctggccaatagaaatggaacaaagtatcttgctaggactctaaacaggttactgatgcatcacatcagagattgtttaccagagttgaaaacragaataaatgttctagctgctcagtatcagtctcttctaaatagctacggtgaacccgtggatgataaaagtgctactttactccaacttattaccaaatttgccacagaatattgtaacactattgaaggaactgcaaaatatattgaaacttcggagctatgcggtggtgctagaatttgttatattttccatgagacttttgggcgaaccttagaatctgttgatccacttggtggccttaacactattgacattttgactgccattagaaatgctactggtcctcgtcctgctttatttgtgcctgaggtttcatttgagttactggkgaagcggcaaatcaaacgtctagaagakcccagcctccgctgtgtggaactggttcatgaggaaatgcaaaggatcattcagcactgtagcaattacagtacacaggaattgttacgatttcctaaacttcatgatgccatagttgaagtggtgacttgtcttcttcgtaaaaggttgcctgttacaaatgaaatggtccataacttagtggcaattgaactggcttatatcaacacaaaacatccagactttgctgatgcttgtgggctaatgaacaataatatagaggaacaaaggagaaacaggctagccagagaattaccttcagctgtatcacgagacaaggttgcatctggaggtggtggggttggagatggtgttcaagaaccaaccacaggcaactggagaggaatgctgaaaacttcaaaagctgaagagttattagcagaagaaaaatcaaaacccattccaattatgccagccagtccacaaaaaggtcatgccgtgaacctgctagatgtgccagttcctgttgcacgaaaactatctgctcgggaacagcgagattgtgaggttattgaacgactcattaaatcatattttctcattgtcagaaagaatattcaagacagtgtgccaaaggcagtaatgcattttttggttaatcatgtgaaagacactcttcagagtgagctagtaggccagctgtataaatcatccttattggatgatcttctgacagaatctgaggacatggcacagcgcaggaaagaagcagctgatatgctaaaggcattacaaggagccagtcaaattattgctgaaatccgggagactcatctttggtgaagagaactatgtaatactgaswctttgttgactcaaaacttgctagttactgcctacctgagtagaakcttatttatgaactcctgtgtattgcaatggtatgaatctgctcatgtggagactggctataaactgaaaagtgtattccaaattgcagaacacatcacacatttaatccaaataataaatggctgtttctaaagtttcccagtatatataaaatacatcaagtctgtcttgtgacagtttcatctgaacttaacttaaaaasaactgttaatgttctagttgtgcaaagcagtttgcctgtggataagatgacctgtgtaataatctttgttagtagtcttaaagctgctgccatagtcctccaagaagaaagcaccaagacaacatttcatatgactataatgcatgtactatataagctgatctggctttgaaagatgtgagttggcaagttcctcacatagagtcattgtattccacctgtccttcaatttagttttttctgagcttctttgcagcctttgatgtgtttttaagaaagctgaatgcacaagaggatctgtgacactgacatggctgtggtgtgcataytgtgtagttacatagcccttccaattctgggtccatttgcactagcaaattaaaatatgctttgattcatacttaaacctgaaagcaggaatgcctacattaattcctacattaaaaacagccatctacccttgattatctagwaagacttggtaatgatggtcagttccttttagatttcagaaaatcaaatgatgacctaaatttcccttaatttgcaaatacagtagtaattaaggtacatctctaaagtggagcacttacaccaggctctaagattcactttgaggtggaacttaaaaccagtgtactgtatgtatgcattggtaatagctacttttgcttcatagcttcataccaacaaaatatatttattagaatagtatgaaagtactggaggagctgaaagaaaaacacccaaggctgggcgtggtggcacacgcctgtaatcccagcactttgggaggccgaggcaggtggatcacctgaggttgggagttggagaccagcttgaccaacatggagaaaccccgtctctactaaaaatacaaaattggccgggcgtggtggcgcatgcctgtaatcccagctactcgggagggtgaggcaggagaattgcttgaccctgggaggtggaggttgtggtgagctaagatcgtgccattgcactccagccttggcaacaagagcgaaactccgtctcaaaaaaaaaaaataaaacaacacccagatagatacacatactccttcagacttacagacctaagctgcatttatggggtagtgatgaggtttagaacatatacatattttgttaaaattccccagatgattcttgktatgaacgactatattataaattttaagatgtacttagaaatccttaagacatctagccccgtctctaatagacaacacatttatattgcagatattacttttttttcagtttatgaccaggtatttatgaaggactat

SEQ ID NO: 1729 - DNA, 3953 bp, Homo sapiens
agcgcatggcctgccgggagggggcaggtagccggcgggcccggtccaatgggtgccggcttccgaggagagggcggaggagaggaggaaggaggcgaactgtgggccccggccccattcattgccgtggccggcgggcactggggccccgtgttttcagagtcatggaggcgctaattcctgtcataaacaagctccaggacgtcttcaacacggtgggcgccgacatcatccagctgcctcaaatcgtcgtagtgggaacgcagagcagcggaaagagctcmgtgctagaaagcctggtggggagggacctgcttcccagaggtactggaattgtcacccggagacctctcattctgcaactggtccatgtktcacaagaagataaacggaaaacaacaggagaagaaaatggrgtggaagcagaagaatggggtaaatttcttcacaccaaaaataagctttacacggattttgatgaaattcgacaagaaattgaaaatgaaacagaaagaatttcaggaaataataagggagtaagccctgaaccaattcatcttaagattttttcacccaacgttgtcaatttgacacttgtggatttgccaggaatgaccaaggtgcctgtaggtgatcaacctaaggatattgagcttcaaatcagagagctcattcttcggttcatcagtaatcctaattccattatcctcgctgtcactgctgctaatacagatatggcaacatcagaggcacttaaaatttcaagagaggtagatccagatggtcgcagaaccctagctgtaatcactaaacttgatctcatggatgcgggtactgatgccatggatgtattgatgggaagggttattccagtcaaacttggaataattggagtagttaacaggagccagctagatattaacaacaagaagagtgtaactgattcaatccgtgatgagtatgcttttcttcaaaagaaatatccatctctggccaatagaaatggaacaaagtatcttgctaggactctaaacaggttactgatgcatcacatcagagattgtttaccagagttgaaaacragaataaatgttctagctgctcagtatcagtctcttctaaatagctacggtgaacccgtggatgataaaagtgctactttactccaacttattaccaaatttgccacagaatattgtaacactattgaaggaactgcaaaatatattgaaacttcggagctatgcggtggtgctagaatttgttatattttccatgagacttttgggcgaaccttagaatctgttgatccacttggtggccttaacactattgacattttgactgccattagaaatgctactggtcctcgtcctgctttatttgtgcctgaggtttcatttgagttactggkgaagcggcaaatcaaacgtctagaagakcccagcctccgctgtgtggaactggttcatgaggaaatgcaaaggatcattcagcactgtagcaattacagtacacaggaattgttacgatttcctaaacttcatgatgccatagttgaagtggtgacttgtcttcttcgtaaaaggttgcctgttacaaatgaaatggtccataacttagtggcaattgaactggcttatatcaacacaaaacatccagactttgctgatgcttgtgggctaatgaacaataatatagaggaacaaaggagaaacaggctagccagagaattaccttcagctgtatcacgagacaagtcttctaaagttccaagtgctttggcacctgcctcccaggagccctcccccgctgcttctgctgaggctgatggcaagttaattcaggacagcagaagagaaactaaaaatgttgcatctggaggtggtggggttggagatggtgttcaagaaccaaccacaggcaactggagaggaatgctgaaaacttcaaaagctgaagagttattagcagaagaaaaatcaaaacccattccaattatgccagccagtccacaaaaaggtcatgccgtgaacctgctagatgtgccagttcctgttgcacgaaaactatctgctcgggaacagcgagattgtgaggttattgaacgactcattaaatcatattttctcattgtcagaaagaatattcaagacagtgtgccaaaggcagtaatgcattttttggttaatcatgtgaaagacactcttcagagtgagctagtaggccagctgtataaatcatccttattggatgatcttctgacagaatctgaggacatggcacagcgcaggaaagaagcagctgatatgctaaaggcattacaaggagccagtcaaattattgctgaaatccgggagactcatctttggtgaagagaactatgtaatactgaswctttgttgactcaaaacttgctagttactgcctacctgagtagaakcttatttatgaactcctgtgtattgcaatggtatgaatctgctcatgtggagactggctataaactgaaaagtgtattccaaattgcagaacacatcacacatttaatccaaataataaatggctgtttctaaagtttcccagtatatataaaatacatcaagtctgtcttgtgacagtttcatctgaacttaacttaaaaasaactgttaatgttctagttgtgcaaagcagtttgcctgtggataagatgacctgtgtaataatctttgttagtagtcttaaagctgctgccatagtcctccaagaagaaagcaccaagacaacatttcatatgactataatgcatgtactatataagctgatctggctttgaaagatgtgagttggcaagttcctcacatagagtcattgtattccacctgtccttcaatttagttttttctgagcttctttgcagcctttgatgtgtttttaagaaagctgaatgcacaagaggatctgtgacactgacatggctgtggtgtgcataytgtgtagttacatagcccttccaattctgggtccatttgcactagcaaattaaaatatgctttgattcatacttaaacctgaaagcaggaatgcctacattaattcctacattaaaaacagccatctacccttgattatctagwaagacttggtaatgatggtcagttccttttagatttcagaaaatcaaatgatgacctaaatttcccttaatttgcaaatacagtagtaattaaggtacatctctaaagtggagcacttacaccaggctctaagattcactttgaggtggaacttaaaaccagtgtactgtatgtatgcattggtaatagctacttttgcttcatagcttcataccaacaaaatatatttattagaatagtatgaaagtactggaggagctgaaagaaaaacacccaaggctgggcgtggtggcacacgcctgtaatcccagcactttgggaggccgaggcaggtggatcacctgaggttgggagttggagaccagcttgaccaacatggagaaaccccgtctctactaaaaatacaaaattggccgggcgtggtggcgcatgcctgtaatcccagctactcgggagggtgaggcaggagaattgcttgaccctgggaggtggaggttgtggtgagctaagatcgtgccattgcactccagccttggcaacaagagcgaaactccgtctcaaaaaaaaaaaataaaacaacacccagatagatacacatactccttcagacttacagacctaagctgcatttatggggtagtgatgaggtttagaacatatacatattttgttaaaattccccagatgattcttgktatgaacgactatattataaattttaagatgtacttagaaatccttaagacatctagccccgtctctaatagacaacacatttatattgcagatattacttttttttcagtttatgaccaggtatttatgaaggactat

SEQ ID NO: 1730 - DNA, 3904 bp, Homo sapiens
agcgcatggcctgccgggagggggcaggtagccggcgggcccggtccaatgggtgccggcttccgaggagagggcggaggagaggaggaaggaggcgaactgtgggccccggccccattcattgccgtggccggcgggcactggggccccgtgttttcagagtcatggaggcgctaattcctgtcataaacaagctccaggacgtcttcaacacggtgggcgccgacatcatccagctgcctcaaatcgtcgtagtgggaacgcagagcagcggaaagagctcmgtgctagaaagcctggtggggagggacctgcttcccagaggtactggaattgtcacccggagacctctcattctgcaactggtccatgtktcacaagaagataaacggaaaacaacaggagaagaaaatggrgtggaagcagaagaatggggtaaatttcttcacaccaaaaataagctttacacggattttgatgaaattcgacaagaaattgaaaatgaaacagaaagaatttcaggaaataataagggagtaagccctgaaccaattcatcttaagattttttcacccaacgttgtcaatttgacacttgtggatttgccaggaatgaccaaggtgcctgtaggtgatcaacctaaggatattgagcttcaaatcagagagctcattcttcggttcatcagtaatcctaattccattatcctcgctgtcactgctgctaatacagatatggcaacatcagaggcacttaaaatttcaagagaggtagatccagatggtcgcagaaccctagctgtaatcactaaacttgatctcatggatgcgggtactgatgccatggatgtattgatgggaagggttattccagtcaaacttggaataattggagtagttaacaggagccagctagatattaacaacaagaagagtgtaactgattcaatccgtgatgagtatgcttttcttcaaaagaaatatccatctctggccaatagaaatggaacaaagtatcttgctaggactctaaacaggttactgatgcatcacatcagagattgtttaccagagttgaaaacragaataaatgttctagctgctcagtatcagtctcttctaaatagctacggtgaacccgtggatgataaaagtgctactttactccaacttattaccaaatttgccacagaatattgtaacactattgaaggaactgcaaaatatattgaaacttcggagctatgcggtggtgctagaatttgttatattttccatgagacttttgggcgaaccttagaatctgttgatccacttggtggccttaacactattgacattttgactgccattagaaatgctactggtcctcgtcctgctttatttgtgcctgaggtttcatttgagttactggkgaagcggcaaatcaaacgtctagaagakcccagcctccgctgtgtggaactggttcatgaggaaatgcaaaggatcattcagcactgtagcaattacagtacacaggaattgttacgatttcctaaacttcatgatgccatagttgaagtggtgacttgtcttcttcgtaaaaggttgcctgttacaaatgaaatggtccataacttagtggcaattgaactggcttatatcaacacaaaacatccagactttgctgatgcttgtgggctaatgaacaataatatagaggaacaaaggagaaacaggctagccagagaattaccttcagctgtatcacgagacaagtcttctaaagttccaagtgctttggcacctgcctcccaggagccctcccccgctgcttctgctgaggctgatggcaagttaattcaggacagcagaagagaaactaaaaatgttgcatctggaggtggtggggttggagatggtgttcaagaaccaaccacaggcaactggagaggaatgctgaaaacttcaaaagctgaagagttattagcagaagaaaaatcaaaacccattccaattatgccagccagtccacaaaaaggtcatgccgtgaacctgctagatgtgccagttcctgttgcacgaaaactatctgctcgggaacagcgagattgtgaggttattgaacgactcattaaatcatattttctcattgtcagaaagaatattcaagacagtgtgccaaaggcagtaatgcattttttggttaatcatgtgaaagacactcttcagagtgagctagtaggccagctgtataaatcatccttattggatgatcttctgacagaatctgaggacatggcacagcgcaggaaagaagcagctgatatgctaaaggcattacaaggagccagtcaaattattgctgaaatccgggagactcatctttggtgaagagaactatgtaatactgaswctttgttgactcaaaacttgctagttactgcctacctgagtagaakcttatttatgaactcctgtgtattgcaatggtatgaatctgctcatgtggagactggctataaactgaaaagtgtattccaaattgcagaacacatcacacatttaatccaaataataaatggctgtttctaaagtttcccagtatatataaaatacatcaagtctgtcttgtgacagtttcatctgaacttaacttaaaaasaactgttaatgttctagttgtgcaaagcagtttgcctgtggataagatgacctgtgtaataatctttgttagtagtcttaaagctgctgccatagtcctccaagaagaaagcaccaagacaacatttcatatgactataatgcatgtactatataagctgatctggctttgaaagatgtgagttggcaagttcctcacatagagtcattgtattccacctgtccttcaatttagttttttctgagcttctttgcagcctttgatgtgtttttaagaaagctgaatgcacaagaggatctgtgacactgacatggctgtggtgtgcataytgtgtagttacatagcccttccaattctgggtccatttgcactagcaaattaaaatatgctttgattcatacttaaacctgaaagcaggaatgcctacattaattcctacattaaaaacagccatctacccttgattatctagwaagacttggtaatgatggtcagttccttttagatttcagaaaatcaaatgatgacctaaatttcccttaatttgcaaatacagtagtaattaaggtacatctctaaagtggagcacttacaccaggctctaagattcactttgaggtggaacttaaaaccagtgtactgtatgtatgcattggtaatagctacttttgcttcatagcttcataccaacaaaatatatttattagaatagtatgaaagtactggaggagctgaaagaaaaacacccaagtgctgggattacaggtgtgagccaccatgcccagcctcacaattccttacactacctctttttcattgttcctcatcactacaaaaaggagagcaggaagggtaagataggaaagcagcatttctttctcttctgaagtataattttaaaaagagattaaccctgaaaatcatggttttctatggtaatcaagctttgtacatcagaaaataaaacatcccattattaaacaaatatttattaaccggcccataaaaataatgaagttactcacactgagtcctagtccattctgtttttctgatttgcataagcaaaggtctaagttctggagccaacccttcagaggtcttgagaatgaatgatgggtaagtttatttggacaaccagaaggacttttcatcacaactgaagccattttataatgtagaaatttctttttcctattttaagtaaggaaagtccattcttgagaatatgttgtccaacaattaaaacactctcagg

SEQ ID NO: 1731 - DNA, 3539 bp, Homo sapiens
grgtggaagcagaagaatggggtaaatttcttcacaccaaaaataagctttacacggattttgatgaaattcgacaagaaattgaaaatgaaacagaaagaatttcaggaaataataagggagtaagccctgaaccaattcatcttaagattttttcacccaacgttgtcaatttgacacttgtggatttgccaggaatgaccaaggtgcctgtaggtgatcaacctaaggatattgagcttcaaatcagagagctcattcttcggttcatcagtaatcctaattccattatcctcgctgtcactgctgctaatacagatatggcaacatcagaggcacttaaaatttcaagagaggtagatccagatggtcgcagaaccctagctgtaatcactaaacttgatctcatggatgcgggtactgatgccatggatgtattgatgggaagggttattccagtcaaacttggaataattggagtagttaacaggagccagctagatattaacaacaagaagagtgtaactgattcaatccgtgatgagtatgcttttcttcaaaagaaatatccatctctggccaatagaaatggaacaaagtatcttgctaggactctaaacaggttactgatgcatcacatcagagattgtttaccagagttgaaaacragaataaatgttctagctgctcagtatcagtctcttctaaatagctacggtgaacccgtggatgataaaagtgctactttactccaacttattaccaaatttgccacagaatattgtaacactattgaaggaactgcaaaatatattgaaacttcggagctatgcggtggtgctagaatttgttatattttccatgagacttttgggcgaaccttagaatctgttgatccacttggtggccttaacactattgacattttgactgccattagaaatgctactggtcctcgtcctgctttatttgtgcctgaggtttcatttgagttactggkgaagcggcaaatcaaacgtctagaagakcccagcctccgctgtgtggaactggttcatgaggaaatgcaaaggatcattcagcactgtagcaattacagtacacaggaattgttacgatttcctaaacttcatgatgccatagttgaagtggtgacttgtcttcttcgtaaaaggttgcctgttacaaatgaaatggtccataacttagtggcaattgaactggcttatatcaacacaaaacatccagactttgctgatgcttgtgggctaatgaacaataatatagaggaacaaaggagaaacaggctagccagagaattaccttcagctgtatcacgagacaagtcttctaaagttccaagtgctttggcacctgcctcccaggagccctcccccgctgcttctgctgaggctgatggcaagttaattcaggacagcagaagagaaactaaaaatgttgcatctggaggtggtggggttggagatggtgttcaagaaccaaccacaggcaactggagaggaatgctgaaaacttcaaaagctgaagagttattagcagaagaaaaatcaaaacccattccaattatgccagccagtccacaaaaaggtcatgccgtgaacctgctagatgtgccagttcctgttgcacgaaaactatctgctcgggaacagcgagattgtgaggttattgaacgactcattaaatcatattttctcattgtcagaaagaatattcaagacagtgtgccaaaggcagtaatgcattttttggttaatcatgtgaaagacactcttcagagtgagctagtaggccagctgtataaatcatccttattggatgatcttctgacagaatctgaggacatggcacagcgcaggaaagaagcagctgatatgctaaaggcattacaaggagccagtcaaattattgctgaaatccgggagactcatctttggtgaagagaactatgtaatactgaswctttgttgactcaaaacttgctagttactgcctacctgagtagaakcttatttatgaactcctgtgtattgcaatggtatgaatctgctcatgtggagactggctataaactgaaaagtgtattccaaattgcagaacacatcacacatttaatccaaataataaatggctgtttctaaagtttcccagtatatataaaatacatcaagtctgtcttgtgacagtttcatctgaacttaacttaaaaasaactgttaatgttctagttgtgcaaagcagtttgcctgtggataagatgacctgtgtaataatctttgttagtagtcttaaagctgctgccatagtcctccaagaagaaagcaccaagacaacatttcatatgactataatgcatgtactatataagctgatctggctttgaaagatgtgagttggcaagttcctcacatagagtcattgtattccacctgtccttcaatttagttttttctgagcttctttgcagcctttgatgtgtttttaagaaagctgaatgcacaagaggatctgtgacactgacatggctgtggtgtgcataytgtgtagttacatagcccttccaattctgggtccatttgcactagcaaattaaaatatgctttgattcatacttaaacctgaaagcaggaatgcctacattaattcctacattaaaaacagccatctacccttgattatctagwaagacttggtaatgatggtcagttccttttagatttcagaaaatcaaatgatgacctaaatttcccttaatttgcaaatacagtagtaattaaggtacatctctaaagtggagcacttacaccaggctctaagattcactttgaggtggaacttaaaaccagtgtactgtatgtatgcattggtaatagctacttttgcttcatagcttcataccaacaaaatatatttattagaatagtatgaaagtactggaggagctgaaagaaaaacacccaaggctgggcgtggtggcacacgcctgtaatcccagcactttgggaggccgaggcaggtggatcacctgaggttgggagttggagaccagcttgaccaacatggagaaaccccgtctctactaaaaatacaaaattggccgggcgtggtggcgcatgcctgtaatcccagctactcgggagggtgaggcaggagaattgcttgaccctgggaggtggaggttgtggtgagctaagatcgtgccattgcactccagccttggcaacaagagcgaaactccgtctcaaaaaaaaaaaataaaacaacacccagatagatacacatactccttcagacttacagacctaagctgcatttatggggtagtgatgaggtttagaacatatacatattttgttaaaattccccagatgattcttgktatgaacgactatattataaattttaagatgtacttagaaatccttaagacatctagccccgtctctaatagacaacacatttatattgcagatattacttttttttcagtttatgaccaggtatttatgaaggactat

SEQ ID NO: 1732 - DNA, 3419 bp, Homo sapiens
gaccctgctacatggaaaaactcaagacacctttctaaaggrgtggaagcagaagaatggggtaaatttcttcacaccaaaaataagctttacacggattttgatgaaattcgacaagaaattgaaaatgaaacagaaagaatttcaggaaataataagggagtaagccctgaaccaattcatcttaagattttttcacccaacgttgtcaatttgacacttgtggatttgccaggaatgaccaaggtgcctgtaggtgatcaacctaaggatattgagcttcaaatcagagagctcattcttcggttcatcagtaatcctaattccattatcctcgctgtcactgctgctaatacagatatggcaacatcagaggcacttaaaatttcaagagaggtagatccagatggtcgcagaaccctagctgtaatcactaaacttgatctcatggatgcgggtactgatgccatggatgtattgatgggaagggttattccagtcaaacttggaataattggagtagttaacaggagccagctagatattaacaacaagaagagtgtaactgattcaatccgtgatgagtatgcttttcttcaaaagaaatatccatctctggccaatagaaatggaacaaagtatcttgctaggactctaaacaggttactgatgcatcacatcagagattgtttaccagagttgaaaacragaataaatgttctagctgctcagtatcagtctcttctaaatagctacggtgaacccgtggatgataaaagtgctactttactccaacttattaccaaatttgccacagaatattgtaacactattgaaggaactgcaaaatatattgaaacttcggagctatgcggtggtgctagaatttgttatattttccatgagacttttgggcgaaccttagaatctgttgatccacttggtggccttaacactattgacattttgactgccattagaaatgctactggtcctcgtcctgctttatttgtgcctgaggtttcatttgagttactggkgaagcggcaaatcaaacgtctagaagakcccagcctccgctgtgtggaactggttcatgaggaaatgcaaaggatcattcagcactgtagcaattacagtacacaggaattgttacgatttcctaaacttcatgatgccatagttgaagtggtgacttgtcttcttcgtaaaaggttgcctgttacaaatgaaatggtccataacttagtggcaattgaactggcttatatcaacacaaaacatccagactttgctgatgcttgtgggctaatgaacaataatatagaggaacaaaggagaaacaggctagccagagaattaccttcagctgtatcacgagacaaggttgcatctggaggtggtggggttggagatggtgttcaagaaccaaccacaggcaactggagaggaatgctgaaaacttcaaaagctgaagagttattagcagaagaaaaatcaaaacccattccaattatgccagccagtccacaaaaaggtcatgccgtgaacctgctagatgtgccagttcctgttgcacgaaaactatctgctcgggaacagcgagattgtgaggttattgaacgactcattaaatcatattttctcattgtcagaaagaatattcaagacagtgtgccaaaggcagtaatgcattttttggttaatcatgtgaaagacactcttcagagtgagctagtaggccagctgtataaatcatccttattggatgatcttctgacagaatctgaggacatggcacagcgcaggaaagaagcagctgatatgctaaaggcattacaaggagccagtcaaattattgctgaaatccgggagactcatctttggtgaagagaactatgtaatactgaswctttgttgactcaaaacttgctagttactgcctacctgagtagaakcttatttatgaactcctgtgtattgcaatggtatgaatctgctcatgtggagactggctataaactgaaaagtgtattccaaattgcagaacacatcacacatttaatccaaataataaatggctgtttctaaagtttcccagtatatataaaatacatcaagtctgtcttgtgacagtttcatctgaacttaacttaaaaasaactgttaatgttctagttgtgcaaagcagtttgcctgtggataagatgacctgtgtaataatctttgttagtagtcttaaagctgctgccatagtcctccaagaagaaagcaccaagacaacatttcatatgactataatgcatgtactatataagctgatctggctttgaaagatgtgagttggcaagttcctcacatagagtcattgtattccacctgtccttcaatttagttttttctgagcttctttgcagcctttgatgtgtttttaagaaagctgaatgcacaagaggatctgtgacactgacatggctgtggtgtgcataytgtgtagttacatagcccttccaattctgggtccatttgcactagcaaattaaaatatgctttgattcatacttaaacctgaaagcaggaatgcctacattaattcctacattaaaaacagccatctacccttgattatctagwaagacttggtaatgatggtcagttccttttagatttcagaaaatcaaatgatgacctaaatttcccttaatttgcaaatacagtagtaattaaggtacatctctaaagtggagcacttacaccaggctctaagattcactttgaggtggaacttaaaaccagtgtactgtatgtatgcattggtaatagctacttttgcttcatagcttcataccaacaaaatatatttattagaatagtatgaaagtactggaggagctgaaagaaaaacacccaagtgctgggattacaggtgtgagccaccatgcccagcctcacaattccttacactacctctttttcattgttcctcatcactacaaaaaggagagcaggaagggtaagataggaaagcagcatttctttctcttctgaagtataattttaaaaagagattaaccctgaaaatcatggttttctatggtaatcaagctttgtacatcagaaaataaaacatcccattattaaacaaatatttattaaccggcccataaaaataatgaagttactcacactgagtcctagtccattctgtttttctgatttgcataagcaaaggtctaagttctggagccaacccttcagaggtcttgagaatgaatgatgggtaagtttatttggacaaccagaaggacttttcatcacaactgaagccattttataatgtagaaatttctttttcctattttaagtaaggaaagtccattcttgagaatatgttgtccaacaattaaaacactctcagg

SEQ ID NO: 1733 - DNA, 3826 bp, Homo sapiens
agcgcatggcctgccgggagggggcaggtagccggcgggcccggtccaatgggtgccggcttccgaggagagggcggaggagaggaggaaggaggcgaactgtgggccccggccccattcattgccgtggccggcgggcactggggccccgtgttttcagagtcatggaggcgctaattcctgtcataaacaagctccaggacgtcttcaacacggtgggcgccgacatcatccagctgcctcaaatcgtcgtagtgggaacgcagagcagcggaaagagctcmgtgctagaaagcctggtggggagggacctgcttcccagaggtactggaattgtcacccggagacctctcattctgcaactggtccatgtktcacaagaagataaacggaaaacaacaggagaagaaaatggrgtggaagcagaagaatggggtaaatttcttcacaccaaaaataagctttacacggattttgatgaaattcgacaagaaattgaaaatgaaacagaaagaatttcaggaaataataagggagtaagccctgaaccaattcatcttaagattttttcacccaacgttgtcaatttgacacttgtggatttgccaggaatgaccaaggtgcctgtaggtgatcaacctaaggatattgagcttcaaatcagagagctcattcttcggttcatcagtaatcctaattccattatcctcgctgtcactgctgctaatacagatatggcaacatcagaggcacttaaaatttcaagagaggtagatccagatggtcgcagaaccctagctgtaatcactaaacttgatctcatggatgcgggtactgatgccatggatgtattgatgggaagggttattccagtcaaacttggaataattggagtagttaacaggagccagctagatattaacaacaagaagagtgtaactgattcaatccgtgatgagtatgcttttcttcaaaagaaatatccatctctggccaatagaaatggaacaaagtatcttgctaggactctaaacaggttactgatgcatcacatcagagattgtttaccagagttgaaaacragaataaatgttctagctgctcagtatcagtctcttctaaatagctacggtgaacccgtggatgataaaagtgctactttactccaacttattaccaaatttgccacagaatattgtaacactattgaaggaactgcaaaatatattgaaacttcggagctatgcggtggtgctagaatttgttatattttccatgagacttttgggcgaaccttagaatctgttgatccacttggtggccttaacactattgacattttgactgccattagaaatgctactggtcctcgtcctgctttatttgtgcctgaggtttcatttgagttactggkgaagcggcaaatcaaacgtctagaagakcccagcctccgctgtgtggaactggttcatgaggaaatgcaaaggatcattcagcactgtagcaattacagtacacaggaattgttacgatttcctaaacttcatgatgccatagttgaagtggtgacttgtcttcttcgtaaaaggttgcctgttacaaatgaaatggtccataacttagtggcaattgaactggcttatatcaacacaaaacatccagactttgctgatgcttgtgggctaatgaacaataatatagaggaacaaaggagaaacaggctagccagagaattaccttcagctgtatcacgagacaagttaattcaggacagcagaagagaaactaaaaatgttgcatctggaggtggtggggttggagatggtgttcaagaaccaaccacaggcaactggagaggaatgctgaaaacttcaaaagctgaagagttattagcagaagaaaaatcaaaacccattccaattatgccagccagtccacaaaaaggtcatgccgtgaacctgctagatgtgccagttcctgttgcacgaaaactatctgctcgggaacagcgagattgtgaggttattgaacgactcattaaatcatattttctcattgtcagaaagaatattcaagacagtgtgccaaaggcagtaatgcattttttggttaatcatgtgaaagacactcttcagagtgagctagtaggccagctgtataaatcatccttattggatgatcttctgacagaatctgaggacatggcacagcgcaggaaagaagcagctgatatgctaaaggcattacaaggagccagtcaaattattgctgaaatccgggagactcatctttggtgaagagaactatgtaatactgaswctttgttgactcaaaacttgctagttactgcctacctgagtagaakcttatttatgaactcctgtgtattgcaatggtatgaatctgctcatgtggagactggctataaactgaaaagtgtattccaaattgcagaacacatcacacatttaatccaaataataaatggctgtttctaaagtttcccagtatatataaaatacatcaagtctgtcttgtgacagtttcatctgaacttaacttaaaaasaactgttaatgttctagttgtgcaaagcagtttgcctgtggataagatgacctgtgtaataatctttgttagtagtcttaaagctgctgccatagtcctccaagaagaaagcaccaagacaacatttcatatgactataatgcatgtactatataagctgatctggctttgaaagatgtgagttggcaagttcctcacatagagtcattgtattccacctgtccttcaatttagttttttctgagcttctttgcagcctttgatgtgtttttaagaaagctgaatgcacaagaggatctgtgacactgacatggctgtggtgtgcataytgtgtagttacatagcccttccaattctgggtccatttgcactagcaaattaaaatatgctttgattcatacttaaacctgaaagcaggaatgcctacattaattcctacattaaaaacagccatctacccttgattatctagwaagacttggtaatgatggtcagttccttttagatttcagaaaatcaaatgatgacctaaatttcccttaatttgcaaatacagtagtaattaaggtacatctctaaagtggagcacttacaccaggctctaagattcactttgaggtggaacttaaaaccagtgtactgtatgtatgcattggtaatagctacttttgcttcatagcttcataccaacaaaatatatttattagaatagtatgaaagtactggaggagctgaaagaaaaacacccaagtgctgggattacaggtgtgagccaccatgcccagcctcacaattccttacactacctctttttcattgttcctcatcactacaaaaaggagagcaggaagggtaagataggaaagcagcatttctttctcttctgaagtataattttaaaaagagattaaccctgaaaatcatggttttctatggtaatcaagctttgtacatcagaaaataaaacatcccattattaaacaaatatttattaaccggcccataaaaataatgaagttactcacactgagtcctagtccattctgtttttctgatttgcataagcaaaggtctaagttctggagccaacccttcagaggtcttgagaatgaatgatgggtaagtttatttggacaaccagaaggacttttcatcacaactgaagccattttataatgtagaaatttctttttcctattttaagtaaggaaagtccattcttgagaatatgttgtccaacaattaaaacactctcagg

SEQ ID NO: 1734 - DNA, 3530 bp, Homo sapiens
gaccctgctacatggaaaaactcaagacacctttctaaaggrgtggaagcagaagaatggggtaaatttcttcacaccaaaaataagctttacacggattttgatgaaattcgacaagaaattgaaaatgaaacagaaagaatttcaggaaataataagggagtaagccctgaaccaattcatcttaagattttttcacccaacgttgtcaatttgacacttgtggatttgccaggaatgaccaaggtgcctgtaggtgatcaacctaaggatattgagcttcaaatcagagagctcattcttcggttcatcagtaatcctaattccattatcctcgctgtcactgctgctaatacagatatggcaacatcagaggcacttaaaatttcaagagaggtagatccagatggtcgcagaaccctagctgtaatcactaaacttgatctcatggatgcgggtactgatgccatggatgtattgatgggaagggttattccagtcaaacttggaataattggagtagttaacaggagccagctagatattaacaacaagaagagtgtaactgattcaatccgtgatgagtatgcttttcttcaaaagaaatatccatctctggccaatagaaatggaacaaagtatcttgctaggactctaaacaggttactgatgcatcacatcagagattgtttaccagagttgaaaacragaataaatgttctagctgctcagtatcagtctcttctaaatagctacggtgaacccgtggatgataaaagtgctactttactccaacttattaccaaatttgccacagaatattgtaacactattgaaggaactgcaaaatatattgaaacttcggagctatgcggtggtgctagaatttgttatattttccatgagacttttgggcgaaccttagaatctgttgatccacttggtggccttaacactattgacattttgactgccattagaaatgctactggtcctcgtcctgctttatttgtgcctgaggtttcatttgagttactggkgaagcggcaaatcaaacgtctagaagakcccagcctccgctgtgtggaactggttcatgaggaaatgcaaaggatcattcagcactgtagcaattacagtacacaggaattgttacgatttcctaaacttcatgatgccatagttgaagtggtgacttgtcttcttcgtaaaaggttgcctgttacaaatgaaatggtccataacttagtggcaattgaactggcttatatcaacacaaaacatccagactttgctgatgcttgtgggctaatgaacaataatatagaggaacaaaggagaaacaggctagccagagaattaccttcagctgtatcacgagacaagtcttctaaagttccaagtgctttggcacctgcctcccaggagccctcccccgctgcttctgctgaggctgatggcaagttaattcaggacagcagaagagaaactaaaaatgttgcatctggaggtggtggggttggagatggtgttcaagaaccaaccacaggcaactggagaggaatgctgaaaacttcaaaagctgaagagttattagcagaagaaaaatcaaaacccattccaattatgccagccagtccacaaaaaggtcatgccgtgaacctgctagatgtgccagttcctgttgcacgaaaactatctgctcgggaacagcgagattgtgaggttattgaacgactcattaaatcatattttctcattgtcagaaagaatattcaagacagtgtgccaaaggcagtaatgcattttttggttaatcatgtgaaagacactcttcagagtgagctagtaggccagctgtataaatcatccttattggatgatcttctgacagaatctgaggacatggcacagcgcaggaaagaagcagctgatatgctaaaggcattacaaggagccagtcaaattattgctgaaatccgggagactcatctttggtgaagagaactatgtaatactgaswctttgttgactcaaaacttgctagttactgcctacctgagtagaakcttatttatgaactcctgtgtattgcaatggtatgaatctgctcatgtggagactggctataaactgaaaagtgtattccaaattgcagaacacatcacacatttaatccaaataataaatggctgtttctaaagtttcccagtatatataaaatacatcaagtctgtcttgtgacagtttcatctgaacttaacttaaaaasaactgttaatgttctagttgtgcaaagcagtttgcctgtggataagatgacctgtgtaataatctttgttagtagtcttaaagctgctgccatagtcctccaagaagaaagcaccaagacaacatttcatatgactataatgcatgtactatataagctgatctggctttgaaagatgtgagttggcaagttcctcacatagagtcattgtattccacctgtccttcaatttagttttttctgagcttctttgcagcctttgatgtgtttttaagaaagctgaatgcacaagaggatctgtgacactgacatggctgtggtgtgcataytgtgtagttacatagcccttccaattctgggtccatttgcactagcaaattaaaatatgctttgattcatacttaaacctgaaagcaggaatgcctacattaattcctacattaaaaacagccatctacccttgattatctagwaagacttggtaatgatggtcagttccttttagatttcagaaaatcaaatgatgacctaaatttcccttaatttgcaaatacagtagtaattaaggtacatctctaaagtggagcacttacaccaggctctaagattcactttgaggtggaacttaaaaccagtgtactgtatgtatgcattggtaatagctacttttgcttcatagcttcataccaacaaaatatatttattagaatagtatgaaagtactggaggagctgaaagaaaaacacccaagtgctgggattacaggtgtgagccaccatgcccagcctcacaattccttacactacctctttttcattgttcctcatcactacaaaaaggagagcaggaagggtaagataggaaagcagcatttctttctcttctgaagtataattttaaaaagagattaaccctgaaaatcatggttttctatggtaatcaagctttgtacatcagaaaataaaacatcccattattaaacaaatatttattaaccggcccataaaaataatgaagttactcacactgagtcctagtccattctgtttttctgatttgcataagcaaaggtctaagttctggagccaacccttcagaggtcttgagaatgaatgatgggtaagtttatttggacaaccagaaggacttttcatcacaactgaagccattttataatgtagaaatttctttttcctattttaagtaaggaaagtccattcttgagaatatgttgtccaacaattaaaacactctcagg

SEQ ID NO: 1735 - DNA, 1794 bp, Homo sapiens
atgcacaccctgtggttccgggaacacaacaggrtggccacggagctgtccgccctgaacccccactgggagggaaacacggtttaccaggaagccaggaagatcgtgggcgcggagctgcagcacatcacctacagccactggctgcctaaggtcctgggggaccctggcactaggatgctgaggggttaccgaggctacaaccccaacgtgaatgcaggcatcattaactcttttgctactgcagcctttagatttggccacacattaatcaatcctattctttaccgactgaatgccaccttaggtgaaatttccgaaggccaccttccgttccataaagcgctcttttcaccgtccagaataatcaaggaaggtgggatagacccggttctccgggggctgtttggcgtggctgctaaatggcgggcaccctcctaccttctcagtcctgagctgacccagaggctcttctccgcggcttattctgcggccgtggattcggctgccaccatcattcaaaggggtagagaccacgggatcccaccatatgttgacttcagagttttctgtaatttgacttcagttaagaactttgaggatcttcaaaatgaaattaaagattcagagattagacaaaaactgagaaagttgtacggctctccaggtgacattgacctctggcccgcccttatggttgaagacctgattcctggtacaagagtgggaccaacacttatgtgcctgtttgttacccagtttcagcggctaagagatggagataggttctggtatgaaaaccctggagtatttaccccggcacaactcactcagctgaagcaggcgtccctgagccgggtgctttgtgacaatggtgacagcattcagcaagtgcaggctgatgtctttgtaaaggcagaatacccacaggattacctgaactgcagcgagatcccgaaggtggacctgcgagtgtggcaagactgctgtgcagactgtaggagtagaggacagttcagagcagtgacgcaagagtctcaaaagaaacgctcagctcaatacagctatcctgwtgataaggatatggagttaagtcatctaagaagtaggcaacaagataaaatatatgtgggtgaagatgctagaaatgtgacagttctggcaaaaacaaagttctcccaagatttcagcacgtttgcagcggaaattcaggaaaccatcacagcactcagagagcagataaacaagctggaggcacgcctgaggcaggcagggtgtacagatgttagaggggttccaaggaaggccgaggagcgctggatgaaagaagactgcactcactgcatttgtgagagtggccaggtcacctgtgtggtggagatttgtcccccggctccctgtcccagtcctgaattggtgaaaggaacctgctgtccagtttgcagagamcgaggaatgccaagtgattccccagagaagcgctaataaaagttttgtgctgttgagccccaaatgggaaatttctcaggaagagacatttaggacttcagaacttttaacttgtagtcacattgttgatatggaaaccactgacttaagcaacttagttcatctaatcttacatatacttacgatcttttattttttcattttctaacataccttgaaataattcaaaactaaaagcaataaagtgcatatgaagtgtttgatcataagaaatatttcttactgtaagctgtcagttttatatgccacacctggaaataaaaagaatatcatggaatatttaaa

SEQ ID NO: 1736 - DNA, 892 bp, Homo sapiens
tggccccaacggccagagagagaagggggcggatcctcgcgtaccagacacgccccggtcgggtataaaattcgccaggcgctcgctccccaggccacagccgctccctcgctctgctggggcctccggacgcgcttcccacgcgggtctctggaacactcggtccgaacgcacgcctgcttgcactcacactgcggttcacacccggaggcgctctcgcactcacactgccgctcacgcgtgctcacactcccccacgcgcgctccgctccggctccagccccgcgcccmgcgaaggcgcaggcactgctgccgagagcgccgaggggccccgcggccttcccatggcggacctgagcttcatcgaagataccgtcgccttccccgagaaggaagaggatgaggaggaagaagaggagggtgtggagtggggctacgaggaaggtgttgagtggggtctggtgtttcctgatgctaatggggaataccagtctcctattaacctaaactcaagagaggctaggtatgacccctcgctgttggatgtccgcctctccccaaattatgtggtgtgccgagactgtgaagtcaccaatgatggacataccattcaggttatcctgaagtcaaaatcagttctttcgggaggaccattgcctcaagggcatgartttgaaytgtacgaagtgagatttcactggggaagagaaaaccagcgtggttctgagcacacggttaatttcaaagcttttcccatggaggtaagaataacaaatcatcttgtaaaaatcttgttttctgaataaagtattcagcgatttactgaaaatgatttagtttaaaagtagatgcatagctcttgaattttatcagtttatactaaaatttaaaa

SEQ ID NO: 1737 - DNA, 1581 bp, Homo sapiens
tggccccaacggccagagagagaagggggcggatcctcgcgtaccagacacgccccggtcgggtataaaattcgccaggcgctcgctccccaggccacagccgctccctcgctctgctggggcctccggacgcgcttcccacgcgggtctctggaacactcggtccgaacgcacgcctgcttgcactcacactgcggttcacacccggaggcgctctcgcactcacactgccgctcacgcgtgctcacactcccccacgcgcgctccgctccggctccagccccgcgcccmgcgaaggcgcaggcactgctgccgagagcgccgaggggccccgcggccttcccatggcggacctgagcttcatcgaagataccgtcgccttccccgagaaggaagaggatgaggaggaagaagaggagggtgtggagtggggctacgaggaaggtgttgagtggggtctggtgtttcctgatgctaatggggaataccagtctcctattaacctaaactcaagagaggctaggtatgacccctcgctgttggatgtccgcctctccccaaattatgtggtgtgccgagactgtgaagtcaccaatgatggacataccattcaggttatcctgaagtcaaaatcagttctttcgggaggaccattgcctcaagggcatgartttgaaytgtacgaagtgagatttcactggggaagagaaaaccagcgtggttctgagcacacggttaatttcaaagcttttcccatggagctccatctgatccactggaactccactctgtttggcagcattgatgaggctgtggggaagccgcacggaatcgccatcattgctctgtttgttcagataggaaaggaacatgttggcttgaaggctgtgactgaaatcctccaagatattcagtataaggggaagtccaaaacaataccttgctttaatcctaacactttattaccagaccctctgctgcgggattactgggtgtatgaaggctctctcaccatcccaccttgcagtgaaggtgtcacctggatattattccgataccctttaactatatcccagctacagatagaagaatttcgaaggctgaggacacatgttaagggggcagaacttgtggaaggctgtgatgggattttgggagacaactttcggcccactcagcctcttagtgacagagtcattagagctgcatttcagtagccaaagaggacaggaacaagtctgtcttcatgagggaggaagacaatggtcctataatgcccttggataagaaaaggaaacttttgagctgcaccttcagtttatcctcaaagcctgcgttgtttgtcttcatctaatccagctttgatggacatctgtgatggttgcctgtacacttgctgaaatgaaatattagaaatggctgtatattccaaagaaaccctatattatatatccacattactgctgctaggattcatagttgcacatactgtttattgcttatgtgtagaaggaatgaaactagtttccagagttgttattaatatgaatatatatcatgtgttaatattgagaaaggaaa

SEQ ID NO: 1738 - DNA, 2399 bp, Homo sapiens
cctggtctccgcactgctcactcccgcgcagtgaggttggcacagccaccgctctgtggctcgcttggttcccttagtcccgagcgctcgcccactgcagattcctttcccgtgcagacatggcctctggcaccaccaccaccgccgtgaagattggaataattggtggaacaggcctggatgatccagaaattttagaaggaagaactgaaaaatatgtggatactccatttggcaagccatctgatgccttaattttggggaagataaaaaatgttgattgcgtcctccttgcaaggcatggaaggcagcacaccatcatgccttcaaaggtcaactaccaggcgaacatctgggctttgaaggaagagggctgtacacatgtcatagtgaccacagcttgtggctccttgagggaggagattcagcccggcgatattgtcattattgatcagttcattgacaggaccactatgagacctcagtccttctatgatggaagtcattcttgtgccagaggagtgtgccatattccaatggctgagccgttttgccccaaaacgagagaggttcttatagagactgctaagaagctaggactccggtgccactcaaaggggacaatggtcacaatcgagggacctcgttttagctcccgggcagaaagcttcatgttccgyacctggggggcggatgttatcaacatgaccacagttccagaggtggttcttgctaaggaggctggaatttgttacgcaagtatcgccatggcgacagattatgactgctggaaggagcacgaggaagcagtttcggtggaccgggtcttaaagaccctgaaagaaaacgctaataaagccaaaagcttactgctcactaccatacctcagatagggtccacagaatggtcagaaaccctccataacctgaagaatatggcccagttttctgttttattaccaagacattaaagtagcatggctgcccaggagaaaagaagacattctaattccagtcattttgggaattcctgcttaacttgaaaaaaatatgggaaagacatgcagctttcatgcccttgcctatcaaagagtatgttgtaagaaagacaagacattgtgtgtattagagactcctgaatgatttagacaacttcaaaatacagaagaaaagcaaatgactagtaaacatgtgggaaaaaatattacattttaagggggaaaaaaaaamccaccattctcttctccccctattaaatttgcaacaataaagggtggagggtaatctctactttcctatactgccaaagaatgtgaggaagaaatgggactctttggttatttattgatgcgactgtaaattggtacagtatttctggagggcaatttggtaaaatgcatcaaaagacttaaaaatacggacgtmctttgtgctgggaactctacatctagcaatttctctttaaaaccatatcagagatgcatacaaagaattatatataaagaarggtgtttaataatgatagttataataataaataattgaaacaatctgaatcccttgcaattggaggtaaattatgtcttagttataattagattgtgaatcagccaactgaaaatcctttttgcatatttcaatgtcctaaaaagacacggttgctctatatatgaagtgaaaaaaggatatggtagcattttatagtactagttttgctttaaaatgctatgtaaatatacaaaaaaactagaaagaaatatatataaccttgttattgtatttgggggagggatactgggataatttttattttctttgaatctttctgtgtcttcacatttttctacagtgaatwtaatcaaatagtaaagttgytgtaaaaataaaagtggatttagaaagatccagttcttgaaaacactgtttctggtaatgaagcagaatttaagttggtaatattaaggtgaatgtcatttaagggagttacatctttattctgctaaagaagaggatcattgatttctgtacagtcagaacagtacttgggtktgcaacagctttctgagaaaagctaggtgtwtaatagtttaactgaaagtttaactatttaaaagactaaatgcacattttatggtatctgatattttaaaaagtaatgtkwgmttctcctttttatgagttaaattattttatacgagttggtaatttttgctttttaataaagtggaagcttgcttttttaactctttttttattgttattttatagaaatgctttttgttggccgggcacagttgctcatccatgtaatcccagcactgtgggaggccgagacgggtggatcacaaggtcaggagatcgagaccatcctggctaatgcgttgaaactccgtctctac

SEQ ID NO: 1739 - DNA, 336 bp, Homo sapiens
gaaagcttcatgttccgyacctggggggcggatgttatcaacatgaccacagttccagaggtggttcttgctaaggaggctggaatttgttacgcaagtatcgccatggcgacagattatgactgctggaaggagcacgaggaagcaatgatcaagttccagatgatcctcagtgagggataccatcctttcaatattcaagagtcacccttctacagaggactcctagacttcccatcagtgggacatggcagaggtgaaatcctgcccctgtctcccttagacctggctggatactgcttccaacaacccatgcagccaccctgccctgacagc

SEQ ID NO: 1740 - DNA, 1863 bp, Homo sapiens
gtcagcactggaggacctcagcagccatgttgaagccccatagtgaagccgggactgccttcattcagacccagcagctacatgcagccacggctsacacattcctggagcacatgtgccacctggacattcacacaccacccatcccagcctggaacactggcatcatctgtaccattagcccagcttcccaatcggtggagatgttgaaggagatgattaagtctggaacgaatgtggcttgtctgaacttctctcatggaactcatgagtaccacgtggagaccatcaagaacatgtgcacagccacggaaagctttgctgctgaccccatcctctaccggcctgttgctttggctctggatactaaaggacctgagatccgaactgggctcatcaaggrcagcagcaccatggaggtggggctgaagatgggagccactctcaaaatcatgctggataacacctacatgaaaaagtgtgacgagaacatcctgtggctggactacaagaacatctgcaaggtgatggaagtgggcagcaagatctacgtggatgatgggcttatttctctccaggtaaagcagaaaggtgctgacttcctggtgacggaggtggaaactggtggttcctcgggcagcaagaagggtgtgaaccttcctggggctgctgtggacttgcctgctgtgtcagaggacatccaggacctgaattttggggtcgagcaggatgtcgatatggtgtttgcgtcgttcatccgcaaggcatctgatgtccatgaagttagggaggccctgggagagaagggaaagaacatcaagacaatcaacacaatcgagaatcatgtgggggttcagaggtttgatgaaatcctagaggccagtgatgggatcatggtggctcgtggtaatccaggcattgagattcctgcagagaaggtcttccttgctcagaggatgatgattgggcgttgcagctgagctgggaagcctatctgtgacagtgatgtggccagtgcagtactgaatggagccgactgcatcatgctgtctggagaaacagccaaagyggactatctggaggctgggcgcatgcagcacctgattgcccatgaggcagaggccaccatctaccacttgcaattatttgaggaactcccacccactggcgcccattactagcgaccccacgaaagccaccgccgtgggtgccaacgaggcctccttcaagtgctgcagtggggccataatcgtcctcaccaagtctggcaggtctgctcaccaggtggctagataccgcccacgtgcccccatcattgctgtgacacggaatccccagacagctagtcaggcccacctgtaccgtggcatcttccctgtgctgtgcaaggacccagtccaggaggccagggctgaggatgtggaccgctgggtgaacttggccctgaatgttggcaaggcccgaggcttctttaagaagggagacatgtggtcattgtgctgaccgggtggcgccctggctctggcttcaccaacaccatgcgtgttgttcctgtgcggtgatggaccccaaagcccctgctccagcgcctgtcccacctcctttccccgaaccatccattaggccaacaacgcttgggccttagggcacaggrcagttcttccatttaagtactctggcctgacccttacttgcttccccaaacccctgggcctccccaatttgcgcctgtccccaccctccactcagctgtcctgcggcaaacactccaccctccaccttccattttcccccactactgcagcacctccgggcctgttgctatagagcctacctgtatatcaataaacaacagctgaagtt

SEQ ID NO: 1741 - DNA, 2105 bp, Homo sapiens
cagcttcgcacccggtgggcgtcacgtgacggactcagtagaccgccactggctgtgcacgttatggggtttccacctagggctcggcctgaggcttgtaacactccgttttcccccgagtcacaggggcagtcttgcccctcgcagctgggtcgcggtgtctctcaaaggtccccctctacaggggcttcgtgaggcccgggcccacagggcgctcggtcccggaagtgacgtctcccagaggggccggaagtggcagtggagggagggaagatggcggaggtgggggagataatcgagggctgccgcctacccgtgctgcggcggaaccaggacaacgaagatgagtggcccctggccgagatcctgagcgtgaaggacatcagtggccggaagcttttctacgtccattacattgacttcaacaaacgtctggatgaatgggtgacgcatgagcggctggacctaaagaagatccagttccccaagaaagaggccaagacccccactaagaacggacttcctgggtcccgtcctggctctccagagagagaggtgaaacggaaggtggaggtggtttcaccagcaactccagtgcccagcgagacagccccggcctcggtttttccccagaatggagccgcccgtagggcagtggcagcccagccaggacggaagcgaaaatcgaattgtttgggcactgatgaggactcccaggacagctctgatggaataccgtcagcaccacgcatgactggcagcctggtgtctgatcgaagccacgacgacatcgtcacccggatgaagaacattgagtgcattgagctgggccggcaccgcctcaagccgtggtacttctccccgtacccacaggaactcaccacattgcctgtcctctacctgtgcgagttctgcctcaagtacggccgtagtctcaagtgtcttcagcgtcatttgaccaagtgtgacctacgacatcctccaggcaatgagatttaccgcaagggcaccatctccttctttgagattgatggacgtaagaacaagagttattcccagaacctgtgtcttttggccaagtgtttccttgaccataagacactgtactatgacacagaccctttcctcttctacgtcatgacagagtatgactgtaagggcttccacatcgtgggctacttctccaaggagaaagaatcaacggaagactacaatgtggcctgcatcctaaccctgcctccctaccagcgccggggctacggcaagctgctgatcgagttcagctatgaactctccaaagtggaagggaaaacagggacccctgagaagcccctctcagaccttggcctcctatcctatcgaagctactggtcccagaccatcctggagatcctgatggggctgaagtcggagagcggggagaggccacagatcaccatcaatgagattagtgaaatcaccagcatcaagaaggaggatgtcatctccactctgcagtacctcaatctcatcaactactacaagggccagtacatcctcacactgtcagaggacatcgtggatggccatgagcgggccatgctcaagcggctcctgcggatcgamtccaagtgtctgcacttcactcccaaggactggagcaagagggggaagtggtgaccagacactgcccactgcagtgccaagacggcagcaggactggggctgatagcccaccccgcccccactgcagctcccacaaagcactctaaggcctcctctgaagcagggaccagagggagccaggcagctgtgtacagtgagaagggatccggatgggggagctctgtacagagggctggtgattgtaaaaatttcttttgtaaagtagaagttggggstggggtgggtgctggctgcaaaaatttctggcttctcttacccctattgcccccggcaataaattgtttctatatgccagagccatgcaaagttcttggtggggagggggaaagggcccatgctggcttaggggctctaaggcgcccagactcacaggtgctgtgaagagctcctttattggggtgatggaatcggttccaaagagctggtttactgctgtgaag

SEQ ID NO: 1742 - DNA, 2384 bp, Homo sapiens
cagcttcgcacccggtgggcgtcacgtgacggactcagtagaccgccactggctgtgcacgttatggggtttccacctagggctcggcctgaggcttgtaacactccgttttcccccgagtcacaggggcagtcttgcccctcgcagctgggtcgcggtgtctctcaaaggtccccctctacaggggcttcgtgaggcccgggcccacagggcgctcggtcccggaagtgacgtctcccagaggggccggaagtggcagtggagggagggaagatggcggaggtgggggagataatcgagggctgccgcctacccgtgctgcggcggaaccaggacaacgaagatgagtggcccctggccgagatcctgagcgtgaaggacatcagtggccggaagcttttctacgtccattacattgacttcaacaaacgtctggatgaatgggtgacgcatgagcggctggacctaaagaagatccagttccccaagaaagaggccaagacccccactaagaacggacttcctgggtcccgtcctggctctccagagagagaggtgccggcctcggcgcaggccagcgggaagaccttgccaatcccggtccagatcacactccgcttcaacctgcccaaggagcgggaggccattcccggtggcgagcctgaccagccgctctcctccagctcctgcctgcagcccaaccaccgctcaacgaaacggaaggtggaggtggtttcaccagcaactccagtgcccagcgagacagccccggcctcggtttttccccagaatggagccgcccgtagggcagtggcagcccagccaggacggaagcgaaaatcgaattgtttgggcactgatgaggactcccaggacagctctgatggaataccgtcagcaccacgcatgactggcagcctggtgtctgatcgaagccacgacgacatcgtcacccggatgaagaacattgagtgcattgagctgggccggcaccgcctcaagccgtggtacttctccccgtacccacaggaactcaccacattgcctgtcctctacctgtgcgagttctgcctcaagtacggccgtagtctcaagtgtcttcagcgtcatttgaccaagtgtgacctacgacatcctccaggcaatgagatttaccgcaagggcaccatctccttctttgagattgatggacgtaagaacaagagttattcccagaacctgtgtcttttggccaagtgtttccttgaccataagacactgtactatgacacagaccctttcctcttctacgtcatgacagagtatgactgtaagggcttccacatcgtgggctacttctccaaggagaaagaatcaacggaagactacaatgtggcctgcatcctaaccctgcctccctaccagcgccggggctacggcaagctgctgatcgagttcagctatgaactctccaaagtggaagggaaaacagggacccctgagaagcccctctcagaccttggcctcctatcctatcgaagctactggtcccagaccatcctggagatcctgatggggctgaagtcggagagcggggagaggccacagatcaccatcaatgagattagtgaaatcaccagcatcaagaaggaggatgtcatctccactctgcagtacctcaatctcatcaactactacaagggccagtacatcctcacactgtcagaggacatcgtggatggccatgagcgggccatgctcaagcggctcctgcggatcgamtccaagtgtctgcacttcactcccaaggactggagcaagagggggaagtggtgaccagacactgcccactgcagtgccaagacggcagcaggactggggctgatagcccaccccgcccccactgcagctcccacaaagcactctaagggagatggggctgaggacagctcaaaaaggagaggacaggcctggcaggggcccactggtgcccagcaccaaggcgagctccgggctcagaccaactccaaggtcagctggccacaggcccaggcctcctctgaagcagggaccagagggagccaggcagctgtgtacagtgagaagggatccggatgggggagctctgtacagagggctggtgattgtaaaaatttcttttgtaaagtagaagttggggstggggtgggtgctggctgcaaaaatttctggcttctcttacccctattgcccccggcaataaattgtttctatatgccagagccatgcaaagttcttggtggggagggggaaagggcccatgctggcttaggggctctaaggcgcccagactcacaggtgctgtgaagagctcctttattggggtgatggaatcggttccaaagagctggtttactgctgtgaag

SEQ ID NO: 1743 - DNA, 2261 bp, Homo sapiens
cagcttcgcacccggtgggcgtcacgtgacggactcagtagaccgccactggctgtgcacgttatggggtttccacctagggctcggcctgaggcttgtaacactccgttttcccccgagtcacaggggcagtcttgcccctcgcagctgggtcgcggtgtctctcaaaggtccccctctacaggggcttcgtgaggcccgggcccacagggcgctcggtcccggaagtgacgtctcccagaggggccggaagtggcagtggagggagggaagatggcggaggtgggggagataatcgagggctgccgcctacccgtgctgcggcggaaccaggacaacgaagatgagtggcccctggccgagatcctgagcgtgaaggacatcagtggccggaagcttttctacgtccattacattgacttcaacaaacgtctggatgaatgggtgacgcatgagcggctggacctaaagaagatccagttccccaagaaagaggccaagacccccactaagaacggacttcctgggtcccgtcctggctctccagagagagaggtgccggcctcggcgcaggccagcgggaagaccttgccaatcccggtccagatcacactccgcttcaacctgcccaaggagcgggaggccattcccggtggcgagcctgaccagccgctctcctccagctcctgcctgcagcccaaccaccgctcaacgaaacggaaggtggaggtggtttcaccagcaactccagtgcccagcgagacagccccggcctcggtttttccccagaatggagccgcccgtagggcagtggcagcccagccaggacggaagcgaaaatcgaattgtttgggcactgatgaggactcccaggacagctctgatggaataccgtcagcaccacgcatgactggcagcctggtgtctgatcgaagccacgacgacatcgtcacccggatgaagaacattgagtgcattgagctgggccggcaccgcctcaagccgtggtacttctccccgtacccacaggaactcaccacattgcctgtcctctacctgtgcgagttctgcctcaagtacggccgtagtctcaagtgtcttcagcgtcatttgaccaagtgtgacctacgacatcctccaggcaatgagatttaccgcaagggcaccatctccttctttgagattgatggacgtaagaacaagagttattcccagaacctgtgtcttttggccaagtgtttccttgaccataagacactgtactatgacacagaccctttcctcttctacgtcatgacagagtatgactgtaagggcttccacatcgtgggctacttctccaaggagaaagaatcaacggaagactacaatgtggcctgcatcctaaccctgcctccctaccagcgccggggctacggcaagctgctgatcgagttcagctatgaactctccaaagtggaagggaaaacagggacccctgagaagcccctctcagaccttggcctcctatcctatcgaagctactggtcccagaccatcctggagatcctgatggggctgaagtcggagagcggggagaggccacagatcaccatcaatgagattagtgaaatcaccagcatcaagaaggaggatgtcatctccactctgcagtacctcaatctcatcaactactacaagggccagtacatcctcacactgtcagaggacatcgtggatggccatgagcgggccatgctcaagcggctcctgcggatcgamtccaagtgtctgcacttcactcccaaggactggagcaagagggggaagtggtgaccagacactgcccactgcagtgccaagacggcagcaggactggggctgatagcccaccccgcccccactgcagctcccacaaagcactctaaggcctcctctgaagcagggaccagagggagccaggcagctgtgtacagtgagaagggatccggatgggggagctctgtacagagggctggtgattgtaaaaatttcttttgtaaagtagaagttggggstggggtgggtgctggctgcaaaaatttctggcttctcttacccctattgcccccggcaataaattgtttctatatgccagagccatgcaaagttcttggtggggagggggaaagggcccatgctggcttaggggctctaaggcgcccagactcacaggtgctgtgaagagctcctttattggggtgatggaatcggttccaaagagctggtttactgctgtgaag

SEQ ID NO: 1744 - DNA, 1580 bp, Homo sapiens
agaggattaaagattagctatgacacatggcttggaaattaacctttaaccaaacatcttataagtaacgccagcgcagcttcccttgtgaatgtaaagagatccagggctcttggagagggacaagtgagagccagccaaaaaggaaaaagcaaaggcagaaacggcatcaggagagacagagatgtgaaggagggaaggagcaggagagcaggaaggaaacgcaggaggagggagcagcatctcctgtgaacacagaggagcacctgtttgctgttaaaatcgatctccctcggcaccctgagcaatggatataatatttggcaggaataggaaagaacagctggagcctgtgagggccaaagtgacaggcaagattccagcatggctgcagggaaccctgctccgcaaygggcctgggatgcacacagttggggagtccagatacaaccattggttcgacggccttgccctgctccacagcttcaccatcagagacggtgaagtctattacaggagcaaatacctgagaagcgatacctacaacaccaatattgaggcaaacaggattgtggtgtctgagtttggaacaatggcctatccggacccctgcaaaaacatattttccaaagctttctcctacttgtctcacaccatccccgatttcacmgacaactgcctgatcaacatcatgaagtgcggagaagacttctacgcgacctcagagaccaattacatcaggaaaatcaacccacagactctggaaaccctggagaaggttgattatcgtaaatacgtggcggtaaatctggcaacgtcacatccccattatgatgaggctggaaatgttctaaacatgggcacatccattgtggaaaaggggaagacaaagtatgtgatttttaagatccctgccacagtaccagagggcaagaagcaggggaagagcccctggaagcacacagaggtgttctgctccatcccrtcccgctccctgctctccccaagctactmccacagctttggagtcaccgagaactatgtcatcttccttgagcagcctttcaggttggatattctcaagatggcaaccgcatacatccggagwatgagctgggcctcctgcctggctttccacagggaggagaagacttatatccacatcatcgaccaaaggaccaggcagcctgtgcagaccaagttttacacagacgccatggtggtcttccatcacgtcaacgcctacgaagaggacggctgcatcgtgtttgacgtcattgcctacgaggacaacagcctctaccagctcttctacctggccaacctgaaccaggacttcaaggagaactccaggctcacctcggtccccaccctcaggaggtttgccgtgcccctccacgtggacaaggtaatggcttccaaggaggtcccttttctttctagagagatatcggcycaggtgggaagttactttggcccttatttgattgacattgaaatccaaatgaactgttcttgaaaaaaaaaaaagttttcattgtttttcccaaagtagtaccgattcataataaaaactttag

SEQ ID NO: 1745 - DNA, 2516 bp, Homo sapiens
agaggattaaagattagctatgacacatggcttggaaattaacctttaaccaaacatcttataagtaacgccagcgcagcttcccttgtgaatgtaaagagatccagggctcttggagagggacaagtgagagccagccaaaaaggaaaaagcaaaggcagaaacggcatcaggagagacagagatgtgaaggagggaaggagcaggagagcaggaaggaaacgcaggaggagggagcagcatctcctgtgaacacagaggagcacctgtttgctgttaaaatcgatctccctcggcaccctgagcaatggatataatatttggcaggaataggaaagaacagctggagcctgtgagggccaaagtgacaggcaagattccagcatggctgcagggaaccctgctccgcaaygggcctgggatgcacacagttggggagtccagatacaaccattggttcgacggccttgccctgctccacagcttcaccatcagagacggtgaagtctattacaggagcaaatacctgagaagcgatacctacaacaccaatattgaggcaaacaggattgtggtgtctgagtttggaacaatggcctatccggacccctgcaaaaacatattttccaaagctttctcctacttgtctcacaccatccccgatttcacmgacaactgcctgatcaacatcatgaagtgcggagaagacttctacgcgacctcagagaccaattacatcaggaaaatcaacccacagactctggaaaccctggagaaggttgattatcgtaaatacgtggcggtaaatctggcaacgtcacatccccattatgatgaggctggaaatgttctaaacatgggcacatccattgtggaaaaggggaagacaaagtatgtgatttttaagatccctgccacagtaccagagggcaagaagcaggggaagagcccctggaagcacacagaggtgttctgctccatcccrtcccgctccctgctctccccaagctactmccacagctttggagtcaccgagaactatgtcatcttccttgagcagcctttcaggttggatattctcaagatggcaaccgcatacatccggagwatgagctgggcctcctgcctggctttccacagggaggagaagacttatatccacatcatcgaccaaaggaccaggcagcctgtgcagaccaagttttacacagacgccatggtggtcttccatcacgtcaacgcctacgaagaggacggctgcatcgtgtttgacgtcattgcctacgaggacaacagcctctaccagctcttctacctggccaacctgaaccaggacttcaaggagaactccaggctcacctcggtccccaccctcaggaggtttgccgtgcccctccacgtggacaagaatgcagaagtgggcacaaatttaatcaaagtggyatctacaacagccacggccctgaargaagaagatggccaagtctactgccagccggaatttctttatgaaggcttagagcttccacgggtcaattatgctcacaatggaaagcaataccgatatgtctttgctacaggagttcagtggagtccaatcccaaccaagataataaaatatgacattctcacaaagtcatccttaaaatggagagaggacgactgctggccagcggaacccctgtttgtgcccgcgccaggtgccaaggatgaggatgacggagtaatcttatcagccattgtctctactgatccccaaaagctgccttttctgctcattctggatgccaaaagctttacggaattggcccgtgcctctgttgatgtcgatatgcacatggatctccatggattattcattacagacatggactgggacacaaaaaagcaggccgcttctgaggaacagcgggacagggcttccgactgccacggggctcctctgacctgatggtgttggggtttgggtaggggaggggagctcggctgtcagaactccatggatatgtttctttggatggaggggagggcctttgttaccttttgcacttattctttctgtgggtgctttgacaagggcatggcaagagagmttgtcagtatcatttctttcattttattttggctgtaaaaattttgtttgaaagtcaaacatttgaacatcaaatatgtattgattagatccagtccttctaagaaacctcctttcctttaacaaaaagaccttgaccatgaatcagagattgtattcaatgacattatcatcatttttagaacgagccactaacctattagagaagaggcagataattatttatcattgtgccttcctctgtctctttctctttcctttgctccctcccatgtttctggtggactaaattgtgtatctgggagttctcactttctagccaggcctgatgagttaagttacatgaccaggaaggttatgccactttgtggtcattccatgcaagtcatggcgtaatataaaataataaaaactttaaagtctg

SEQ ID NO: 1746 - DNA, 1241 bp, Homo sapiens
gcagtgcgcaggcgtgagcggtcgggccccgacgcgcgcgggtctcgtttggagcgggagtgagttcctgagcgagtggacccggcagcgggcgataggggggccaggtgcctccacagtyagccatggcagcgctgcgctacgcggggctggacgacacggacagtgaggacgagctgcctccgggctgggaggagagaaccaccaaggacggctgggtttactacgccaatcacaccgaggagaagactcagtgggaacatccaaaaactggaaaaagaaaacgagtggcaggagatttgccatacggatgggaacaagaaactgatgagaacggacaagtgttttttgttgaccatataaataaaagaaccacctacttggacccaagactggcgtttactgtggatgataatcygaccaagccaaccacccggcaaagatacgacggcagcaccactgccatggaaattctscagggccgggatttcactggcaaagtggttgtggtcactggagctaattcaggaatagggttcgaaaccgccaagtcttttgccctccatggtgcacatgtgaycttggcctgcaggaacatggcaagggcgagtgaagcagtgtcacgcattttagaagaatggcataaagccaaggtagaarcaatgaccctggacctcgctctgctccgtagcgtgcagcattttgctgaagcattcaaggccaagaatgtgcctcttcatgtgcttgtgtgcaacgcagcaacttttgctstaccctggagtctcaccaaagatggcctggagaccacctttcaagtgaatcatctggggcacttctaccttgtccagctcctccaggatgttttgtgccgctcagctcctgcccgtgtcattgtggtctcctcagagtcccatcgatttacagatattaacgactccttgggaaaastggacttcagtygcctctctscaacaaaaaacgactattgggcgatgctggcttataacaggtcsaagctctgcaacatcctcttctccaacgagctgcaccgtcgcctctccccacrcggggtcacgtcgaacgcagtgcatcctggaaatatgatgtactccaacattcatcgcagctggtgggtgtacacactgctgtttaccttggcgaggcctttcaccaagtccatggtttcagactgcctggtagaaggaggtcacttctgattgtcagtgactttggtgagttct

SEQ ID NO: 1747 - DNA, 1062 bp, Homo sapiens
gcagtgcgcaggcgtgagcggtcgggccccgacgcgcgcgggtctcgtttggagcgggagtgagttcctgagcgagtggacccggcagcgggcgataggggggccaggtgcctccacagtyagccatggcagcgctgcgctacgcggggctggacgacacggacagtgaggacgagctgcctccgggctgggaggagagaaccaccaaggacggctgggtttactacgccaatcacaccgaggagaagactcagtgggaacatccaaaaactggaaaaagaaaacgagtggcaggagatttgccatacggatgggaacaagaaactgatgagaacggacaagtgttttttgttgaggttcgaaaccgccaagtcttttgccctccatggtgcacatgtgaycttggcctgcaggaacatggcaagggcgagtgaagcagtgtcacgcattttagaagaatggcataaagccaaggtagaarcaatgaccctggacctcgctctgctccgtagcgtgcagcattttgctgaagcattcaaggccaagaatgtgcctcttcatgtgcttgtgtgcaacgcagcaacttttgctstaccctggagtctcaccaaagatggcctggagaccacctttcaagtgaatcatctggggcacttctaccttgtccagctcctccaggatgttttgtgccgctcagctcctgcccgtgtcattgtggtctcctcagagtcccatcgatttacagatattaacgactccttgggaaaastggacttcagtygcctctctscaacaaaaaacgactattgggcgatgctggcttataacaggtcsaagctctgcaacatcctcttctccaacgagctgcaccgtcgcctctccccacrcggggtcacgtcgaacgcagtgcatcctggaaatatgatgtactccaacattcatcgcagctggtgggtgtacacactgctgtttaccttggcgaggcctttcaccaagtccatggtttcagactgcctggtagaaggaggtcacttctgattgtcagtgactttggtgagttct

SEQ ID NO: 1748 - DNA, 3622 bp, Homo sapiens
gactatcagcgtttaggtttaggaaccataagtggcagctcttcccgttcaagacccgagtattttagaattactgcctccaacaggatgtattcactctgccggagctatcctggccttttagtcgtacctcaagctgtacaggacagtagtttaccaagagtagctcgctgctatcgacacaatcgcctgcctgttgtatgttggaagaactcaagaagtggtactctgctcctccgatctggaggattccatgggaagggagtcgttggtcttttcaaatctcagaactcccctsaggccgctcctacctcctctttagaatcttccagtagcatagaacaagagaaatacttgcaagccttactgaatgctgtttctgtccatcagaaactcagaggcaacagcactcttactgtcaggccagcctttgctctatctccagggactgaaaggaggacttcaagaatgtccactgtgcttaagcaggtagtgccaggacatttggatgtaaacccatccaatagctttgctcaaggaggtgtgtgggcaagtcttcgctctagcactcgcttgatcagctctccaacatccttcattgatgttggcgcccggctggcaggcaaggatcactcggcctccttcagtaacagcagctacctacaaaaccagctcttgaaacrgcaagcagccctttacatatttggtgaaaagtcgcaactaaggaacttcaaggtagaatttgctttaaattgtgagtttgttcctgttgaatttcatgaaatccggcaagtgaaagccagttttaagaagctgatgagggcttgtatcccaagcaccatccctactgactcagaagtgaccttcctgaaagcgctgggagattctgagtggttcccacagcttcacaggataatgcagctggctgtggttgtatcagaagtacttgagaatggttcctcagttttggtctgtttggaggaaggctgggacatcactgcacaagtgacatccctggttcagttactcagtgatcccttttataggacacttgaaggcttccagatgttggttgaaaaagagtggctctcttttggtcacaaattcagtcagaggagcagcttgaccctcaactgtcaggggagtggttttgctccagtcttcttacagttcttagactgtgtacaccaggttcacaaccagtatccaactgagtttgaattcaatctctattacttaaagttcttggctttccactatgtgtctaatcgctttaaaacatttctcctggattcagactatgaaagattagagcacggaactttatttgatgataaaggagaaaagcatgccaaaaaaggagtctgtatttgggaatgtattgacagaatgcacaagaggagtcccattttctttaattatttatattcaccattggaaatagaggctytaaagcccaatgtaaacgtctctagcctcaagaagtgggattactacatagaagagaccctgtccacaggcccttcctatgactggatgatgctaacccccaagcacttcccctccgaagactctgacctggctggagaagctgggccacggagccagaggagaacagtgtggccatgctatgatgatgtcagctgtactcagcctgatgctctcaccagccttttcagtgaaattgaaaaattggagcacaaattgaaccaagcccctgagaagtggcagcagctgtgggaaagggtaaccgtggaccttaaagaagaaccaagaacagatcgctcccaaagacacctgtcgagatccccaggaattgtgtctaccaacctaccttcctatcagaagaggtctctgctacatctcccagacagcagcatgggggaggaacagaattccagcatctccccatccaatggagtggagcgaagagcagccacgctctatagccagtatacatccaagaatgatgaaaacaggtcctttgagggaacactttataaaagaggggctttgctgaaaggttggaagccccgttggtttgttttggatgtaacaaaacatcagctgcgctactatgactcaggtgaggacacaagctgtaaaggccacattgatctggctgaagtagaaatggtcatccctgctggccccagcatgggagccccaaagcacacaagtgacaaggctttctttgatatctttactctccaccaggttcagggagaagttcctccccatttcccttgggcctctattcccaaggggaactcagaagaaagcaggagtccctggcctcatccaagcctaagagttgaacaacagatgcctggtccctacggaaagcccccaactctggcctcagcagatccacctcctcactccccacaggcgattcatctccccatctctgagctgccagatggaacccacgtgcagagtggctgcaacatggagaatgggttggagggacacaagaggggcagtggagagaccacttcagagccaaggccagcgcccttggatggccaagtacatgtaccttatggatcttattcaaccctagttgaggatggcagggggttcagtggtgatgatgactcacactcaggtgtatatggcatctgtggggacctgtgtgcaagtacatgcaggcacgtgctctctgaggaggtagctatgactcagtggcacgcggcatctgtgggtatctgtgtggatatgtgtctgagtgcaggcatgagcataggcgcttgctccccagggggtgcacacacgagaccaggcccagaggtacagggctgtggccttcgagctgccagcccaatccatttttctaccataccaaaaaccccttctttttcagccctcatgaccacgtcttcctccaacatcccagccccggtcgtaggctcggcaagcccgctccagggcccacttcccatctcggcggccgcagacccgctgcctccccatcggcgcggccccatcttcacctctgagctccttgcccctctctccctggctgtctctgtccttatctgtcccaagtctatctttgtctcttctcgagccgggctgtctgcagcagaggcttcaccagagtggagatttgccagctacctgcctttgcaggacacctcagaagttacagacttgcctgtggaaatgcagagagcacctgaggtatttcccggactctccagtagtagccttgaatggctgaccaaccgcagtcacctgccagatcttctcagaaccggccagcccaccagcgacaggcccattaagtggcctggcccagcccagatggaaaaccccctccacctaactgcagtgaggtgtacagggccatggggctctgggatgaactcttccacctctacaccttgtaaacaaggattccagacacaccctccaaatgggaatggagacacacgtttggcagagttggacagtaacgctgctctcctatcagcctggactttgaggggagtggaaaacatgagtgtggaggtgcagcagtcctggtatcccctgaaaccagcctgtgggggaacagtcttcccaggggagctgctcaggatcgtcctggtccatgcatcaggaagaaaagggaacc

SEQ ID NO: 1749 - DNA, 2503 bp, Homo sapiens
gcccagacacctgctcactcaccaccagctgggctccgcctgggcctgcccggcacccaccccggccaccaagggcagcagcttttccagaatttggctggcaggccyagtcaccccacctcgccacctcaccactgcacctcggaggccagccctgtccactccactctgtgcctggcttctcttgcctgccttgggccttcgtgtggcccctccacggtgtctgggactgagtgcccctcttgcctcctgaagagcagccatggccacctacaaagtcagggtggccacaggcaccgacctyttgtcgggaacacgggactccatctcactgaccattgtggggacacaaggagagagccataagcagctgctgaaccactttgggagagactttgcaactggggcggtgggccagtacaccgtgcagtgccctcaggacctgggtgagctcatcatcatccgcctgcacaaagagcggtacgccttcttccccaaggacccttggtactgcaactatgtgcagatctgtgcccccaacrgccgtatctaccacttccccgcctaccagtggatggatggctacgagaccctggcactccgggaggccacaggaaagacaacagcagatgactcgctccccgtcctcctggagcacagaaaagaggagatcagagccaagcaggacttctaccactggcgagtctttcttcctggcctgcccagctatgtgcacattcccagttaccgccctccggtgcggaggcatcgcaaccccaaccggcctgagtggaatggctatattccgggattcccaattctcatcaactttaaggccaccaagttcctgaacttaaatctccgctactccttcctcaagacggcctccttcttcgtccgcctggggcccatggcactggctttcaaagtccgcggcctgttggactgcaaacattcgtggaagaggctgaaggacattaggaaaattttccctggcaagaaatctgtcgtctccgagtacgtggccgagcactgggcagaggacaccttctttgggtaccagtacctcaacggcgtcaaccccggcctgatccgccgctgcacgcggatcccagacaagttccccgtcacagacgacatggtggctccgttcctgggcgagggaacgtgcttgcaagcggagctggagaaggggaacatttacctggccgactaccgcatcatggagggcatccccaccgtggagctcagcggccggaagcagcaccactgcgcccccctctgcctgctgcactttggacccgagggcaagatgatgcccatcgccatccagctcagccagacccctgggccagattgccccatcttcctgcccagtgattctgagtgggactggctgctagccaagacgtgggtacgctatgcggagttctacagccacgaggccatcgcccacctgctggagacacacctcattgctgaggccttctgcctggccttgctgaggaacctgcccatgtgccaccccctctacaagcycctcatcccccatacccgatacaccgtccagatcaacagcattggccgggccgttctcctcaatgagggggggctctctgccaagggcatgtccctgggcgtggaaggctttgctggggtgatggtacgggctctgtcggagctcacctatgacagcctctacctccccaatgactttgtggagcgtggggtccaggacctgcctggatattactaccgcgatgacagcttggcggtgtggaatgcactggagaagtatgtgacggagatcatcacctattattacccgagtgacgcagccgtggagggtgatccggaattgcagtcttgggtgcaggaaatatttaaagagtgcctcctggggcgggagagctcaggcttccctaggtgcttgcgaaccgtgcctgagctgatccgatatgtcactatagtcatctacacctgctctgccaagcamgctgctgtcaacacaggccagatggagttcaccgcctggatgcccaacttcccagcgtccatgcggaatccaccgattcagactaaggggctgaccactctggagaccttcatggacacgttgccggatgtgaagaccacgtgcatcacgctgctggtgctctggaccctcagccgagagcctgacgacaggcggcccctgggacacttcccggacattcacttcgtggaggaggccccgcggaggagcatagaggcgttccgccagcgcctgaaccagatctcacacgacatccgccagcgcaacaagtgccttcccatcccctactactacctggacccggtgctgattgagaacagcatttctatttaggagcgcgcttcccgtctctcctctccccattctgtgccctactattttcaacaaaacaaaacaaacaagcaaaaaacacaaaaacctcagagaccaaaacaccaaacaaacaaaaaaacaaaaaaccttcctttc

SEQ ID NO: 1750 - DNA, 1398 bp, Homo sapiens
cagcggcggcccaggaggcagccggtgagcgcctgcgagcagagtggcgggggccgctgacaggtcccgcgcagcccagcccagcccagccacgcggctcacaggtggggtccaagagcagtttggagcaacccggcgctacggagaggggtggacggctctgcacgggcctcctgtctcccgctcgggcagagggactcggggggacctcgctccttggctgagagaacctgaactcgggcggagagaacgcgcccaggcgggcaaggggaccagagaaagccggggctggaagtcactgtcgctcgccactgtctggagcgcacggagcgcagaggcccggcagccgcgcgtgccctcmcggggaccgagccagtgatgcaggatcgctgagcggagatccgcgccgagaagtctctcggggccggggctgagacgcacgccttcgacaccgctgccaagaccccgattccggcgactcttgcggggaaccgaggggccaaggctgccccaagctcaggacttgggcgagtctaagacgatggtttcttaagcwcggacccgcgttccccttcccgcyccctcgactggaggcagggatcctgcgcggggcccccgggattccgtttccccgcggagccccggccgctgcctcccgggacagttcgcacggccacaggggcgcacggcgatgtggcctccgtccagcgcgctggcccgccggggggatgctctggcacctgtcggggtccaggcctagcatggccggcgcgttgcccgacgtcgcctccggctaggatggcccctccgggcccggccagtgccctctccacctcggccgagccgctgtcccgcagcatcttccggaagttcttgctgatgctctgctccctgctcacgtccctttacgtcttctactgcctggccgagcgctgccagaccctgtccggccccgtcgtggggctgtccggcggcggcgaggaggcgggggcccctggtggcggcgtcctggccggaggcccgagggagctggcggtgtggccggcggcggcacagagaaagcgcctcctgcaactgccgcagtggcggaggcgccggccgcccgcgccccgcgacgacggcgaggaggcggcctgggaagaagagtcccctggcctgtcagggggtccgggcggctccggggccggaagcaccgtggccgaggccccgccggggaccctggcgctgctcctggacgaaggcagcaagcagctgccgcaggccatcatcatcggagtgaagaagggcggcacgcgggcgctgctggagttcctgcgcgtgcaccccgacgtgcgcgccgtgggcgccgagccccacttcttcgaccgcagctacgacaagggcctcgcctggtaccgg

SEQ ID NO: 1751 - DNA, 2462 bp, Homo sapiens
cagcggcggcccaggaggcagccggtgagcgcctgcgagcagagtggcgggggccgctgacaggtcccgcgcagcccagcccagcccagccacgcggctcacaggtggggtccaagagcagtttggagcaacccggcgctacggagaggggtggacggctctgcacgggcctcctgtctcccgctcgggcagagggactcggggggacctcgctccttggctgagagaacctgaactcgggcggagagaacgcgcccaggcgggcaaggggaccagagaaagccggggctggaagtcactgtcgctcgccactgtctggagcgcacggagcgcagaggcccggcagccgcgcgtgccctcmcggggaccgagccagtgatgcaggatcgctgagcggagatccgcgccgagaagtctctcggggccggggctgagacgcacgccttcgacaccgctgccaagaccccgattccggcgactcttgcggggaaccgaggggccaaggctgccccaagctcaggacttgggcgagtctaagacgatggtttcttaagcwcggacccgcgttccccttcccgcyccctcgactggaggcagggatcctgcgcggggcccccgggattccgtttccccgcggagccccggccgctgcctcccgggacagttcgcacggccacaggggcgcacggcgatgtggcctccgtccagcgcgctggcccgccggggggatgctctggcacctgtcggggtccaggcctagcatggccggcgcgttgcccgacgtcgcctccggctaggatggcccctccgggcccggccagtgccctctccacctcggccgagccgctgtcccgcagcatcttccggaagttcttgctgatgctctgctccctgctcacgtccctttacgtcttctactgcctggccgagcgctgccagaccctgtccggccccgtcgtggggctgtccggcggcggcgaggaggcgggggcccctggtggcggcgtcctggccggaggcccgagggagctggcggtgtggccggcggcggcacagagaaagcgcctcctgcaactgccgcagtggcggaggcgccggccgcccgcgccccgcgacgacggcgaggaggcggcctgggaagaagagtcccctggcctgtcagggggtccgggcggctccggggccggaagcaccgtggccgaggccccgccggggaccctggcgctgctcctggacgaaggcagcaagcagctgccgcaggccatcatcatcggagtgaagaagggcggcacgcgggcgctgctggagttcctgcgcgtgcaccccgacgtgcgcgccgtgggcgccgagccccacttcttcgaccgcagctacgacaagggcctcgcctggtaccgggacctgatgcccagaaccctggacgggcagatcaccatggagaagacgcccagttacttcgtcacgcgggaggccccygcgcgcatctcggccatgtccaaggacaccaagctcatcgtggtggtgcgggacccggtgaccagggccatctcggactacacgcagacgctgtccaagcggcccgacatccccaccttcgagagcttracgttcaaaaacaggacagcgggcctcatcgacacgtcgtggarcgccatccagatcggcatctacgccaagcacctggagcactggctgcgccacttccccatccgccagatgctcttcgtgagcggcgagcggctcatcagcgacccggccggggagctgggccgcgtgcaagacttcctgggcctcaagaggatcatcacggacaagcacttctacttcaacaagaccaagggcttcccctgcctgaagaaggcggagggcagcagccggccccattgcctgggcaagaccaagggcaggacccatccwgagatcgaccgcgaggtggtgcgcaggctgcgcgagttctaccggcctttcaacctcaagttctaccagatgaccgggcacgactttggctgggatggataacccaatcggtagagaagagacagtttaatatttgtgctgaaaatatgtttcagtatttttttcaatgaatgttaagagattgttctcactcccgccccatcttaatgtataaccaacaccaaacacgtggawcaacagaaaaggaaaatttcactcgtctaaacactttcaattttcagtttttattttatgttctatatacccagtcataaagtataagcatcagttgtcattaaaagttttcagaaaatcttgaggttaaacatctctctctctttttttaaaatacaaggccctgataaaattgatatctatccttatatttttctccctttttcccgtgccactttttcttaaattatttcccagttagtattatcatatgtttgtacccgtcacagttttcatagtgctttcaaatacacctttttgatcattaaaat

SEQ ID NO: 1752 - DNA, 7138 bp, Homo sapiens
tctgtgtatagaggatgtgctgaatggtgcgctttgaggcggcggcggcggaggagcagaatccgccgcgactggcagcctcggctgaccggctcggcttctcttcgccttccgaggctcctcatccaccgcgggctccagacctcgcgtcccgcccggggcatggccgggcgctgcgcccccgcgcgctctgcctgctgagcggcgccggagggaggtgcggaggccgggaggccggggaggccggcggggagcagagtcgagcgcctccggagcagagaaaggagcccgcgccccgcgccccgcgccccgcgcacggtccccagtccctgccgcgctcgcccgggccgcccggagcccagatgagcccagatggccggggctcaacccggagtgcacgccttgcaactcaagcccgtgtgcgtgtccgacagcctcaagaagggcaccaaattcgtcaagtgggatgatgactcaactattgttactccaattattttgaggactgaccctcagggatttttcttttactggacagatcaaaacaaggagacagagctactggatctcagccttgtcaaagatgccagatgtgggagacacgccaaagctcccaaggaccccaaattacgtgaacttttggatgtggggaacatcgggcgcctggagcagcgcatgatcacagtggtgtatgggcctgacctcgtgaacatctcccatttgaatctcgtggctttccaagaagaagtggccaaggaatggacaaatgaggttttcagtttggcaacaaacctgctggcccaaaacatgtccagggatgcatttctggaaaaagcctatactaaacttaagctgcaagtcactccagaagggcgtattcctctcaaaaacatatatcgcttgttttcagcagatcggaagcgagttgaaactgctttagaggcttgtagtcttccatcttcaaggaatgattcaatacctcaagaagatttcactccagaagtgtacagagttttcctcaacaacctttgccctcgacctgaaattgataacatcttttcagaatttggtgcaaaaagcaaaccatatcttaccgttgatcagatgatggattttatcaaccttaagcagcgagatcctcggcttaatgaaatactttatccacctctaaaacaagagcaagtccaagtattgattgagaagtatgaacccaacaacagcctcgccagaaaaggacaaatatcagtggatgggttcatgcgctatctgagtggagaagaaaacggagtcgtttcrcctgagaaactggatttgaatgaagacatgtctcagcccctttctcactatttcattaattcctcgcacaacacctacctcacagctggccaactggctggaaactcctctgttgagatgtatcgccaagtgctcctgtctggttgtcgctgtgtggagctggactgctggaagggacggactgcagaagaggaacctgtcatcacccatggcttcaccatgacaactgaaatatctttcaaggaagtgatagaagcaattgcggagtgtgcatttaagacttcaccttttccaattctcctttcgtttgagaaccatgtggattccccaaagcagcaagccaagatggcggagtactgccgactgatctttggggatgcccttctcatggagcccctggaaaaatatccactggaatctggagttcctcttccaagccctatggatttaatgtataaaattttggtgaaaaataagaagaaatcacacaagtcatcagaaggaagcggcaaaaagaagctctcagaacaagcctccaacacctacagtgactcctccagcatgttcgagccctcatccccaggagccggagaagctgatacggaaagtgacgacgacgatgatgatgatgactgtaaaaaatcttcaatggatgaggggactgctggaagtgaggctatggccacagaagaaatgtctaatctggtgaactatattcagccagtcaagtttgagtcatttgaaatttcaaaaaaaagaaataaaagttttgaaatgtcttccttcgtggaaaccaaaggacttgaacaactcaccaagtctccagtggaatttgtagaatataacaaaatgcagcttagcaggatatatccaaaaggaacacgtgtggattcatccaactatatgcctcagctcttctggaatgcaggttgtcagatggtggcacttaatttccagacaatggacctggctatgcaaataaatatggggatgtatgaatacaacgggaagagtggctacagattgaagccagagttcatgaggaggcctgacaagcattttgatccatttactgaaggcatcgtagatgggatagtggcaaacactttgtctgttaagattatttcaggtcagtttctttctgataagaaagttggracttacgtggaagtagatatgtttggtttgcctgtggatacaagraggaaggcatttaagaccaaaacatcccaaggaaatgctgtgaatcctgtctgggaagaagaacctattgtgttcaaaaaggtggttcttcctactctggcctgtttgagaatagcagtttatgaagaaggaggtaaattcattggccaccgtatcttgccagtgcaagccattcggccaggctatcactatatctgtctaaggaatgaaaggaaccagcctctgacgctgcctgctgtctttgtctacatagaagtgaaagactatgtgccagacacatatgcagatgtcatcgaagctttatcaaacccaatccgatatgtgaacctgatggaacagagagctaagcaattggctgctttgacactggaagatgaagaagaagtaaagaaagaggctgatcctggagaaacaccatcagaggctccaagtgaagcragaacgactccagcagaaaatggggtgaatcacactacaaccctgacacccaagccaccctcccaggctctccacagccagccagctccaggttctgtaaaggcacctgccaaaacagaagatcttattcagagtgtcttaacagaagtggaagcacagaccatcgaagaactaaagcaacagaaatcgtttgtgaaacttcaaaagaaacactacaaagaaatgaaagacctggttaagagacaccacaagaaaaccactgaccttatcaaagarcacactaccaagtataatgaaattcagaatgactacttgagaaggagagccgctttggaaaagtccgccaaaaaggacagtaagaaaaaatcggaacccagcagccctgatcatggttcatcaacgattgagcaagacctcgctgcyctggatgctgaaatgacccaaaagttaatagacttgaaggacaaacaacagcagcagctgcttaatcttcggcaagaacagtattatagtgaaaaataccagaagcgagaacatattaaactgcttattcaaaagttgacggatgtcgcagaagagtgtcagaacaatcagttaaagaagctcaaagaaatctgtgagaaagaaaagaaagaaytaaagaagaaaatggataaaaagaggcaggagaagataacagaagctaaatccaaagacaaaagtcagatggaagaggagaagacagagatgatccggtcatatatccaggaagtggtgcagtatatcaagaggytagaagaagcgcaaagtaaacggcaagaaaaactcgtagagaaacacaaggaaatacgtcagcagatcctggatgaaaagcccaagggggaaggttcctcctcattcttgtcggaaacttgccatgaggatccctctgtttcccccaactttactccccccaaccctcaagctctcaagtggtgaccaccgtccttccggccagctgcaggtggagctggagcaagaataccaagacaaattcaaaagactgcccctcgagattttggaattcgtgcaggaagccatgaaaggaaagatcagtgaagacagcaatcacggttctgcccctctctccctgtcctcagaccctggaaaagtgaaccacaagactccctccagtgaggagctgggaggagacatcccaggaaaagaatttgatactcctctgtgaatgctcctgccaggccttcagaaattgcatggccactccagcgtcatcggactctctcttattacaaagatcactgcccaggaccatcttcccgagragcatcccttagcctaaaatccacaccaaagggagagttccagaggaatccatgaagaattcccatgcccaggctccatgtgtcatgtggaaacctccacaggtctgctagtgaagaatgcatgtatgtgagatttttgttttctttccaatagcaaattcaaagcaagcaacttgcaggctccatggaacttttaatgaaggacagtgtcttctttgaagaaaatcaagctcgtgtttttattcgaagctctggtgtaaaatatttcaaagtcatagaaatagtttgagaaatgcatagcattatttaacactattgaacagccgactttgagcattgtttcttctaactgcccctcaactaccattatcttcaagtcaacatgcatattacattttcatcctttgctttgcaagcactggtggcttgcagtttgctaatttatttatcatagagtcatcaatgtatttgttgctgacatggttttattagatactgtagtgattcaaataagttttctatttgaaaaaaaaaatcacttgattgtatccttgcccagtgaagccatcctaagacttagcaatatggattgtacatttggctgcatgagcaagtcggccgcacacttccagacagtgtgctgtttgaattgactatttgcactcaaagtctgggtattcattggttattggcctgaaatgatcaaataactacaaatgatctgttgagttccggtggttattttgccgtttgacattttttatggttcatttatttttaatatagagaggaagattgaatatttatctagagaatacaaagacccacatgtaaatgataggtattatctccatgtatatatgtacccacttagtcatgtaagtgcatatacacatacacacacatgagtgtagacatgtgtttattaattgacaatgacccaaatctcttccacaagacttaaaaccaaattcagggacaaatggatagagaagaaaagggtcaaacatcgagattacatggatgttaaattatatggagacgctaagaaataattgatggagccattgatgcaaaccgaagtagatttagaacttatatgaatttgatttatattttgcaagatcaaaaattagatgttaagtatcagattttaagcttgttttaatggtcaaaaaattaggacagaaataatatggacatttattagtatcttccataatttttaagtctgacacatttctattttattctaacataaaaaaacttccattatatatttactaagtatatttaattcacttaactctgtctttataagttcctattttagatggaataagagaaacaaattatatcaaggtaaaactgatcaaaagcataattgaaagttctgaaaaaagaaaaataataatatgtagaaaaatgtaacttagagagtaacacatgaacattgaagttaaaacccagaagccagatgctcacagttttattttactttaaaataaacctgtctgactgtagctttgygaaatatcttaaaacgcaaaaaccarttgtgtcctgaaaattgtttcaagaatttaatatttttatgaaaattattttatttaactttaagcaataactagagattacaattaaattttaatcaaaatgaaggcttagttcaaacataaggaaacagtgtttgattaaaaaaaacacatctagtaagacgtaaggggaaaatcacatcctctttggagatgattatattttgatctgaagggtttggggtgttcattagacacttaataaaacttaacttccaatgaaaaagaaatcttttgtaaatcattctayttttgcactttgaaagaaaggcgttaatcataaagaagcaagaatggtcaaaatcgaatgctgcatttttataaacaaaattacagactgtctgaaattgaagaagaatgaactaataatagcattcataaccaaacacaatgatgattattgcagaacattgtatcacattttagtccagagatagaataaagttgaataaccttgacttacacaaaactgttttggtagttggatttcattatcttagtgaatttagtcattttacaatatgtttgtatttggccatttactgtaatcacatttttatatctgtacaatgacactttttgcagttgtggggtagtgtgtaacactgtccatcttgcatcattgaaactactacaatgatactatcatttaataatattaatattacttgaaatagactaagataaagaaaaggggtctgtatgatgtgcagttttgtgcctttatgtatttgccttgttctttgtcgaatgtgtgaaattcygtactgtggtttttcctataatagaaagtagagctgtgtattaaattagactgtgtctctctgatacctttacactactgagaatagcatggttttggccatgtaaaccaattttcaaagttctaatgacatagccatgtgtttttggttttttatatttcattttaaaatttgagtatcaccatacattaattaatactcctgtagtagataagctgtcattaagtaattcccaaaaaaagggccatttgcttgcattactttgaatttaatgttgcgcttgtgcactgtgttaatattgtttgtgatggattggacgttgtgactcttgccttttaagaagaaaaaaaagataggacaaagtatttgaagctcttaaaatgtacatattttggttcttctatctcaaattatttaaaatgcataattcacatttttgtaataattctatgcaattttgtggcatgatgtttcttccacttgtaattttatgtgctttcatcacaaatccaaaggaaagaataaaaatttcttaacacaa

SEQ ID NO: 1753 - DNA, 6456 bp, Homo sapiens
gaccccaaattacgtgaacttttggatgtggggaacatcgggcgcctggagcagcgcatgatcacagtggtgtatgggcctgacctcgtgaacatctcccatttgaatctcgtggctttccaagaagaagtggccaaggaatggacaaatgaggttttcagtttggcaacaaacctgctggcccaaaacatgtccagggatgcatttctggaaaaagcctatactaaacttaagctgcaagtcactccagaagggcgtattcctctcaaaaacatatatcgcttgttttcagcagatcggaagcgagttgaaactgctttagaggcttgtagtcttccatcttcaaggaatgattcaatacctcaagaagatttcactccagaagtgtacagagttttcctcaacaacctttgccctcgacctgaaattgataacatcttttcagaatttggtgcaaaaagcaaaccatatcttaccgttgatcagatgatggattttatcaaccttaagcagcgagatcctcggcttaatgaaatactttatccacctctaaaacaagagcaagtccaagtattgattgagaagtatgaacccaacaacagcctcgccagaaaaggacaaatatcagtggatgggttcatgcgctatctgagtggagaagaaaacggagtcgtttcrcctgagaaactggatttgaatgaagacatgtctcagcccctttctcactatttcattaattcctcgcacaacacctacctcacagctggccaactggctggaaactcctctgttgagatgtatcgccaagtgctcctgtctggttgtcgctgtgtggagctggactgctggaagggacggactgcagaagaggaacctgtcatcacccatggcttcaccatgacaactgaaatatctttcaaggaagtgatagaagcaattgcggagtgtgcatttaagacttcaccttttccaattctcctttcgtttgagaaccatgtggattccccaaagcagcaagccaagatggcggagtactgccgactgatctttggggatgcccttctcatggagcccctggaaaaatatccactggaatctggagttcctcttccaagccctatggatttaatgtataaaattttggtgaaaaataagaagaaatcacacaagtcatcagaaggaagcggcaaaaagaagctctcagaacaagcctccaacacctacagtgactcctccagcatgttcgagccctcatccccaggagccggagaagctgatacggaaagtgacgacgacgatgatgatgatgactgtaaaaaatcttcaatggatgaggggactgctggaagtgaggctatggccacagaagaaatgtctaatctggtgaactatattcagccagtcaagtttgagtcatttgaaatttcaaaaaaaagaaataaaagttttgaaatgtcttccttcgtggaaaccaaaggacttgaacaactcaccaagtctccagtggaatttgtagaatataacaaaatgcagcttagcaggatatatccaaaaggaacacgtgtggattcatccaactatatgcctcagctcttctggaatgcaggttgtcagatggtggcacttaatttccagacaatggacctggctatgcaaataaatatggggatgtatgaatacaacgggaagagtggctacagattgaagccagagttcatgaggaggcctgacaagcattttgatccatttactgaaggcatcgtagatgggatagtggcaaacactttgtctgttaagattatttcaggtcagtttctttctgataagaaagttggracttacgtggaagtagatatgtttggtttgcctgtggatacaagraggaaggcatttaagaccaaaacatcccaaggaaatgctgtgaatcctgtctgggaagaagaacctattgtgttcaaaaaggtggttcttcctactctggcctgtttgagaatagcagtttatgaagaaggaggtaaattcattggccaccgtatcttgccagtgcaagccattcggccaggctatcactatatctgtctaaggaatgaaaggaaccagcctctgacgctgcctgctgtctttgtctacatagaagtgaaagactatgtgccagacacatatgcagatgtcatcgaagctttatcaaacccaatccgatatgtgaacctgatggaacagagagctaagcaattggctgctttgacactggaagatgaagaagaagtaaagaaagaggctgatcctggagaaacaccatcagaggctccaagtgaagcragaacgactccagcagaaaatggggtgaatcacactacaaccctgacacccaagccaccctcccaggctctccacagccagccagctccaggttctgtaaaggcacctgccaaaacagaagatcttattcagagtgtcttaacagaagtggaagcacagaccatcgaagaactaaagcaacagaaatcgtttgtgaaacttcaaaagaaacactacaaagaaatgaaagacctggttaagagacaccacaagaaaaccactgaccttatcaaagarcacactaccaagtataatgaaattcagaatgactacttgagaaggagagccgctttggaaaagtccgccaaaaaggacagtaagaaaaaatcggaacccagcagccctgatcatggttcatcaacgattgagcaagacctcgctgcyctggatgctgaaatgacccaaaagttaatagacttgaaggacaaacaacagcagcagctgcttaatcttcggcaagaacagtattatagtgaaaaataccagaagcgagaacatattaaactgcttattcaaaagttgacggatgtcgcagaagagtgtcagaacaatcagttaaagaagctcaaagaaatctgtgagaaagaaaagaaagaaytaaagaagaaaatggataaaaagaggcaggagaagataacagaagctaaatccaaagacaaaagtcagatggaagaggagaagacagagatgatccggtcatatatccaggaagtggtgcagtatatcaagaggytagaagaagcgcaaagtaaacggcaagaaaaactcgtagagaaacacaaggaaatacgtcagcagatcctggatgaaaagcccaagctgcaggtggagctggagcaagaataccaagacaaattcaaaagactgcccctcgagattttggaattcgtgcaggaagccatgaaaggaaagatcagtgaagacagcaatcacggttctgcccctctctccctgtcctcagaccctggaaaagtgaaccacaagactccctccagtgaggagctgggaggagacatcccaggaaaagaatttgatactcctctgtgaatgctcctgccaggccttcagaaattgcatggccactccagcgtcatcggactctctcttattacaaagatcactgcccaggaccatcttcccgagragcatcccttagcctaaaatccacaccaaagggagagttccagaggaatccatgaagaattcccatgcccaggctccatgtgtcatgtggaaacctccacaggtctgctagtgaagaatgcatgtatgtgagatttttgttttctttccaatagcaaattcaaagcaagcaacttgcaggctccatggaacttttaatgaaggacagtgtcttctttgaagaaaatcaagctcgtgtttttattcgaagctctggtgtaaaatatttcaaagtcatagaaatagtttgagaaatgcatagcattatttaacactattgaacagccgactttgagcattgtttcttctaactgcccctcaactaccattatcttcaagtcaacatgcatattacattttcatcctttgctttgcaagcactggtggcttgcagtttgctaatttatttatcatagagtcatcaatgtatttgttgctgacatggttttattagatactgtagtgattcaaataagttttctatttgaaaaaaaaaatcacttgattgtatccttgcccagtgaagccatcctaagacttagcaatatggattgtacatttggctgcatgagcaagtcggccgcacacttccagacagtgtgctgtttgaattgactatttgcactcaaagtctgggtattcattggttattggcctgaaatgatcaaataactacaaatgatctgttgaataaaaatagttgagctgatatatgttaagcagatattcaatcagaatgaacaggttccggtggttattttgccgtttgacattttttatggttcatttatttttaatatagagaggaagattgaatatttatctagagaatacaaagacccacatgtaaatgataggtattatctccatgtatatatgtacccacttagtcatgtaagtgcatatacacatacacacacatgagtgtagacatgtgtttattaattgacaatgacccaaatctcttccacaagacttaaaaccaaattcagggacaaatggatagagaagaaaagggtcaaacatcgagattacatggatgttaaattatatggagacgctaagaaataattgatggagccattgatgcaaaccgaagtagatttagaacttatatgaatttgatttatattttgcaagatcaaaaattagatgttaagtatcagattttaagcttgttttaatggtcaaaaaattaggacagaaataatatggacatttattagtatcttccataatttttaagtctgacacatttctattttattctaacataaaaaaacttccattatatatttactaagtatatttaattcacttaactctgtctttataagttcctattttagatggaataagagaaacaaattatatcaaggtaaaactgatcaaaagcataattgaaagttctgaaaaaagaaaaataataatatgtagaaaaatgtaacttagagagtaacacatgaacattgaagttaaaacccagaagccagatgctcacagttttattttactttaaaataaacctgtctgactgtagctttgygaaatatcttaaaacgcaaaaaccarttgtgtcctgaaaattgtttcaagaatttaatatttttatgaaaattattttatttaactttaagcaataactagagattacaattaaattttaatcaaaatgaaggcttagttcaaacataaggaaacagtgtttgattaaaaaaaacacatctagtaagacgtaaggggaaaatcacatcctctttggagatgattatattttgatctgaagggtttggggtgttcattagacacttaataaaacttaacttccaatgaaaaagaaatcttttgtaaatcattctayttttgcactttgaaagaaaggcgttaatcataaagaagcaagaatggtcaaaatcgaatgctgcatttttataaacaaaattacagactgtctgaaattgaagaagaatgaactaataatagcattcataaccaaacacaatgatgattattgcagaacattgtatcacattttagtccagagatagaataaagttgaataaccttgacttacacaaaactgttttggtagttggatttcattatcttagtgaatttagtcattttacaatatgtttgtatttggccatttactgtaatcacatttttatatctgtacaatgacactttttgcagttgtggggtagtgtgtaacactgtccatcttgcatcattgaaactactacaatgatactatcatttaataatattaatattacttgaaatagactaagataaagaaaaggggtctgtatgatgtgcagttttgtgcctttatgtatttgccttgttctttgtcgaatgtgtgaaattcygtactgtggtttttcctataatagaaagtagagctgtgtattaaattagactgtgtctctctgatacctttacactactgagaatagcatggttttggccatgtaaaccaattttcaaagttctaatgacatagccatgtgtttttggttttttatatttcattttaaaatttgagtatcaccatacattaattaatactcctgtagtagataagctgtcattaagtaattcccaaaaaaagggccatttgcttgcattactttgaatttaatgttgcgcttgtgcactgtgttaatattgtttgtgatggattggacgttgtgactcttgccttttaagaagaaaaaaaagataggacaaagtatttgaagctcttaaaatgtacatattttggttcttctatctcaaattatttaaaatgcataattcacatttttgtaataattctatgcaattttgtggcatgatgtttcttccacttgtaattttatgtgctttcatcacaaatccaaaggaaagaataaaaatttcttaacacaa

SEQ ID NO: 1754 - DNA, 7192 bp, Homo sapiens
tctgtgtatagaggatgtgctgaatggtgcgctttgaggcggcggcggcggaggagcagaatccgccgcgactggcagcctcggctgaccggctcggcttctcttcgccttccgaggctcctcatccaccgcgggctccagacctcgcgtcccgcccggggcatggccgggcgctgcgcccccgcgcgctctgcctgctgagcggcgccggagggaggtgcggaggccgggaggccggggaggccggcggggagcagagtcgagcgcctccggagcagagaaaggagcccgcgccccgcgccccgcgccccgcgcacggtccccagtccctgccgcgctcgcccgggccgcccggagcccagatgagcccagatggccggggctcaacccggagtgcacgccttgcaactcaagcccgtgtgcgtgtccgacagcctcaagaagggcaccaaattcgtcaagtgggatgatgactcaactattgttactccaattattttgaggactgaccctcagggatttttcttttactggacagatcaaaacaaggagacagagctactggatctcagccttgtcaaagatgccagatgtgggagacacgccaaagctcccaaggaccccaaattacgtgaacttttggatgtggggaacatcgggcgcctggagcagcgcatgatcacagtggtgtatgggcctgacctcgtgaacatctcccatttgaatctcgtggctttccaagaagaagtggccaaggaatggacaaatgaggttttcagtttggcaacaaacctgctggcccaaaacatgtccagggatgcatttctggaaaaagcctatactaaacttaagctgcaagtcactccagaagggcgtattcctctcaaaaacatatatcgcttgttttcagcagatcggaagcgagttgaaactgctttagaggcttgtagtcttccatcttcaaggaatgattcaatacctcaagaagatttcactccagaagtgtacagagttttcctcaacaacctttgccctcgacctgaaattgataacatcttttcagaatttggtgcaaaaagcaaaccatatcttaccgttgatcagatgatggattttatcaaccttaagcagcgagatcctcggcttaatgaaatactttatccacctctaaaacaagagcaagtccaagtattgattgagaagtatgaacccaacaacagcctcgccagaaaaggacaaatatcagtggatgggttcatgcgctatctgagtggagaagaaaacggagtcgtttcrcctgagaaactggatttgaatgaagacatgtctcagcccctttctcactatttcattaattcctcgcacaacacctacctcacagctggccaactggctggaaactcctctgttgagatgtatcgccaagtgctcctgtctggttgtcgctgtgtggagctggactgctggaagggacggactgcagaagaggaacctgtcatcacccatggcttcaccatgacaactgaaatatctttcaaggaagtgatagaagcaattgcggagtgtgcatttaagacttcaccttttccaattctcctttcgtttgagaaccatgtggattccccaaagcagcaagccaagatggcggagtactgccgactgatctttggggatgcccttctcatggagcccctggaaaaatatccactggaatctggagttcctcttccaagccctatggatttaatgtataaaattttggtgaaaaataagaagaaatcacacaagtcatcagaaggaagcggcaaaaagaagctctcagaacaagcctccaacacctacagtgactcctccagcatgttcgagccctcatccccaggagccggagaagctgatacggaaagtgacgacgacgatgatgatgatgactgtaaaaaatcttcaatggatgaggggactgctggaagtgaggctatggccacagaagaaatgtctaatctggtgaactatattcagccagtcaagtttgagtcatttgaaatttcaaaaaaaagaaataaaagttttgaaatgtcttccttcgtggaaaccaaaggacttgaacaactcaccaagtctccagtggaatttgtagaatataacaaaatgcagcttagcaggatatatccaaaaggaacacgtgtggattcatccaactatatgcctcagctcttctggaatgcaggttgtcagatggtggcacttaatttccagacaatggacctggctatgcaaataaatatggggatgtatgaatacaacgggaagagtggctacagattgaagccagagttcatgaggaggcctgacaagcattttgatccatttactgaaggcatcgtagatgggatagtggcaaacactttgtctgttaagattatttcaggtcagtttctttctgataagaaagttggracttacgtggaagtagatatgtttggtttgcctgtggatacaagraggaaggcatttaagaccaaaacatcccaaggaaatgctgtgaatcctgtctgggaagaagaacctattgtgttcaaaaaggtggttcttcctactctggcctgtttgagaatagcagtttatgaagaaggaggtaaattcattggccaccgtatcttgccagtgcaagccattcggccaggctatcactatatctgtctaaggaatgaaaggaaccagcctctgacgctgcctgctgtctttgtctacatagaagtgaaagactatgtgccagacacatatgcagatgtcatcgaagctttatcaaacccaatccgatatgtgaacctgatggaacagagagctaagcaattggctgctttgacactggaagatgaagaagaagtaaagaaagaggctgatcctggagaaacaccatcagaggctccaagtgaagcragaacgactccagcagaaaatggggtgaatcacactacaaccctgacacccaagccaccctcccaggctctccacagccagccagctccaggttctgtaaaggcacctgccaaaacagaagatcttattcagagtgtcttaacagaagtggaagcacagaccatcgaagaactaaagcaacagaaatcgtttgtgaaacttcaaaagaaacactacaaagaaatgaaagacctggttaagagacaccacaagaaaaccactgaccttatcaaagarcacactaccaagtataatgaaattcagaatgactacttgagaaggagagccgctttggaaaagtccgccaaaaaggacagtaagaaaaaatcggaacccagcagccctgatcatggttcatcaacgattgagcaagacctcgctgcyctggatgctgaaatgacccaaaagttaatagacttgaaggacaaacaacagcagcagctgcttaatcttcggcaagaacagtattatagtgaaaaataccagaagcgagaacatattaaactgcttattcaaaagttgacggatgtcgcagaagagtgtcagaacaatcagttaaagaagctcaaagaaatctgtgagaaagaaaagaaagaaytaaagaagaaaatggataaaaagaggcaggagaagataacagaagctaaatccaaagacaaaagtcagatggaagaggagaagacagagatgatccggtcatatatccaggaagtggtgcagtatatcaagaggytagaagaagcgcaaagtaaacggcaagaaaaactcgtagagaaacacaaggaaatacgtcagcagatcctggatgaaaagcccaagggggaaggttcctcctcattcttgtcggaaacttgccatgaggatccctctgtttcccccaactttactccccccaaccctcaagctctcaagtggtgaccaccgtccttccggccagctgcaggtggagctggagcaagaataccaagacaaattcaaaagactgcccctcgagattttggaattcgtgcaggaagccatgaaaggaaagatcagtgaagacagcaatcacggttctgcccctctctccctgtcctcagaccctggaaaagtgaaccacaagactccctccagtgaggagctgggaggagacatcccaggaaaagaatttgatactcctctgtgaatgctcctgccaggccttcagaaattgcatggccactccagcgtcatcggactctctcttattacaaagatcactgcccaggaccatcttcccgagragcatcccttagcctaaaatccacaccaaagggagagttccagaggaatccatgaagaattcccatgcccaggctccatgtgtcatgtggaaacctccacaggtctgctagtgaagaatgcatgtatgtgagatttttgttttctttccaatagcaaattcaaagcaagcaacttgcaggctccatggaacttttaatgaaggacagtgtcttctttgaagaaaatcaagctcgtgtttttattcgaagctctggtgtaaaatatttcaaagtcatagaaatagtttgagaaatgcatagcattatttaacactattgaacagccgactttgagcattgtttcttctaactgcccctcaactaccattatcttcaagtcaacatgcatattacattttcatcctttgctttgcaagcactggtggcttgcagtttgctaatttatttatcatagagtcatcaatgtatttgttgctgacatggttttattagatactgtagtgattcaaataagttttctatttgaaaaaaaaaatcacttgattgtatccttgcccagtgaagccatcctaagacttagcaatatggattgtacatttggctgcatgagcaagtcggccgcacacttccagacagtgtgctgtttgaattgactatttgcactcaaagtctgggtattcattggttattggcctgaaatgatcaaataactacaaatgatctgttgaataaaaatagttgagctgatatatgttaagcagatattcaatcagaatgaacaggttccggtggttattttgccgtttgacattttttatggttcatttatttttaatatagagaggaagattgaatatttatctagagaatacaaagacccacatgtaaatgataggtattatctccatgtatatatgtacccacttagtcatgtaagtgcatatacacatacacacacatgagtgtagacatgtgtttattaattgacaatgacccaaatctcttccacaagacttaaaaccaaattcagggacaaatggatagagaagaaaagggtcaaacatcgagattacatggatgttaaattatatggagacgctaagaaataattgatggagccattgatgcaaaccgaagtagatttagaacttatatgaatttgatttatattttgcaagatcaaaaattagatgttaagtatcagattttaagcttgttttaatggtcaaaaaattaggacagaaataatatggacatttattagtatcttccataatttttaagtctgacacatttctattttattctaacataaaaaaacttccattatatatttactaagtatatttaattcacttaactctgtctttataagttcctattttagatggaataagagaaacaaattatatcaaggtaaaactgatcaaaagcataattgaaagttctgaaaaaagaaaaataataatatgtagaaaaatgtaacttagagagtaacacatgaacattgaagttaaaacccagaagccagatgctcacagttttattttactttaaaataaacctgtctgactgtagctttgygaaatatcttaaaacgcaaaaaccarttgtgtcctgaaaattgtttcaagaatttaatatttttatgaaaattattttatttaactttaagcaataactagagattacaattaaattttaatcaaaatgaaggcttagttcaaacataaggaaacagtgtttgattaaaaaaaacacatctagtaagacgtaaggggaaaatcacatcctctttggagatgattatattttgatctgaagggtttggggtgttcattagacacttaataaaacttaacttccaatgaaaaagaaatcttttgtaaatcattctayttttgcactttgaaagaaaggcgttaatcataaagaagcaagaatggtcaaaatcgaatgctgcatttttataaacaaaattacagactgtctgaaattgaagaagaatgaactaataatagcattcataaccaaacacaatgatgattattgcagaacattgtatcacattttagtccagagatagaataaagttgaataaccttgacttacacaaaactgttttggtagttggatttcattatcttagtgaatttagtcattttacaatatgtttgtatttggccatttactgtaatcacatttttatatctgtacaatgacactttttgcagttgtggggtagtgtgtaacactgtccatcttgcatcattgaaactactacaatgatactatcatttaataatattaatattacttgaaatagactaagataaagaaaaggggtctgtatgatgtgcagttttgtgcctttatgtatttgccttgttctttgtcgaatgtgtgaaattcygtactgtggtttttcctataatagaaagtagagctgtgtattaaattagactgtgtctctctgatacctttacactactgagaatagcatggttttggccatgtaaaccaattttcaaagttctaatgacatagccatgtgtttttggttttttatatttcattttaaaatttgagtatcaccatacattaattaatactcctgtagtagataagctgtcattaagtaattcccaaaaaaagggccatttgcttgcattactttgaatttaatgttgcgcttgtgcactgtgttaatattgtttgtgatggattggacgttgtgactcttgccttttaagaagaaaaaaaagataggacaaagtatttgaagctcttaaaatgtacatattttggttcttctatctcaaattatttaaaatgcataattcacatttttgtaataattctatgcaattttgtggcatgatgtttcttccacttgtaattttatgtgctttcatcacaaatccaaaggaaagaataaaaatttcttaacacaa

SEQ ID NO: 1755 - DNA, 7020 bp, Homo sapiens
tctgtgtatagaggatgtgctgaatggtgcgctttgaggcggcggcggcggaggagcagaatccgccgcgactggcagcctcggctgaccggctcggcttctcttcgccttccgaggctcctcatccaccgcgggctccagacctcgcgtcccgcccggggcatggccgggcgctgcgcccccgcgcgctctgcctgctgagcggcgccggagggaggtgcggaggccgggaggccggggaggccggcggggagcagagtcgagcgcctccggagcagagaaaggagcccgcgccccgcgccccgcgccccgcgcacggtccccagtccctgccgcgctcgcccgggccgcccggagcccagatgagcccagatggccggggctcaacccggagtgcacgccttgcaactcaagcccgtgtgcgtgtccgacagcctcaagaagggcaccaaattcgtcaagtgggatgatgactcaactattgttactccaattattttgaggactgaccctcagggatttttcttttactggacagatcaaaacaaggagacagagctactggatctcagccttgtcaaagatgccagatgtgggagacacgccaaagctcccaaggaccccaaattacgtgaacttttggatgtggggaacatcgggcgcctggagcagcgcatgatcacagtggtgtatgggcctgacctcgtgaacatctcccatttgaatctcgtggctttccaagaagaagtggccaaggaatggacaaatgaggttttcagtttggcaacaaacctgctggcccaaaacatgtccagggatgcatttctggaaaaagcctatactaaacttaagctgcaagtcactccagaagggcgtattcctctcaaaaacatatatcgcttgttttcagcagatcggaagcgagttgaaactgctttagaggcttgtagtcttccatcttcaaggaatgattcaatacctcaagaagatttcactccagaagtgtacagagttttcctcaacaacctttgccctcgacctgaaattgataacatcttttcagaatttggtgcaaaaagcaaaccatatcttaccgttgatcagatgatggattttatcaaccttaagcagcgagatcctcggcttaatgaaatactttatccacctctaaaacaagagcaagtccaagtattgattgagaagtatgaacccaacaacagcctcgccagaaaaggacaaatatcagtggatgggttcatgcgctatctgagtggagaagaaaacggagtcgtttcrcctgagaaactggatttgaatgaagacatgtctcagcccctttctcactatttcattaattcctcgcacaacacctacctcacagctggccaactggctggaaactcctctgttgagatgtatcgccaagtgctcctgtctggttgtcgctgtgtggagctggactgctggaagggacggactgcagaagaggaacctgtcatcacccatggcttcaccatgacaactgaaatatctttcaaggaagtgatagaagcaattgcggagtgtgcatttaagacttcaccttttccaattctcctttcgtttgagaaccatgtggattccccaaagcagcaagccaagatggcggagtactgccgactgatctttggggatgcccttctcatggagcccctggaaaaatatccactggaatctggagttcctcttccaagccctatggatttaatgtataaaattttggtgaaaaataagaagaaatcacacaagtcatcagaaggaagcggcaaaaagaagctctcagaacaagcctccaacacctacagtgactcctccagcatgttcgagccctcatccccaggagccggagaagctgatacggaaagtgacgacgacgatgatgatgatgactgtaaaaaatcttcaatggatgaggggactgctggaagtgaggctatggccacagaagaaatgtctaatctggtgaactatattcagccagtcaagtttgagtcatttgaaatttcaaaaaaaagaaataaaagttttgaaatgtcttccttcgtggaaaccaaaggacttgaacaactcaccaagtctccagtggaatttgtagaatataacaaaatgcagcttagcaggatatatccaaaaggaacacgtgtggattcatccaactatatgcctcagctcttctggaatgcaggttgtcagatggtggcacttaatttccagacaatggacctggctatgcaaataaatatggggatgtatgaatacaacgggaagagtggctacagattgaagccagagttcatgaggaggcctgacaagcattttgatccatttactgaaggcatcgtagatgggatagtggcaaacactttgtctgttaagattatttcaggtcagtttctttctgataagaaagttggracttacgtggaagtagatatgtttggtttgcctgtggatacaagraggaaggcatttaagaccaaaacatcccaaggaaatgctgtgaatcctgtctgggaagaagaacctattgtgttcaaaaaggtggttcttcctactctggcctgtttgagaatagcagtttatgaagaaggaggtaaattcattggccaccgtatcttgccagtgcaagccattcggccaggctatcactatatctgtctaaggaatgaaaggaaccagcctctgacgctgcctgctgtctttgtctacatagaagtgaaagactatgtgccagacacatatgcagatgtcatcgaagctttatcaaacccaatccgatatgtgaacctgatggaacagagagctaagcaattggctgctttgacactggaagatgaagaagaagtaaagaaagaggctgatcctggagaaacaccatcagaggctccaagtgaagcragaacgactccagcagaaaatggggtgaatcacactacaaccctgacacccaagccaccctcccaggctctccacagccagccagctccaggttctgtaaaggcacctgccaaaacagaagatcttattcagagtgtcttaacagaagtggaagcacagaccatcgaagaactaaagcaacagaaatcgtttgtgaaacttcaaaagaaacactacaaagaaatgaaagacctggttaagagacaccacaagaaaaccactgaccttatcaaagarcacactaccaagtataatgaaattcagaatgactacttgagaaggagagccgctttggaaaagtccgccaaaaaggacagtaagaaaaaatcggaacccagcagccctgatcatggttcatcaacgattgagcaagacctcgctgcyctggatgctgaaatgacccaaaagttaatagacttgaaggacaaacaacagcagcagctgcttaatcttcggcaagaacagtattatagtgaaaaataccagaagcgagaacatattaaactgcttattcaaaagttgacggatgtcgcagaagagtgtcagaacaatcagttaaagaagctcaaagaaatctgtgagaaagaaaagaaagaaytaaagaagaaaatggataaaaagaggcaggagaagataacagaagctaaatccaaagacaaaagtcagatggaagaggagaagacagagatgatccggtcatatatccaggaagtggtgcagtatatcaagaggytagaagaagcgcaaagtaaacggcaagaaaaactcgtagagaaacacaaggaaatacgtcagcagatcctggatgaaaagcccaagctgcaggtggagctggagcaagaataccaagacaaattcaaaagactgcccctcgagattttggaattcgtgcaggaagccatgaaaggaaagatcagtgaagacagcaatcacggttctgcccctctctccctgtcctcagaccctggaaaagtgaaccacaagactccctccagtgaggagctgggaggagacatcccaggaaaagaatttgatactcctctgtgaatgctcctgccaggccttcagaaattgcatggccactccagcgtcatcggactctctcttattacaaagatcactgcccaggaccatcttcccgagragcatcccttagcctaaaatccacaccaaagggagagttccagaggaatccatgaagaattcccatgcccaggctccatgtgtcatgtggaaacctccacaggtctgctagtgaagaatgcatgtatgtgagatttttgttttctttccaatagcaaattcaaagcaagcaacttgcaggctccatggaacttttaatgaaggacagtgtcttctttgaagaaaatcaagctcgtgtttttattcgaagctctggtgtaaaatatttcaaagtcatagaaatagtttgagaaatgcatagcattatttaacactattgaacagccgactttgagcattgtttcttctaactgcccctcaactaccattatcttcaagtcaacatgcatattacattttcatcctttgctttgcaagcactggtggcttgcagtttgctaatttatttatcatagagtcatcaatgtatttgttgctgacatggttttattagatactgtagtgattcaaataagttttctatttgaaaaaaaaaatcacttgattgtatccttgcccagtgaagccatcctaagacttagcaatatggattgtacatttggctgcatgagcaagtcggccgcacacttccagacagtgtgctgtttgaattgactatttgcactcaaagtctgggtattcattggttattggcctgaaatgatcaaataactacaaatgatctgttgagttccggtggttattttgccgtttgacattttttatggttcatttatttttaatatagagaggaagattgaatatttatctagagaatacaaagacccacatgtaaatgataggtattatctccatgtatatatgtacccacttagtcatgtaagtgcatatacacatacacacacatgagtgtagacatgtgtttattaattgacaatgacccaaatctcttccacaagacttaaaaccaaattcagggacaaatggatagagaagaaaagggtcaaacatcgagattacatggatgttaaattatatggagacgctaagaaataattgatggagccattgatgcaaaccgaagtagatttagaacttatatgaatttgatttatattttgcaagatcaaaaattagatgttaagtatcagattttaagcttgttttaatggtcaaaaaattaggacagaaataatatggacatttattagtatcttccataatttttaagtctgacacatttctattttattctaacataaaaaaacttccattatatatttactaagtatatttaattcacttaactctgtctttataagttcctattttagatggaataagagaaacaaattatatcaaggtaaaactgatcaaaagcataattgaaagttctgaaaaaagaaaaataataatatgtagaaaaatgtaacttagagagtaacacatgaacattgaagttaaaacccagaagccagatgctcacagttttattttactttaaaataaacctgtctgactgtagctttgygaaatatcttaaaacgcaaaaaccarttgtgtcctgaaaattgtttcaagaatttaatatttttatgaaaattattttatttaactttaagcaataactagagattacaattaaattttaatcaaaatgaaggcttagttcaaacataaggaaacagtgtttgattaaaaaaaacacatctagtaagacgtaaggggaaaatcacatcctctttggagatgattatattttgatctgaagggtttggggtgttcattagacacttaataaaacttaacttccaatgaaaaagaaatcttttgtaaatcattctayttttgcactttgaaagaaaggcgttaatcataaagaagcaagaatggtcaaaatcgaatgctgcatttttataaacaaaattacagactgtctgaaattgaagaagaatgaactaataatagcattcataaccaaacacaatgatgattattgcagaacattgtatcacattttagtccagagatagaataaagttgaataaccttgacttacacaaaactgttttggtagttggatttcattatcttagtgaatttagtcattttacaatatgtttgtatttggccatttactgtaatcacatttttatatctgtacaatgacactttttgcagttgtggggtagtgtgtaacactgtccatcttgcatcattgaaactactacaatgatactatcatttaataatattaatattacttgaaatagactaagataaagaaaaggggtctgtatgatgtgcagttttgtgcctttatgtatttgccttgttctttgtcgaatgtgtgaaattcygtactgtggtttttcctataatagaaagtagagctgtgtattaaattagactgtgtctctctgatacctttacactactgagaatagcatggttttggccatgtaaaccaattttcaaagttctaatgacatagccatgtgtttttggttttttatatttcattttaaaatttgagtatcaccatacattaattaatactcctgtagtagataagctgtcattaagtaattcccaaaaaaagggccatttgcttgcattactttgaatttaatgttgcgcttgtgcactgtgttaatattgtttgtgatggattggacgttgtgactcttgccttttaagaagaaaaaaaagataggacaaagtatttgaagctcttaaaatgtacatattttggttcttctatctcaaattatttaaaatgcataattcacatttttgtaataattctatgcaattttgtggcatgatgtttcttccacttgtaattttatgtgctttcatcacaaatccaaaggaaagaataaaaatttcttaacacaa

SEQ ID NO: 1756 - DNA, 579 bp, Homo sapiens
atggccggggctcaacccggagtgcacgccttgcaactcaagcccgtgtgcgtgtccgacagcctcaagaagggcaccaaattcgtcaagtgggatgataaatcatggaccatggaagaacaagaatatggtagacatgaaggaaatgtagagggtgagttgcctgctctcaagcacgatgcagaatgcaagacagtgtcaactgagaggccagatctatattacttgtgcagggaggactcaactattgttactccaattattttgaggactgaccctcagggatttttcttttactggacagatcaaaacaagctcttctgccagcctctcctggagactgaggggcttccaggccagtgggccctaggctttgagaaatccctcagacatagatgcagctggaagctgtccgttggcatacatgaaaacacatgggcaccaccagcagcaaccactctggtgrctttaatttctgaagatattggagtagctcagatgccactttgggagctcaaaggggaagctagccctgcagaagacaagccagtgaagaaccaagtccttaatgatgtcatt

SEQ ID NO: 1757 - DNA, 7074 bp, Homo sapiens
tctgtgtatagaggatgtgctgaatggtgcgctttgaggcggcggcggcggaggagcagaatccgccgcgactggcagcctcggctgaccggctcggcttctcttcgccttccgaggctcctcatccaccgcgggctccagacctcgcgtcccgcccggggcatggccgggcgctgcgcccccgcgcgctctgcctgctgagcggcgccggagggaggtgcggaggccgggaggccggggaggccggcggggagcagagtcgagcgcctccggagcagagaaaggagcccgcgccccgcgccccgcgccccgcgcacggtccccagtccctgccgcgctcgcccgggccgcccggagcccagatgagcccagatggccggggctcaacccggagtgcacgccttgcaactcaagcccgtgtgcgtgtccgacagcctcaagaagggcaccaaattcgtcaagtgggatgatgactcaactattgttactccaattattttgaggactgaccctcagggatttttcttttactggacagatcaaaacaaggagacagagctactggatctcagccttgtcaaagatgccagatgtgggagacacgccaaagctcccaaggaccccaaattacgtgaacttttggatgtggggaacatcgggcgcctggagcagcgcatgatcacagtggtgtatgggcctgacctcgtgaacatctcccatttgaatctcgtggctttccaagaagaagtggccaaggaatggacaaatgaggttttcagtttggcaacaaacctgctggcccaaaacatgtccagggatgcatttctggaaaaagcctatactaaacttaagctgcaagtcactccagaagggcgtattcctctcaaaaacatatatcgcttgttttcagcagatcggaagcgagttgaaactgctttagaggcttgtagtcttccatcttcaaggaatgattcaatacctcaagaagatttcactccagaagtgtacagagttttcctcaacaacctttgccctcgacctgaaattgataacatcttttcagaatttggtgcaaaaagcaaaccatatcttaccgttgatcagatgatggattttatcaaccttaagcagcgagatcctcggcttaatgaaatactttatccacctctaaaacaagagcaagtccaagtattgattgagaagtatgaacccaacaacagcctcgccagaaaaggacaaatatcagtggatgggttcatgcgctatctgagtggagaagaaaacggagtcgtttcrcctgagaaactggatttgaatgaagacatgtctcagcccctttctcactatttcattaattcctcgcacaacacctacctcacagctggccaactggctggaaactcctctgttgagatgtatcgccaagtgctcctgtctggttgtcgctgtgtggagctggactgctggaagggacggactgcagaagaggaacctgtcatcacccatggcttcaccatgacaactgaaatatctttcaaggaagtgatagaagcaattgcggagtgtgcatttaagacttcaccttttccaattctcctttcgtttgagaaccatgtggattccccaaagcagcaagccaagatggcggagtactgccgactgatctttggggatgcccttctcatggagcccctggaaaaatatccactggaatctggagttcctcttccaagccctatggatttaatgtataaaattttggtgaaaaataagaagaaatcacacaagtcatcagaaggaagcggcaaaaagaagctctcagaacaagcctccaacacctacagtgactcctccagcatgttcgagccctcatccccaggagccggagaagctgatacggaaagtgacgacgacgatgatgatgatgactgtaaaaaatcttcaatggatgaggggactgctggaagtgaggctatggccacagaagaaatgtctaatctggtgaactatattcagccagtcaagtttgagtcatttgaaatttcaaaaaaaagaaataaaagttttgaaatgtcttccttcgtggaaaccaaaggacttgaacaactcaccaagtctccagtggaatttgtagaatataacaaaatgcagcttagcaggatatatccaaaaggaacacgtgtggattcatccaactatatgcctcagctcttctggaatgcaggttgtcagatggtggcacttaatttccagacaatggacctggctatgcaaataaatatggggatgtatgaatacaacgggaagagtggctacagattgaagccagagttcatgaggaggcctgacaagcattttgatccatttactgaaggcatcgtagatgggatagtggcaaacactttgtctgttaagattatttcaggtcagtttctttctgataagaaagttggracttacgtggaagtagatatgtttggtttgcctgtggatacaagraggaaggcatttaagaccaaaacatcccaaggaaatgctgtgaatcctgtctgggaagaagaacctattgtgttcaaaaaggtggttcttcctactctggcctgtttgagaatagcagtttatgaagaaggaggtaaattcattggccaccgtatcttgccagtgcaagccattcggccaggctatcactatatctgtctaaggaatgaaaggaaccagcctctgacgctgcctgctgtctttgtctacatagaagtgaaagactatgtgccagacacatatgcagatgtcatcgaagctttatcaaacccaatccgatatgtgaacctgatggaacagagagctaagcaattggctgctttgacactggaagatgaagaagaagtaaagaaagaggctgatcctggagaaacaccatcagaggctccaagtgaagcragaacgactccagcagaaaatggggtgaatcacactacaaccctgacacccaagccaccctcccaggctctccacagccagccagctccaggttctgtaaaggcacctgccaaaacagaagatcttattcagagtgtcttaacagaagtggaagcacagaccatcgaagaactaaagcaacagaaatcgtttgtgaaacttcaaaagaaacactacaaagaaatgaaagacctggttaagagacaccacaagaaaaccactgaccttatcaaagarcacactaccaagtataatgaaattcagaatgactacttgagaaggagagccgctttggaaaagtccgccaaaaaggacagtaagaaaaaatcggaacccagcagccctgatcatggttcatcaacgattgagcaagacctcgctgcyctggatgctgaaatgacccaaaagttaatagacttgaaggacaaacaacagcagcagctgcttaatcttcggcaagaacagtattatagtgaaaaataccagaagcgagaacatattaaactgcttattcaaaagttgacggatgtcgcagaagagtgtcagaacaatcagttaaagaagctcaaagaaatctgtgagaaagaaaagaaagaaytaaagaagaaaatggataaaaagaggcaggagaagataacagaagctaaatccaaagacaaaagtcagatggaagaggagaagacagagatgatccggtcatatatccaggaagtggtgcagtatatcaagaggytagaagaagcgcaaagtaaacggcaagaaaaactcgtagagaaacacaaggaaatacgtcagcagatcctggatgaaaagcccaagctgcaggtggagctggagcaagaataccaagacaaattcaaaagactgcccctcgagattttggaattcgtgcaggaagccatgaaaggaaagatcagtgaagacagcaatcacggttctgcccctctctccctgtcctcagaccctggaaaagtgaaccacaagactccctccagtgaggagctgggaggagacatcccaggaaaagaatttgatactcctctgtgaatgctcctgccaggccttcagaaattgcatggccactccagcgtcatcggactctctcttattacaaagatcactgcccaggaccatcttcccgagragcatcccttagcctaaaatccacaccaaagggagagttccagaggaatccatgaagaattcccatgcccaggctccatgtgtcatgtggaaacctccacaggtctgctagtgaagaatgcatgtatgtgagatttttgttttctttccaatagcaaattcaaagcaagcaacttgcaggctccatggaacttttaatgaaggacagtgtcttctttgaagaaaatcaagctcgtgtttttattcgaagctctggtgtaaaatatttcaaagtcatagaaatagtttgagaaatgcatagcattatttaacactattgaacagccgactttgagcattgtttcttctaactgcccctcaactaccattatcttcaagtcaacatgcatattacattttcatcctttgctttgcaagcactggtggcttgcagtttgctaatttatttatcatagagtcatcaatgtatttgttgctgacatggttttattagatactgtagtgattcaaataagttttctatttgaaaaaaaaaatcacttgattgtatccttgcccagtgaagccatcctaagacttagcaatatggattgtacatttggctgcatgagcaagtcggccgcacacttccagacagtgtgctgtttgaattgactatttgcactcaaagtctgggtattcattggttattggcctgaaatgatcaaataactacaaatgatctgttgaataaaaatagttgagctgatatatgttaagcagatattcaatcagaatgaacaggttccggtggttattttgccgtttgacattttttatggttcatttatttttaatatagagaggaagattgaatatttatctagagaatacaaagacccacatgtaaatgataggtattatctccatgtatatatgtacccacttagtcatgtaagtgcatatacacatacacacacatgagtgtagacatgtgtttattaattgacaatgacccaaatctcttccacaagacttaaaaccaaattcagggacaaatggatagagaagaaaagggtcaaacatcgagattacatggatgttaaattatatggagacgctaagaaataattgatggagccattgatgcaaaccgaagtagatttagaacttatatgaatttgatttatattttgcaagatcaaaaattagatgttaagtatcagattttaagcttgttttaatggtcaaaaaattaggacagaaataatatggacatttattagtatcttccataatttttaagtctgacacatttctattttattctaacataaaaaaacttccattatatatttactaagtatatttaattcacttaactctgtctttataagttcctattttagatggaataagagaaacaaattatatcaaggtaaaactgatcaaaagcataattgaaagttctgaaaaaagaaaaataataatatgtagaaaaatgtaacttagagagtaacacatgaacattgaagttaaaacccagaagccagatgctcacagttttattttactttaaaataaacctgtctgactgtagctttgygaaatatcttaaaacgcaaaaaccarttgtgtcctgaaaattgtttcaagaatttaatatttttatgaaaattattttatttaactttaagcaataactagagattacaattaaattttaatcaaaatgaaggcttagttcaaacataaggaaacagtgtttgattaaaaaaaacacatctagtaagacgtaaggggaaaatcacatcctctttggagatgattatattttgatctgaagggtttggggtgttcattagacacttaataaaacttaacttccaatgaaaaagaaatcttttgtaaatcattctayttttgcactttgaaagaaaggcgttaatcataaagaagcaagaatggtcaaaatcgaatgctgcatttttataaacaaaattacagactgtctgaaattgaagaagaatgaactaataatagcattcataaccaaacacaatgatgattattgcagaacattgtatcacattttagtccagagatagaataaagttgaataaccttgacttacacaaaactgttttggtagttggatttcattatcttagtgaatttagtcattttacaatatgtttgtatttggccatttactgtaatcacatttttatatctgtacaatgacactttttgcagttgtggggtagtgtgtaacactgtccatcttgcatcattgaaactactacaatgatactatcatttaataatattaatattacttgaaatagactaagataaagaaaaggggtctgtatgatgtgcagttttgtgcctttatgtatttgccttgttctttgtcgaatgtgtgaaattcygtactgtggtttttcctataatagaaagtagagctgtgtattaaattagactgtgtctctctgatacctttacactactgagaatagcatggttttggccatgtaaaccaattttcaaagttctaatgacatagccatgtgtttttggttttttatatttcattttaaaatttgagtatcaccatacattaattaatactcctgtagtagataagctgtcattaagtaattcccaaaaaaagggccatttgcttgcattactttgaatttaatgttgcgcttgtgcactgtgttaatattgtttgtgatggattggacgttgtgactcttgccttttaagaagaaaaaaaagataggacaaagtatttgaagctcttaaaatgtacatattttggttcttctatctcaaattatttaaaatgcataattcacatttttgtaataattctatgcaattttgtggcatgatgtttcttccacttgtaattttatgtgctttcatcacaaatccaaaggaaagaataaaaatttcttaacacaa

SEQ ID NO: 1758 - DNA, 4057 bp, Homo sapiens
tgagatcgtgtttcatttcaggaagatatatgcgtcaggaaaatttctatcttcttttgtattatcaaggagatatttggagcagagtcaaccctctcagttacataaaataaaaaatggcatattcttggcaaacggatccaaatcctaatgaatcacacgaaaagcagtatgaacaccaagaatttctctttgtaaatcaaccccattcttctagccaagtcagtctgggttttgatcagatagtagatgagatcagtggcaaaattccacactacgagagtgaaattgatgaaaacaccttttttgtgcccactgcaccaaaatgggactcaacagggcattcattaaatgaagcacaccaaatatccttgaatgaattcacttctaaaagccgtgaactctcctggcatcaagttagcaaagcaccagcaattggttttagtccttctgtgttaccaaaacctcaaaatacgaataaagaatgctcctggggaagcataggaaaacatcatggtgctgatgattccagattcagtattttagctcyatcattcacaagtttggataaaattaatctagagaaagaattagaaaatgaaaatcataactaccatataggatttgaaagtagcattcctccaacaaattcatccttctcaagtgacttcatgccgaaagaagagaataaaaggagtggacatgtgaacattgtggaaccatctttgatgcttttgaaaggctctcttcaacccggaatgtgggaaagtacatggcagaagaatatagagtcaataggttgttccattcagctagtggaagtacctcaaagcagcaatacgagtctggcctctttttgcaacaaagtaaaaaaaatcagagaaagatatcatgcasctgatgttaatttcaattctgggaagatctggagcactactacagcatttccgtatcagctcttttctaagaccaagtttaatatacatatttttattgataactcaacacaacctcttcattttatgccatgtgctaattatcttgtcaaagatctaattgcagaaattctgcatttttgcacaaatgaccagctactccccaaagatcatattctaagtgtatgtggctctgaagaatttttacaaaacgaccactgtttggggagccacaaaatgtttcaaaaagataaatctgttattcagctccacctgcagaaaagtagggaagctccaggaaagctatctcgaaagcatgaagaggaccacagtcagttttatctgaatcaacttctagaatttatgcatatttggaaagtatccagacaatgtctcttaacactcatcagaaaatatgacttccacctgaaatacctattgaaaacccaggaaaacgtgtataatattattgaagaagttaaaaaaatatgcagtgttctagggtgtgtggaaaccaaacaaattacagatgcagtaaatgaactaagtctaattcttcagagaaaaggagagaatttttatcaaagttcagagacttcagcaaaaggcttgatagagaaggtaacaactgaactatccacatccatctaccagctaatcaatgtctactgtaacagcttttatgcagattttcagcctgtaaatgtacctagatgcacttcctatctaaatcccgggcttccttcccacctcagcttcacagtgtatgcagcacacaacattccagaaacctgggtgcacaggatcaattttccccttgaaataaagtcacttccaagggaatccatgctcactgtaaaactgtttgggattgcctgtgcaaccaacaatgcaaatttactggcgtggacttgtcttccactgtttccaaaagaaaaatccattctcgggtctatgctgttcagcatgacattacagagtgagcctcccgtagaaatgataactccaggagtgtgggatgtaagtcagccatccccggtgaccctgcagattgattttccagctactgggtgggagtatatgaaacctgattctgaagagaatagaagtaatcttgaagagccactaaaggagtgtataaaacatattgccagactttcacagaaacagactcccctactactctctgaagaaaagaaaagatatttatggttttatcgcttctactgcaataatgaaaactgctcccttcctttagtcctgggtagtgcccctggatgggatgaaaggactgtttcagaaatgcataccattttgagaagatggacattttctcaacctttagaggctcttgggcttttgacttccagttttccagatcaagaaattcgtaaagtggcagttcaacaattagacaacctcttgaatgatgaactactggaatatctcccacagctagttcaggctgtcaagtttgaatggaaccttgagagtcctttagtgcaacttctactccaccgctccttgcagagcatccaggttgcccatcgtctttactggctgctaaaaaatgcagaaaatgaagcttattttaaaagctggtatcagaagctactagctgctctccaattctgtgcaggtaaagccttgaatgatgagttttccaaggagcagaaacttatcaaaattctgggagatattggggaaagagtcaagtctgccagtgaccatcaaagacaggaggtactgaagaaagaaattggcagactagaagagttctttcaagatgtaaatacttgtcatcttcctctgaaccctgccctatgtataaaagggattgatcacgatgcatgttcatattttacatctaatgctttgccattgaagattactttcatcaatgctaatctgatgggcaaaaacatcagcattatttttaaggctggagatgatcttcgtcaggatatgcttgttctgcagcttattcaagtgatggacaatatttggctgcaggaaggcttggatatgcaaatgatcatttatagatgtctatccacaggaaaagaccaaggattggtgcagatggtacctgatgctgtgaccctagcaaagattcatcgccattctggactgataggaccattgaaagaaaatacaattaaaaagtggttcagtcagcacaaccacttaaaggcagattatgaaaaggccttgaggaactttttctactcctgtgctggctggtgtgtggtaacattcatcctgggagtatgtgaccgtcacaatgataatatcatgctgacaaagtcgggccacatgtttcatattgactttggaaaattcttaggtcatgcacaaacatttggagggataaaaagggaccgagctcctttcatttttacttcagagatggaatactttattacagagggtgggaaaaacccacagcattttcaagattttgtggaactttgctgtcgtgcttataatattatcagaaagcacagccaactgctcttgaacctgctggaaatgatgctgtatgcaggactgcctgagctaagtggaattcaagacctgaaatatgtgtataataatcttcgtccacaagacacagacctggaagcaacaagtcattttaccaagaaaataaaggaaagtctggagtgtttccctgttaaattgaataacttgatccacacacttgcacaaatgtcagccataagccctgccaaatctacttcacagacttttcctcaggaatcctgtttgctgagtacaactaggtcgattgaaagagcaacaattttagggttcagcaagaaatccagtaatctgtatctgatccaggtgacacacagcaacaacgaaacaagcctgacagaaaaatcatttgagcagttttcaaaacttcacagccaacttcagaagcagtttgcatcactgactctcccagagtttcctcattggtggcacctaccttttacaaattcagatcacagaagattcagagatctaaatcattacatggaacagatattaaatgtatcacatgaagttacaaacgtatgttataattaatttttctatttttacataaaacatcaactattttatatttt

SEQ ID NO: 1759 - DNA, 1939 bp, Homo sapiens
actgggttaacactrggaaataaaaacttcccacccacttcttgcaggaggctaaatttctttctcagttaaatcctgttacattatacttcagctcttaccatggccttgtcattgggttgaactggagctgtattytagattttgccaacaataacaagcgctgccaagtacttcagctgagatcacccaaataatactctactagcaaaagctttgcgtggcgttctaaccatcagaaactgagatggcaagaaagaagctgaaaaaatttactactttggagattgtgctcagtgttcttctgcttgtgttgtttrtcatcagtattgttctaattgtgcttttagccaaagagtcactgaaatcaacagccccagatcctgggacaactggtaccccagatcctgggacaactggtaccccagatcctggaacaactggtaccacacatgctaggacaacgggtcccccagatcctggaacaactggtaccactcctgtttctgctgaatgtccagtggtaaatgaattggaacgaattaattgcatccctgaccagccgccaacaaaggccacatgtgaccaacgtggctgttgctggaatccccagggagctgtaagtgttccctggtgctactattccaagaatcatagctaccatgtagagggcaaccttgtcaacacaaatgcaggattcacagcccggttgaaaaatctgccttcttcaccagtgtttggaagcaatgttgacaatgttcttctcacagcagaatatcagacatctaatcgtttccactttaagttgactgaccaaaccaataacaggtttgaagtgccccacgaacaygtgcagtccttcagtggaaatgctgctgcttctttgacctaccaagttgaaatctccagacagccatttagcatcaaagtgaccagaagaagcaacaatcgtgttttgtttgactcgagcattgggcccctactgtttgctgaccagttcttgcagctctccactcgactgcctagcactaacgtgtatggcctgggagagcatgtgcaccagcagtatcggcatgatatgaattggaagacctggcccatatttaacagagacacaactcccaatggaaayggaactaatttgtatggtgcgcagacattcttcttgtgccttgaagatgctagtggattgtcctttggggtgtttctgatgaacagcaatgccatggaggttgtccttcagcctgcgccagccatcacttaccgcaccattgggggcattctcgacttctatgtgttcttgggaaacactccagagcaagttgttcaagaatatctagagctcattgggcggccmgcccttccctcctactgggcgcttggatttcacctcagtcgttacgaatatggaaccttagacaacatgagggaagtcgtggagagaaatcgcgcagcacakctcccttatgatgttcagcatgctgatattgattatatggatgagagaagggacttcacttatgattcagtggattttaaaggcttccctgaatttgtcaacgagttacacaataatggacagaagcttgtcatcattgtggatccagccatctccaacaactcttcctcaagtaaaccctatggcccatatgacaggggttcagatatgaagatatgggtgaatagttcagatggagtgactccactcattggggaggtctggcctggacaaactgtgtttcctgattataccaatcccaactgtgctgtttggtggacaaaggaatttgagctttttcacaatcaagtagagtttgatggaatctggattgatatgaatgaagtctccaactttgttgatggttcggtctcaggatgttccacaaacaacctaaataatcccccattcactcccagtaagtcttggtggtcagcagat

SEQ ID NO: 1760 - DNA, 3874 bp, Homo sapiens
attgctaagccatccttcagacagagagggagcggctgcaagaggtaatgagagatggcaagaaagaagctgaaaaaatttactactttggagattgtgctcagtgttcttctgcttgtgttgtttrtcatcagtattgttctaattgtgcttttagccaaagagtcactgaaatcaacagccccagatcctgggacaactggtaccccagatcctgggacaactggtaccccagatcctggaacaactggtaccacacatgctaggacaacgggtcccccagatcctggaacaactggtaccactcctgtttctgctgaatgtccagtggtaaatgaattggaacgaattaattgcatccctgaccagccgccaacaaaggccacatgtgaccaacgtggctgttgctggaatccccagggagctgtaagtgttccctggtgctactattccaagaatcatagctaccatgtagagggcaaccttgtcaacacaaatgcaggattcacagcccggttgaaaaatctgccttcttcaccagtgtttggaagcaatgttgacaatgttcttctcacagcagaatatcagacatctaatcgtttccactttaagttgactgaccaaaccaataacaggtttgaagtgccccacgaacaygtgcagtccttcagtggaaatgctgctgcttctttgacctaccaagttgaaatctccagacagccatttagcatcaaagtgaccagaagaagcaacaatcgtgttttgtttgactcgagcattgggcccctactgtttgctgaccagttcttgcagctctccactcgactgcctagcactaacgtgtatggcctgggagagcatgtgcaccagcagtatcggcatgatatgaattggaagacctggcccatatttaacagagacacaactcccaatggaaayggaactaatttgtatggtgcgcagacattcttcttgtgccttgaagatgctagtggattgtcctttggggtgtttctgatgaacagcaatgccatggaggttgtccttcagcctgcgccagccatcacttaccgcaccattgggggcattctcgacttctatgtgttcttgggaaacactccagagcaagttgttcaagaatatctagagctcattgggcggccmgcccttccctcctactgggcgcttggatttcacctcagtcgttacgaatatggaaccttagacaacatgagggaagtcgtggagagaaatcgcgcagcacakctcccttatgatgttcagcatgctgatattgattatatggatgagagaagggacttcacttatgattcagtggattttaaaggcttccctgaatttgtcaacgagttacacaataatggacagaagcttgtcatcattgtggatccagccatctccaacaactcttcctcaagtaaaccctatggcccatatgacaggggttcagatatgaagatatgggtgaatagttcagatggagtgactccactcattggggaggtctggcctggacaaactgtgtttcctgattataccaatcccaactgtgctgtttggtggacaaaggaatttgagctttttcacaatcaagtagagtttgatggaatctggattgatatgaatgaagtctccaactttgttgatggttcggtctcaggatgttccacaaacaacctaaataatcccccattcactcccagaatcctggatgggtacctgttctgcaagactctctgtatggatgcagtgcagcactggggcaagcagtatgacattcacaatctgtatggctactccatggcggtcgccacagcagaagctgccaagactgtgttccctaataagagaagcttcattctgacccgttctacctttgcgggctctggcaagtttgcagcacattggttaggagacaacactgccacctgggatgacctgagatggtccatccctggcgtgcttgagttcaacctttttggcatcccaatggtgggtcctgacatatgtggctttgctttggacacccctgaggagctctgtaggcggtggatgcagttgggtgcattttatccgttttctagaaatcacaatggccaaggctacaaggaccaggatcctgcctcctttggagctgactccctgctgttgaattcctccaggcactaccttaacatccgctatactctattgccctacctatacaccctcttcttccgtgctcacagccgaggggacacggtggccaggccccttttgcatgagttctacgaggacaacagcacttgggatgtgcaccaacagttcttatgggggcccggcctcctcatcactccagttctggatgaaggtgcagagaaagtgatggcatatgtgcctgatgctgtctggtatgactacgagactgggagccaagtgagatggaggaagcaaaaagtcgagatggaacttcctggagacaaaattggacttcaccttcgaggaggctacatcttccccacacagcagccaaatacaaccactctggccagtcgaaagaaccctcttggtcttatcattgccctagatgagaacaaagaagcaaaaggagaacttttctgggatgatggggaaacgaaggatactgtggccaataaagtgtatcttttatgtgagttttctgtcactcaaaaccgcttggaggtgaatatttcacaatcaacctacaaggaccccaataatttagcatttaatgagattaaaattcttgggacggaggaacctagcaatgttacagtgaaacacaatggtgtcccaagtcagacttctcctacagtcacttatgattctaacctgaaggttgccattatcacagatattgatcttctcctgggagaagcatacacagtggaatggagcataaagataagggatgaagaaaaaatagactgttaccctgatgagaatggtgcttctgcagaaaactgcactgcccgtggctgtatctgggaggcatccaattcttctggagtccctttttgctattttgtcaacgacctatactctgtcagtgatgttcagtataattcccatggggccacagctgacatctccttaaagtcttccgttyatgccaatgccttcccctccacacccgtgaacccccttcgcctggatgtcacttaccataagaatgaaatgctrcagttcaagatttatgatcccaacaagaatcggtatgaagttccagtccctctgaacatacccagcatgccatccagcacccctgagggtcaactctatgatgtgctcattaagaagaatccatttgggattgaaattcgccggaagagtacaggcactataatttgggactctcagctccttggctttaccttcagtgacatgtttatccgcatctccacccgccttccctccaagtacctctatggctttggggaaactgagcacaggtcctataggagagacttggagtggcacacttgggggatgttctcccgagaccagcccccagggtacaagaagaattcctatggtgtccacccctactacatggggctggaggaggacggcagtgcccatggagtgctcctgctgaacagcaatgccatggatgtgacgttccagcccctgcctgccttgacataccgcaccacagggggagttctggacttttatgtgttcttggggccgactccagagcttgtcacccagcagtacactgagttgattggccggcctgtgatggtaccttactggtctttggggttccagctgtgtcgctatggctaccagaatgactctgagatcgccagcttgtatgatgagatggtggctgcccagatcccttatg

SEQ ID NO: 1761 - DNA, 4067 bp, Homo sapiens
actgggttaacactrggaaataaaaacttcccacccacttcttgcaggaggctaaatttctttctcagttaaatcctgttacattatacttcagctcttaccatggccttgtcattgggttgaactggagctgtattytagattttgccaacaataacaagcgctgccaagtacttcagctgagatcacccaaataatactctactagcaaaagctttgcgtggcgttctaaccatcagaaactgagatggcaagaaagaagctgaaaaaatttactactttggagattgtgctcagtgttcttctgcttgtgttgtttrtcatcagtattgttctaattgtgcttttagccaaagagtcactgaaatcaacagccccagatcctgggacaactggtaccccagatcctgggacaactggtaccccagatcctggaacaactggtaccacacatgctaggacaacgggtcccccagatcctggaacaactggtaccactcctgtttctgctgaatgtccagtggtaaatgaattggaacgaattaattgcatccctgaccagccgccaacaaaggccacatgtgaccaacgtggctgttgctggaatccccagggagctgtaagtgttccctggtgctactattccaagaatcatagctaccatgtagagggcaaccttgtcaacacaaatgcaggattcacagcccggttgaaaaatctgccttcttcaccagtgtttggaagcaatgttgacaatgttcttctcacagcagaatatcagacatctaatcgtttccactttaagttgactgaccaaaccaataacaggtttgaagtgccccacgaacaygtgcagtccttcagtggaaatgctgctgcttctttgacctaccaagttgaaatctccagacagccatttagcatcaaagtgaccagaagaagcaacaatcgtgttttgtttgactcgagcattgggcccctactgtttgctgaccagttcttgcagctctccactcgactgcctagcactaacgtgtatggcctgggagagcatgtgcaccagcagtatcggcatgatatgaattggaagacctggcccatatttaacagagacacaactcccaatggaaayggaactaatttgtatggtgcgcagacattcttcttgtgccttgaagatgctagtggattgtcctttggggtgtttctgatgaacagcaatgccatggaggttgtccttcagcctgcgccagccatcacttaccgcaccattgggggcattctcgacttctatgtgttcttgggaaacactccagagcaagttgttcaagaatatctagagctcattgggcggccmgcccttccctcctactgggcgcttggatttcacctcagtcgttacgaatatggaaccttagacaacatgagggaagtcgtggagagaaatcgcgcagcacakctcccttatgatgttcagcatgctgatattgattatatggatgagagaagggacttcacttatgattcagtggattttaaaggcttccctgaatttgtcaacgagttacacaataatggacagaagcttgtcatcattgtggatccagccatctccaacaactcttcctcaagtaaaccctatggcccatatgacaggggttcagatatgaagatatgggtgaatagttcagatggagtgactccactcattggggaggtctggcctggacaaactgtgtttcctgattataccaatcccaactgtgctgtttggtggacaaaggaatttgagctttttcacaatcaagtagagtttgatggaatctggattgatatgaatgaagtctccaactttgttgatggttcggtctcaggatgttccacaaacaacctaaataatcccccattcactcccagaatcctggatgggtacctgttctgcaagactctctgtatggatgcagtgcagcactggggcaagcagtatgacattcacaatctgtatggctactccatggcggtcgccacagcagaagctgccaagactgtgttccctaataagagaagcttcattctgacccgttctacctttgcgggctctggcaagtttgcagcacattggttaggagacaacactgccacctgggatgacctgagatggtccatccctggcgtgcttgagttcaacctttttggcatcccaatggtgggtcctgacatatgtggctttgctttggacacccctgaggagctctgtaggcggtggatgcagttgggtgcattttatccgttttctagaaatcacaatggccaaggctacaaggaccaggatcctgcctcctttggagctgactccctgctgttgaattcctccaggcactaccttaacatccgctatactctattgccctacctatacaccctcttcttccgtgctcacagccgaggggacacggtggccaggccccttttgcatgagttctacgaggacaacagcacttgggatgtgcaccaacagttcttatgggggcccggcctcctcatcactccagttctggatgaaggtgcagagaaagtgatggcatatgtgcctgatgctgtctggtatgactacgagactgggagccaagtgagatggaggaagcaaaaagtcgagatggaacttcctggagacaaaattggacttcaccttcgaggaggctacatcttccccacacagcagccaaatacaaccactctggccagtcgaaagaaccctcttggtcttatcattgccctagatgagaacaaagaagcaaaaggagaacttttctgggatgatggggaaacgaaggatactgtggccaataaagtgtatcttttatgtgagttttctgtcactcaaaaccgcttggaggtgaatatttcacaatcaacctacaaggaccccaataatttagcatttaatgagattaaaattcttgggacggaggaacctagcaatgttacagtgaaacacaatggtgtcccaagtcagacttctcctacagtcacttatgattctaacctgaaggttgccattatcacagatattgatcttctcctgggagaagcatacacagtggaatggagcataaagataagggatgaagaaaaaatagactgttaccctgatgagaatggtgcttctgcagaaaactgcactgcccgtggctgtatctgggaggcatccaattcttctggagtccctttttgctattttgtcaacgacctatactctgtcagtgatgttcagtataattcccatggggccacagctgacatctccttaaagtcttccgttyatgccaatgccttcccctccacacccgtgaacccccttcgcctggatgtcacttaccataagaatgaaatgctrcagttcaagatttatgatcccaacaagaatcggtatgaagttccagtccctctgaacatacccagcatgccatccagcacccctgagggtcaactctatgatgtgctcattaagaagaatccatttgggattgaaattcgccggaagagtacaggcactataatttgggactctcagctccttggctttaccttcagtgacatgtttatccgcatctccacccgccttccctccaagtacctctatggctttggggaaactgagcacaggtcctataggagagacttggagtggcacacttgggggatgttctcccgagaccagcccccagggtacaagaagaattcctatggtgtccacccctactacatggggctggaggaggacggcagtgcccatggagtgctcctgctgaacagcaatgccatggatgtgacgttccagcccctgcctgccttgacataccgcaccacagggggagttctggacttttatgtgttcttggggccgactccagagcttgtcacccagcagtacactgagttgattggccggcctgtgatggtaccttactggtctttggggttccagctgtgtcgctatggctaccagaatgactctgagatcgccagcttgtatgatgagatggtggctgcccagatcccttatg

SEQ ID NO: 1762 - DNA, 1399 bp, Homo sapiens
atggtgtttgctatgagggcttgtcctctgttccagtctgatggatttcagtctgaatccaaagaacagtttattaatcgaaagaaccctcttggtcttatcattgccctagatgagaacaaagaagcaaaaggagaacttttctgggatgatggggaaacgaaggatactgtggccaataaagtgtatcttttatgtgagttttctgtcactcaaaaccgcttggaggtgaatatttcacaatcaacctacaaggaccccaataatttagcatttaatgagattaaaattcttgggacggaggaacctagcaatgttacagtgaaacacaatggtgtcccaagtcagacttctcctacagtcacttatgattctaacctgaaggttgccattatcacagatattgatcttctcctgggagaagcatacacagtggaatggagcataaagataagggatgaagaaaaaatagactgttaccctgatgagaatggtgcttctgcagaaaactgcactgcccgtggctgtatctgggaggcatccaattcttctggagtccctttttgctattttgtcaacgacctatactctgtcagtgatgttcagtataattcccatggggccacagctgacatctccttaaagtcttccgttyatgccaatgccttcccctccacacccgtgaacccccttcgcctggatgtcacttaccataagaatgaaatgctrcagttcaagatttatgatcccaacaagaatcggtatgaagttccagtccctctgaacatacccagcatgccatccagcacccctgagggtcaactctatgatgtgctcattaagaagaatccatttgggattgaaattcgccggaagagtacaggcactataatttgggactctcagctccttggctttaccttcagtgacatgtttatccgcatctccacccgccttccctccaagtacctctatggctttggggaaactgagcacaggtcctataggagagacttggagtggcacacttgggggatgttctcccgagaccagcccccagggtacaagaagaattcctatggtgtccacccctactacatggggctggaggaggacggcagtgcccatggagtgctcctgctgaacagcaatgccatggatgtgacgttccagcccctgcctgccttgacataccgcaccacagggggagttctggacttttatgtgttcttggggccgactccagagcttgtcacccagcagtacactgagttgattggccggcctgtgatggtaccttactggtctttggggttccagctgtgtcgctatggctaccagaatgactctgagatcgccagcttgtatgatgagatggtggctgcccagatcccttatg

SEQ ID NO: 1763 - DNA, 2765 bp, Homo sapiens
ggcggggagggggcagtccacgaacttttgtcattcagcctgggagaccacggtgacattcctgtctgcgctgcgggcaggccagcctctccggccctggactagggggcgccgccgagagaagccgccgcaggctgcagagtcgccgaccgcgctgttcgcaggcagaccccgggctgcccaccgcggcctagcgcgcgccggatggcaggagaagtgtccgcggccacgggccgcttttcgctggagcggttgggcctcccgggcctggccctcgccgcggccctgctgctcctggccctctgcttgcttgtccggcgcaccaggagacccggtgagcctccattgataaaaggttggcttccttatcttggagtggtcctgaacttacgaaaagaccccttaaggttcatgaaaacacttcaaaagcaacatggtgacactttcacagttcttcttggtggaaagtacataacatttatcctggaccccttccagtaccagctagtgataaaaaatcataaacaattaagctttcgagtattttctaataaattattagagaaagcatttagcatcagtcagttgcaaaaaaatcatgacatgaatgatgagcttcacctctgctatcaatttttgcaaggcaaatctttggacatactcttggaaagcatgatgcagaatctaaaacaagtttttgaaccccagctgttaaaaaccacaagttgggacacggcagaactgtatccattctgcagctcaataatatttgagatcacatttacaactatatatggaaaagttattgtttgtgacaacaacaaatttattagtgagctaagagatgattttttaaaatttgatgacaagtttgcatatttagtatccaacatacccattgagcttctaggaaatgtcaagtctattagagagaaaattataaaatgcttctcatcagaaaagttagccaagatgcaaggatggtcagaagtttttcaaagcaggcaagatgtcctggagaaatattatgtgcacgaggaccttgaaataggagcacatcatttaggctttctctgggcctctgtggcaaacactattccaactatgttctgggcaatgtattatcttctgcggcacccagaagctatggcagcagtgcgtgacgaaattgaccrtttgctgcagtcaacaggtcaaaagaaagggtctggatttcccatccacctcaccagagamcaattggacagcctaatctgcctagaaagcagcatttttgaagctttacgactgtcctcatattcaaccaccattcgttttgttgaggaggatttgactctcagttcagagaccggggactactgtgtgygaaagggagacttggtagccatctttcctccagtcctacatggtgaccctgaaatctttgaagctccagaggagtttagatatgatcgttttatagaagatggtaagaagaaaaccacctttttcaaaagagggaaaaagctgaagtgttacctaatgccgtttggaactggaaccagcaaatgtccaggccgattttttgcacttatggaaataaaacaattgttggttatacttttaacttattttgatttagaaataattgatgataagcccataggactaaactacagccgcttgttgtttggtattcagtatccagattctgatgttttatttagatacaaagtgaaatcttagagaagctaaaaggaaagaaaataaatctatcaaaattaccctaaacatcctaagctcatctatttctttttaatttctgcaaatgtaattgatttatttgtttaaaaagcgctaatttctatttgatctgatatcagtccagtttgtccttagtcacaaagcccatcataatataaaacaggatggtggcaggaaaatggacatcaaaatcaacttaagggtaggctcaaaacagggttgttgttgtttttttagtttctccttgttgtgattttcacctgttataataaatgtaccttcacaccaatagattgggcactgtggaatttaaatcactcaaattgttctctaatatgtaaaattacactttgaactactagaaaattgtgctggaaatggacacagtctaacaaattccaaattctcacagaagaaggaaattgaatttccatgagttacactggatgaaaatgttcccttcaagtataatattaataatacctatatttccagggtatgtgtgcattaaatgagtttcacagtagattgaatgcttcaacttcacttcaatatttaatcatgcataaatgttccttattactttgtatactatggctcaatagaacaaaatttctggttacataagacctttcatgttcaagttagatactgataagatttaatgtataagaaaacacagaacctattatatattcagaaattgccctagacattagtattaggtttattatgggagcaaatgttgaaataattacagcattgattatatcatttggctttagtataaactatacaggttatgcaaatattgcaattaaccctttcctaaatgctttcatatatataaactgagaagctagatatagtatttggttttgatgtctcaccttttggatttggagttcatgtgttctattttgaattacaacatcatgtaatgcagtgtaatttcatatgacacatgcagcattgtgtcaataattcaaagattttttttcaattgagagagtatctggctg

SEQ ID NO: 1764 - DNA, 2480 bp, Homo sapiens
atttttcttttgttcttttatctttttttttttccttgtaggagacccggtgagcctccattgataaaaggttggcttccttatcttggagtggtcctgaacttacgaaaagaccccttaaggttcatgaaaacacttcaaaagcaacatggtgacactttcacagttcttcttggtggaaagtacataacatttatcctggaccccttccagtaccagctagtgataaaaaatcataaacaattaagctttcgagtattttctaataaattattagagaaagcatttagcatcagtcagttgcaaaaaaatcatgacatgaatgatgagcttcacctctgctatcaatttttgcaaggcaaatctttggacatactcttggaaagcatgatgcagaatctaaaacaagtttttgaaccccagctgttaaaaaccacaagttgggacacggcagaactgtatccattctgcagctcaataatatttgagatcacatttacaactatatatggaaaagttattgtttgtgacaacaacaaatttattagtgagctaagagatgattttttaaaatttgatgacaagtttgcatatttagtatccaacatacccattgagcttctaggaaatgtcaagtctattagagagaaaattataaaatgcttctcatcagaaaagttagccaagatgcaaggatggtcagaagtttttcaaagcaggcaagatgtcctggagaaatattatgtgcacgaggaccttgaaataggagcacatcatttaggctttctctgggcctctgtggcaaacactattccaactatgttctgggcaatgtattatcttctgcggcacccagaagctatggcagcagtgcgtgacgaaattgaccrtttgctgcagtcaacaggtcaaaagaaagggtctggatttcccatccacctcaccagagamcaattggacagcctaatctgcctagaaagcagcatttttgaagctttacgactgtcctcatattcaaccaccattcgttttgttgaggaggatttgactctcagttcagagaccggggactactgtgtgygaaagggagacttggtagccatctttcctccagtcctacatggtgaccctgaaatctttgaagctccagaggagtttagatatgatcgttttatagaagatggtaagaagaaaaccacctttttcaaaagagggaaaaagctgaagtgttacctaatgccgtttggaactggaaccagcaaatgtccaggccgattttttgcacttatggaaataaaacaattgttggttatacttttaacttattttgatttagaaataattgatgataagcccataggactaaactacagccgcttgttgtttggtattcagtatccagattctgatgttttatttagatacaaagtgaaatcttagagaagctaaaaggaaagaaaataaatctatcaaaattaccctaaacatcctaagctcatctatttctttttaatttctgcaaatgtaattgatttatttgtttaaaaagcgctaatttctatttgatctgatatcagtccagtttgtccttagtcacaaagcccatcataatataaaacaggatggtggcaggaaaatggacatcaaaatcaacttaagggtaggctcaaaacagggttgttgttgtttttttagtttctccttgttgtgattttcacctgttataataaatgtaccttcacaccaatagattgggcactgtggaatttaaatcactcaaattgttctctaatatgtaaaattacactttgaactactagaaaattgtgctggaaatggacacagtctaacaaattccaaattctcacagaagaaggaaattgaatttccatgagttacactggatgaaaatgttcccttcaagtataatattaataatacctatatttccagggtatgtgtgcattaaatgagtttcacagtagattgaatgcttcaacttcacttcaatatttaatcatgcataaatgttccttattactttgtatactatggctcaatagaacaaaatttctggttacataagacctttcatgttcaagttagatactgataagatttaatgtataagaaaacacagaacctattatatattcagaaattgccctagacattagtattaggtttattatgggagcaaatgttgaaataattacagcattgattatatcatttggctttagtataaactatacaggttatgcaaatattgcaattaaccctttcctaaatgctttcatatatataaactgagaagctagatatagtatttggttttgatgtctcaccttttggatttggagttcatgtgttctattttgaattacaacatcatgtaatgcagtgtaatttcatatgacacatgcagcattgtgtcaataattcaaagattttttttcaattgagagagtatctggctg

SEQ ID NO: 1765 - DNA, 5065 bp, Homo sapiens
tgggaggcggggccgaccaagagcaggagctggagtctgagccggtggttgcagcggaggcggtgatgtcggtgcaggttgtgtcagccgcggctgccgccaaggtgcctgaggtggagctgaaggacctgagcccctccgaggcggagtcgcaactaggactgagcacggccgccgtgggcgccatggcccccccggcgggcggtggagaccctgaggctccagctcccgccgcggagcggcccccggtccccggcccgggctcggggcccgccgccgctctcagccccgccgccgggaaggtgcctcaggcgtcggccatgaagcggagcgacccacatcaccagcaccagcggcaccgcgacggcggcgaggccctggtcagccccgacggcaccgtcaccgaggcgccgcgcacagtcaagaagatccagtttgctgaccagaagcaagaattcaacaaacgtcccaccaaaattggacgtcgctctttgtctcgttccatttctcagtcatctactgacagctacagctcagcggcttcatatacagatagctctgatgatgagacatcgcccagggacaagcagcaaaagaactctaagggaagcagtgacttctgtgttaagaacatcaaacaggcagagtttggacgaagagaaattgaaattgctgaacaagaaatgcctgcattgatggctttgaggaagagagctcaaggagaaaagcctttggctggagccaaaatcgtgggttgcacacacatcactgctcagactgctgtgcttatggaaactctgggtgctctgggggcccagtgccgatgggctgcctgcaacatctattccactctcaatgaagtggctgctgctctagcagaaagtggatttcctgtttttgcctggaagggagagtcagaagatgacttttggtggtgtatcgatagatgtgtgaatgtggagggctggcagccaaacatgatcttggatgatggaggggatcttacccactggatttataaaaagtatcccaacatgtttaagaaaatcaagggcatagtagaggagagtgttactggagttcacaggctgtaccaactgtccaaagctgggaagctgtgtgttccagccatgaatgtcaatgactcagtcaccaaacagaaatttgacaacctctactgttgccgtgaatcaattcttgatggacttaaaaggacaacagacatgatgtttggtggaaagcaagtggtagtctgtggctatggagaggtggggaaagggtgctgtgctgccctgaaagccatgggctccattgtgtatgtaactgaaattgaccccatctgtgccctgcaagcctgtatggatggatttcgactggtgaaattaaatgaggtcatccgacaagtggacattgttattacctgtacaggtaacaagaatgtggtaaccagagagcacttggaccgtatgaagaatagctgcatcgtttgtaacatgggacattccaacacagagattgacgtggcgagtctgcggacaccagaactgacctgggagcgagtgagatctcaagttgaccatgtgatatggcctgatggcaagaggatagtactgctggcagagggccgcctgctgaaccttagctgctccacagtgcctacatttgtgctctcaatcactgctactactcaggctcttgccttgatagagctttacaatgctcctgagggtcgctataagcaggatgtctacctgttgcccaagaagatggatgagtatgtggccagcctacacctgcctacctttgatgcccacttgacagagctgacagatgaacaggccaagtatytgggactcaacaagaatgggcccttcaagcctaattactacaggtattaagttcctgtaactcaaaccagaatttttaaggaatagaactccaagccttttctccactactatacaagaaagaattcagcaagctgcttctccaatcaaagctgcctgccgtgctcaccctgtgtgttaggttatttatttattaaaatcaagaatcctgtgcctgyagtgttggcccagagtgtggttactgccctgagggccatgaaagccacagaggatgggctgaggaaggaaagaaatggggttactgctcccagtgcatcatttgcatcattccccattgactgaatcctcagcagtggccgtttttcctcttgtccaggctcacgagttagtccagggattccatactccctattccctggagttttctggaataaattttcagcacctgcttttctcagcttggcccttccccgggtgaggccgtttggaattaacatggccagtgtttcacacaagattgggttcccaatcttgaccatcactatcactgccttctttatataaaggctaataaggaaggagtgttatttatggctttgccaagctacatcaagaactcagctgtgctgtgcctaccaggggtctcctttcttacccaggactcctttcttctccttgaatatttatgtccattttaacacttcctggttgcaagagggatgtgcctccattatttcctccacagttttggtatttgtcagacatttgttctgctgtctttctaatccagccaacgtctgctcaggaagtggggccagctccactgggacccatagttttacttccttgtcatttgattggatagtttccaaggaagcccctccagattggcactatctcagaaaaggagagcttgttgtgaaacactgcttcctgaaacttcctgctattgcctaaagctacgtctgaaactgagtagggaaaggcatacttttccagggacttagggggataggctttggaaatgggacaggtctttcagactcacagcttgataccctaacaaagcagagtatatttatttgtttcccaggaaggccattgcagtttgactggctgagggatacagagatgaaattgtaaactgtatccagattatcaaagctaatttgactagtttgaacctcgtcagacattcattcctttggccattgccatggatgaaaccgagatctgcagtctgatctgtggacttctctgctggcatatcttttatgatttaacctcttccatttgatgattctgtatttcrgagtcagtttcttgagtaactccagtgctacaaaaagaattagtaatgtggtgtgggcagcgtgacattttatgtcccacccaaaaattggattccttttggagactgatctgttggtctcaggcatttcattaggaccagattggttctaagagttagtctggactggccctaggaaacttgaattaaataagcctcttccccttaccgatcctttttaacactctcaggtttgtttgtttcccacttttttcctatgctggtctgcctcaaagtctcaagaccaaggtgactcaagataacaccagaccacgcatgatcaccaaaaccttcccatcctgattctcttcttctacctctaccctctccaacttctcctggtcttcacatatactctcaaagctagtctgaaagtgaccttactttcggaagtagggaagtggaactttggtaaatgactgtttgcctcatttaatagtatacaggctcagcccatagactacagttcttcagaggccatatgtctcagcaagtactggttatattctttttttgtaaggaagatcataaatgctaaaaattccactaagccattcagttcttccttttgcctacctagtcctgatttttgtattaattggttccctttagcaagggattcagatctttgtaccttatcttatatccagagcagattccatttggcagatagatggtctctagcctattgtattcttagaccaaaaatcataacctgctgtttctcagcaaagccttgctctctggagcttactatgtgctggtacttaaagagtacattctgccttgctrtagtgaagagacccactccaaataaaaaaggggccacacggggcttctaagttaggttgccagtgttgctgcccatgatgagttatttgcctctgagtttcagatgacctctctgtagggacactgtgttatcaaccattaagaagaaagaaccacaagcctcccaagtatttgggttctatcttagggttgaaatctggtcattattccctctacccttggaatcagagcaatgtgtcttctttcctccaacctcttaccttagatgcatcctgsttatctggaagcatgggaaagaaggctacttatctctttgtatgtggctccagtctgtgaggatacataacattttctctacaatgaatctgtgctaatattttgccttctttctttcttttcttttcacccttagagacagggtttcactatgttgcccaggctggtctcaaactcctgggctcaagcaatcctcctgcctcagcttcctgagtagctggaaccacaggtgtgtgctaccgtgcctggcacttttttgccttcttaatggagatattcagttttctttttttcatttaaacaaagaaaaaaaatgtatctactctaccttccctctgctctcctccctccctatcctacttgcccatatgagcacggctccccatggccacatactcctgcaaagcttttatgctgcttcgcttttctctaaacagatctgatattgctgctcctgtggttttctcaaaattaactttgccgtggtttttaaaaaggaatcaaaatgcattgttgcattaagctttttcaataaaggaaaattacggaaggaaaataggcaacaccagcaaattatatgtggacaggttctaaactctatatatacatatatatatatatatctatatatctatatacgtaatcatctagttctgtcatcttactgaaaggaataacacttctaaagatcaccatttctgagaagttcttggaaatctttatgtctaagtgattgtattagatcagcaataatgactatgtaatctcaaaaaacaaataaaatattcttaacatggac

SEQ ID NO: 1766 - DNA, 1696 bp, Homo sapiens
tgcaagcaaggttcacacaccccrtttaatcttcacaccaccacggggtagtcactattatccccattttacaggattaaaacactgacgctgggaggttgacagagttacaccaaatcacacagaggagctgggcttccccckacctcctccgctcaagtctccctgtccccgggaggtgcggaaggaggcaacagacgcttggcccataggtggagcaattggcgaaggcttcgcccgacgccggaactgcgagctctcagcgggagccgagacggtgcagggcsggagaagcaccttcactcccagcctgcgccccgatgctgcgcgttctgtgcctcctgcgcccctggaggccccttcgggcccgcggctgcgcttccgacggggcggccgggggctcagagatccaagtgcgcgccctggcgggtccggaccaagggatcactgagattctgatgaacagaccttctgcccgcaatgccttggggaatgtcttcgtcagtgagctgctggaaactctggcccagctgcgggaggaccggcaagtgcgtgtcctgctcttcagaagtggagtgaagggcgtgttctgtgcaggtgcagacctgaaggagcgggaacagatgagtgaagcagaggtgggggtgtttgtccagcgactccggggcctgatgaatgacatcgcttcctcggcagtcatgggactgattgagaccacrcgagggctcctcccgggggcaggagggactcagaggctgccccgttgtctgggggtggccctggcgaaggagctcatcttcacgggccgacgactgagtggaactgaggcccacgtactggggctggtgaatcacgctgtggcccagaacgaggagggggacgccgcctaccagcgggcacgagcactggcccaggagatcctgccccaggcccccattgccgtgcggctgggcaaagtagccattgaccgaggaacggaggtggacattgcatctgggatggccattgaagggatgtgctatgcccagaatattccaacccgggaccggctagagggcatggcagccttcagggagaagcggactcccaaatttgttggcaaatgacccccattttaaccttcagcatgggagmtgcatgccctgaagagcaggatccagaaggaagatttgtggccagattgccttcatcatttcacctctccagacttccatttcttcacaaggatgatgatggaaataaaatgactggcgtgatgcctggaaccaaggtgctgatcctaccacctactgctaccttccttagcttcaccctggctagaaataatcacgagggttgggtttgctttggaaaatgcctgtctctctacytgaatgataaagaattaaattagatctctctgagtcttggtatcattggctctcagcccctgacctctctcagttatcaggcactcattagagatgtcagaagattttaagatacccctagtttcttcctgtgaacaacagaggtaataaataaactctgacatcggttgaacatgtgtcaggggtcagactgcagatcccagtctctgccagttacttgctgtataaccgtggacaaattgtttaaatgctctgggcctcagcttcctcacctacaaaacaaaacttgtgaagatttagcaaaataaaaacacttcatattcaat

SEQ ID NO: 1767 - DNA, 1621 bp, Homo sapiens
tgcaagcaaggttcacacaccccrtttaatcttcacaccaccacggggtagtcactattatccccattttacaggattaaaacactgacgctgggaggttgacagagttacaccaaatcacacagaggagctgggcttccccckacctcctccgctcaagtctccctgtccccgggaggtgcggaaggaggcaacagacgcttggcccataggtggagcaattggcgaaggcttcgcccgacgccggaactgcgagctctcagcgggagccgagacggtgcagggcsggagaagcaccttcactcccagcctgcgccccgatgctgcgcgttctgtgcctcctgcgcccctggaggccccttcgggcccgcggctgcgcttccgacggggcggccgggggctcagagatccaagtgcgcgccctggcgggtccggaccaagggatcactgagattctgatgaacagaccttctgcccgcaatgccttggggaatgtcttcgtcagtgagctgctggaaactctggcccagctgcgggaggaccggcaagtgcgtgtcctgctcttcagaagtggagtgaagggcgtgttctgtgcaggtgcagacctgaaggagcgggaacagatgagtgaagcagaggtgggggtgtttgtccagcgactccggggcctgatgaatgacatcgcttcctcggcagtcatgggactgattgagaccacrcgagggctcctcccgggggcaggagggactcagaggctgccccgttgtctgggggtggccctggcgaaggagctcatcttcacgggccgacgactgagtggaactgaggcccacgtactggggctggtgaatcacgctgtggcccagaacgaggagggggacgccgcctaccagcgggcacgagcactggcccaggagatcctgccccaggcccccattgccgtgcggctgggcaaagtagccattgaccgaggaacggaggtggacattgcatctgggatggccattgaagggatgtgctatgcccagaatattccaacccgggaccggctagagggcatggcagccttcagggagaagcggactcccaaatttgttggcaaatgacccccatttcatttcacctctccagacttccatttcttcacaaggatgatgatggaaataaaatgactggcgtgatgcctggaaccaaggtgctgatcctaccacctactgctaccttccttagcttcaccctggctagaaataatcacgagggttgggtttgctttggaaaatgcctgtctctctacytgaatgataaagaattaaattagatctctctgagtcttggtatcattggctctcagcccctgacctctctcagttatcaggcactcattagagatgtcagaagattttaagatacccctagtttcttcctgtgaacaacagaggtaataaataaactctgacatcggttgaacatgtgtcaggggtcagactgcagatcccagtctctgccagttacttgctgtataaccgtggacaaattgtttaaatgctctgggcctcagcttcctcacctacaaaacaaaacttgtgaagatttagcaaaataaaaacacttcatattcaat

SEQ ID NO: 1768 - DNA, 2328 bp, Homo sapiens
tgcaagcaaggttcacacaccccrtttaatcttcacaccaccacggggtagtcactattatccccattttacaggattaaaacactgacgctgggaggttgacagagttacaccaaatcacacagaggagctgggcttccccckacctcctccgctcaagtctccctgtccccgggaggtgcggaaggaggcaacagacgcttggcccataggtggagcaattggcgaaggcttcgcccgacgccggaactgcgagctctcagcgggagccgagacggtgcagggcsggagaagcaccttcactcccagcctgcgccccgatgctgcgcgttctgtgcctcctgcgcccctggaggccccttcgggcccgcggctgcgcttccgacggggcggccgggggctcagagatccaagtgcgcgccctggcgggtccggaccaaggctgtaggttccatgaggacaggccttgagtctgtcctggtctctggaatcacggtgtctagtagaggccagcacacagcaaatatataaatgtacaaatgagtgaatgaagagaatctgattggccttaaggaacttacgcacttaaaataattgggcagaagagaagcagtgaaggagtgcagaggcatcacctgaaagtttacaagtccttccactttctctctgaggcagaaagagcaagggtttttctctccattttatggttgggaaaattgaggcctgcctgagtgtgtgacttgtggcaagtcactctggtcatctagggcagaggctccccagakcccaggcctcctgcctccagtccccagcccgcagcccaggattaggcagagccagctgctttcccgtggctgccctgactccttacagggatcactgagattctgatgaacagaccttctgcccgcaatgccttggggaatgtcttcgtcagtgagctgctggaaactctggcccagctgcgggaggaccggcaagtgcgtgtcctgctcttcagaagtggagtgaagggcgtgttctgtgcaggtgcagacctgaaggagcgggaacagatgagtgaagcagaggtgggggtgtttgtccagcgactccggggcctgatgaatgacatcgcagccttccctgcacccaccattgcggctatggatgggtttgccttgggcggaggcctagagcttgccctggcctgtgacctccgagtggcaggaactctccttgttccaagcgtcgtacctcgtgtgatccttagcggctctctgaagcagacagaagagggccagccatctttcttccacctttgaggcttgggaaggcttcctcggcagtcatgggactgattgagaccacrcgagggctcctcccgggggcaggagggactcagaggctgccccgttgtctgggggtggccctggcgaaggagctcatcttcacgggccgacgactgagtggaactgaggcccacgtactggggctggtgaatcacgctgtggcccagaacgaggagggggacgccgcctaccagcgggcacgagcactggcccaggagatcctgccccaggcccccattgccgtgcggctgggcaaagtagccattgaccgaggaacggaggtggacattgcatctgggatggccattgaagggatgtgctatgcccagaatattccaacccgggaccggctagagggcatggcagccttcagggagaagcggactcccaaatttgttggcaaatgacccccattttaaccttcagcatgggagmtgcatgccctgaagagcaggatccagaaggaagatttgtggccagattgccttcatcatttcacctctccagacttccatttcttcacaaggatgatgatggaaataaaatgactggcgtgatgcctggaaccaaggtgctgatcctaccacctactgctaccttccttagcttcaccctggctagaaataatcacgagggttgggtttgctttggaaaatgcctgtctctctacytgaatgataaagaattaaattagatctctctgagtcttggtatcattggctctcagcccctgacctctctcagttatcaggcactcattagagatgtcagaagattttaagatacccctagtttcttcctgtgaacaacagaggtaataaataaactctgacatcggttgaacatgtgtcaggggtcagactgcagatcccagtctctgccagttacttgctgtataaccgtggacaaattgtttaaatgctctgggcctcagcttcctcacctacaaaacaaaacttgtgaagatttagcaaaataaaaacacttcatattcaat

SEQ ID NO: 1769 - DNA, 1858 bp, Homo sapiens
cgagtttttaagaacctacaactatttatggagaaaaagcagcccaaggatgatctttttgatagactcaatactggtattctgaataagcatctccaggatctcatggagagcttgacagccaaggtattccatacatacaatgcctccatcacgctacagcagcagctagaagaactcacagccccggatgagaacatcccagcgaagatcctttcttataaccrtgccaatcgagctgttgcaattctttgtaaccatcagagggcaccaccaaaaacttttgagaagtctatgatgaacttgcaaactaagattgatgccaagaaggaacagctagcagatgcccggagaaacctgaaaagtgctaaggctgatgccaaggtcatgaargatgcaaagatgaagaaggtagtagagtcaaagaagaaggctgttcagwgactggaggaacagttgatgaagctggaagttcaagccacagaccgagaggaaaataaacagatggccttgggaacctccaaactcaattatctggatgctaggatcactgtgccttggtgcaagaagtggggtgtcccaattgagaagatttacaacaaaacccagcragaaaagtttgcctgggccattgaaatsgctgatgaagactacgagttttagccagtctcaagaggcagggttctgtgaaaaggaacagtgtggtttgggaaagatggataaactgagcctcgcttgccctcgtgcctgggtgagagaggcagcaagtcttaacaaaccaayatctttgcaaaaagctaaacctggagatattataagggacagctgagccagttgtcctacggacaacttatttaaaaatatttcagctatcaaaattctagctgtatgatttgttttgaattttgtttttattttccagagggcaagtggatgggaatttgtcagcgttctaccaggcaaattcactgtttcactgaaatgtttggattctcttagctactgtatgcaaagtccgattatgttggtgtgtttttacagttagggttttgcaataacttctatattttaatagaaataaattcctaaactccctcccctctcccccatttcaggaatttaaaattaagtagaacaaaaaacccagtgcgcctgttagagtcgtcactgtctattgtcrtagggatcaattttcattaaacttgaagcagtcgtcgctttggcagtgttttggttcagacacctgttcacagaaaagcatgatgggaaaatatttcctgacttgagtgttcctttttagatgtgaatttttatttctttttaattattttaaaatatttaaacctttttcttgatcttaaagatcatgtagattggggttggggagggatgaagggcgagtgagtctaaggataatgaaataatcagtgactgaaaccattttcccatcatcctttgttctgagcattcgctgtacactttaagatatccatctttttctttttagccctgatctttcacttgaaagattttattgtataaaaagttccacaggtcaataaatttagaggaaaatgagtatttggtccaaaaaaattaaaaataattaagattttagggcttttattttttcttttgtaattgtgtaaaaaatggaaaaaaacataaaaagcagaactttaatgtgaagacttttttgctataatcattagttttagaggcattgttagtttagtgtgtgtgcagagtccatttcccacatctttcctcaagtatcttctatttttatcatgaattcccttttaatcaactgtaggttatttaaaataaattcctacaacttaacggaaaaaaaaaa

SEQ ID NO: 1770 - DNA, 2240 bp, Homo sapiens
acgctccagctgrccgactcggagacaatggcgagaggcctcagagttcggcttcttacctgctttgcataggcagcaatctcctgctagtcccgcctccctctggcattctggcgsgcgaatggaggagccgagaagagagcgcagttctgattggagaaygcgcgtgtttacattctcacctctcccgggaagtggacgaatttagaccgcctcttccttcccgttgtttaaggcagttggttgccctcctgtccgtcagaggtgcagtaccagaggtggcgtgctgccgayttcgcgtttsccttgctggatgattccgcwtgtttgccggctgcgtgagtgcttagagcttttcggtggaagatgccggacagtaacttcgcagagcgcagcgaggagcaggtgtctggtgctaaagtcatcgctcaggccctgaaaacgcaagatgtggagtacatatttggcatcgtaggcatcccagtgaccgaaatcgccattgctgcccagcagctaggcatcaagtacatcgggatgaggaatgagcaagcggcttgttatgctgcctccgcgattggatatctgacaagcaggccaggagtctgccttgttgtttctggcccaggtctcatccatgccttgggcggtatggcaaatgcaaacatgaactgctggcccttgcttgtgattggtggttcctctgaaagaaaccaagaaacaatgggagctttccaggagtttcctcaggttgaagcttgtagattatataccaagttctctgcccgcccaagcagcatagaagctattccttttgttattgaaaaggcagtgagaagcagtatctatggtcgtccaggtgcttgctatgttgacataccagcagattttgtgaaccttcaggtgaatgtgaattctataaagtacatggaacgctgcatgtcacctcctattagcatggcagaaacctctgctgtgtgcacggcggcttctgttattaggaatgccaaacaaccccttcttatcatcgggaaaggtgctgcttacgctcatgcagaagagagtatcaagaaattggtggagcaatataaactgccatttttgcccacccctatggggaagggtgttgtccctgacaaccatccatactgtgtaggtgcagccagatccagggctttgcaatttgctgatgtaattgtgttatttggtgccagactaaattggattttacattttggactgcctccaagatatcagccagatgtgaagtttatccaggttgatatctgtgcagaagaattggggaataatgtaaagcccgctgttactttgctaggaaacatacatgctgtcactaagcagcttttagaggaacttgataaaacaccatggcagtatcctccagagagcaagtggtggaaaactctgagagaaaaaatgaagagcaatgaagctgcatccaaggaactagcttctaaaaaatccctrcctatgaattattacacagtattctaccatgttcaagaacaactacctagagactgtttcgtggtaagtgaaggagcaaatactatggacattggacggactgtgcttcagaactaccttcctcgtcacaggcttgatgctggtactttcggaacaatgggagttggtttgggatttgctattgcagctgccgtggtggctaaagatagaagccctgggcartggatcatctgtgtggaaggagacagtgcatttgggttttctggcatggaggtagaaaccatctgcaggtacaacttgccaatcatactgttggtagtgaataacaatggaatttaccaaggttttgatacagatacttggaaagaaatgttaaaatttcaagatgctactgcagtggtccctccaatgtgtttgctgccaaattcacattatgagcaagtcatgactgcatttggaggcaaagggtattttgtacaaacaccagaagaactccaaaaatccctgaggcagagcctagcagacacaactaaaccttctcttatcaacatcatgattgagccacaagccacacggaaggcccaggattttcattggctgacccgctctaatatgtaaataaagacgccagttggtggtcttgagttttctctttcttgcaagatgaaattttattttccacagcaaaattactctactgttaaaattgtgcaaaataaaataaacatttaaaatgacattttacagtaaaggaa

SEQ ID NO: 1771 - DNA, 1651 bp, Homo sapiens
ccggcgcmggcgtcggttgggacgcggagcygaggagcagggccgggcgccatggcaccgtggggcaagcggctggctggcgtgcgcggggtgctgcttgacatctcgggcgtgctgtacgacagcggcgcgggcggcggcacggccatcgccggctcggtggaggcggtggccagactgaagcgttcccggctgaaggtgaggttctgcaccaacgagtcgcagaagtcccgggcagagctggtggggcagcttcagaggctgggatttgacatctctgagcaggaggtgaccgccccggcaccagctgcctgccagatcctgaaggagcraggcctgcgaccatacctgctcatccatgacrgagtccgctcagaatttgatcagatcgacacatccaacccaaactgtgtggtaattgcagacgcaggagaaagcttttcttatcaaaacatgaataacgccttccaggtgctcatggagctggaaaaacctgtgctcatatcactgggaaaagggcgttactacaaggagacctctggcctgatgctggacgttggtccctacatgaaggcgcttgagtatgcctgtggcatcaaagccgaggtggtggggaagccttctcctgagtttttcaagtctgccctgcaagcgataggagtggaagcccaccaggtaggccgtcatgattggggacgatatcgtgggcgacgtcggcggtgcccagcggtgtggaatgagagcgctgcaggtgcgcacygggaagttcaggcccagtgacgagcaccatccggaagtgaaggctgatgggtacgtggacaacctcgcagaggcagtggacctgctgctgcagcacgccgacaagtgatggcctcctgggagagccccgcctcctccacccctgcctctcctccacccctgcctcccctccacccctgcctctcctccacccgcccaggagagccccacctcctccacccctgcctctcctccacccctgcctcccctccacctgccccagtgcccagaccaaccaaggccctgacagccctgccttctgccctctgccctgcatgggcaggcatttgttccctacctgggtggcctgctcccctgcctgggccctgacttcagctccctgtagtgaagtccaggagggtgggacaggcctgtcaggcctctgggaatctcccaaatcccagaactcaccactcaccatgggcctttaaatgcagtaaactccacctaaccagattcaggggcactatgcccactgcctmctcttcagactctttgcatttcagtgaagagcctggaagaaacccaggggcctcctatgcacagatcttgcagcccagaaccaagtcagcctccctgcgactgcccaggcacactgcccaccaccccacccccgaaacaatgccagcccgctgctttttctatcctcccagtcacctttgcagacaaagaccaggggcagctcccgagggcactgtgaaggctcccatgccacacagtgagaactgtagcctctgygtccaaggcacacagggtactttctggacccactgctggacagacttgaaggtgtcatgcccggtgtgtgcaggaggaaactaacagttcagtaaactctgccttgaccagcagc

SEQ ID NO: 1772 - DNA, 1647 bp, Homo sapiens
ccggcgcmggcgtcggttgggacgcggagcygaggagcagggccgggcgccatggcaccgtggggcaagcggctggctggcgtgcgcggggtgctgcttgacatctcgggcgtgctgtacgacagcggcgcgggcggcggcacggccatcgccggctcggtggaggcggtggccagactgaagcgttcccggctgaaggtgaggttctgcaccaacgagtcgcagaagtcccgggcagagctggtggggcagcttcagaggctgggatttgacatctctgagcaggaggtgaccgccccggcaccagctgcctgccagatcctgaaggagcraggcctgcgaccatacctgctcatccatgacrgagtccgctcagaatttgatcagatcgacacatccaacccaaactgtgtggtaattgcagacgcaggagaaagcttttcttatcaaaacatgaataacgccttccaggtgctcatggagctggaaaaacctgtgctcatatcactgggaaaagggcgttactacaaggagacctctggcctgatgctggacgttggtccctacatgaaggcgcttgagtatgcctgtggcatcaaagccgaggtggtggggaagccttctcctgagtttttcaagtctgccctgcaagcgataggagtggaagcccaccaggccgtcatgattggggacgatatcgtgggcgacgtcggcggtgcccagcggtgtggaatgagagcgctgcaggtgcgcacygggaagttcaggcccagtgacgagcaccatccggaagtgaaggctgatgggtacgtggacaacctcgcagaggcagtggacctgctgctgcagcacgccgacaagtgatggcctcctgggagagccccgcctcctccacccctgcctctcctccacccctgcctcccctccacccctgcctctcctccacccgcccaggagagccccacctcctccacccctgcctctcctccacccctgcctcccctccacctgccccagtgcccagaccaaccaaggccctgacagccctgccttctgccctctgccctgcatgggcaggcatttgttccctacctgggtggcctgctcccctgcctgggccctgacttcagctccctgtagtgaagtccaggagggtgggacaggcctgtcaggcctctgggaatctcccaaatcccagaactcaccactcaccatgggcctttaaatgcagtaaactccacctaaccagattcaggggcactatgcccactgcctmctcttcagactctttgcatttcagtgaagagcctggaagaaacccaggggcctcctatgcacagatcttgcagcccagaaccaagtcagcctccctgcgactgcccaggcacactgcccaccaccccacccccgaaacaatgccagcccgctgctttttctatcctcccagtcacctttgcagacaaagaccaggggcagctcccgagggcactgtgaaggctcccatgccacacagtgagaactgtagcctctgygtccaaggcacacagggtactttctggacccactgctggacagacttgaaggtgtcatgcccggtgtgtgcaggaggaaactaacagttcagtaaactctgccttgaccagcagc

SEQ ID NO: 1773 - DNA, 932 bp, Homo sapiens
ctgggatgggggccgggcacggtggctcactcctgtaatcccagcactttgcaggcccagtgacgagcaccatccggaagtgaaggctgatgggtacgtggacaacctcgcagaggcagtggacctgctgctgcagcacgccgacaagtgatggcctcctgggagagccccgcctcctccacccctgcctctcctccacccctgcctcccctccacccctgcctctcctccacccgcccaggagagccccacctcctccacccctgcctctcctccacccctgcctcccctccacctgccccagtgcccagaccaaccaaggccctgacagccctgccttctgccctctgccctgcatgggcaggcatttgttccctacctgggtggcctgctcccctgcctgggccctgacttcagctccctgtagtgaagtccaggagggtgggacaggcctgtcaggcctctgggaatctcccaaatcccagaactcaccactcaccatgggcctttaaatgcagtaaactccacctaaccagattcaggggcactatgcccactgcctmctcttcagactctttgcatttcagtgaagagcctggaagaaacccaggggcctcctatgcacagatcttgcagcccagaaccaagtcagcctccctgcgactgcccaggcacactgcccaccaccccacccccgaaacaatgccagcccgctgctttttctatcctcccagtcacctttgcagacaaagaccaggggcagctcccgagggcactgtgaaggctcccatgccacacagtgagaactgtagcctctgygtccaaggcacacagggtactttctggacccactgctggacagacttgaaggtgtcatgcccggtgtgtgcaggaggaaactaacagttcagtaaactctgccttgaccagca

SEQ ID NO: 1774 - DNA, 1167 bp, Homo sapiens
ccggcgcmggcgtcggttgggacgcggagcygaggagcagggccgggcgccatggcaccgtggggcaagcggctggctggcgtgcgcggggtgctgcttgacatctcgggcgtgctgtacgacagcggcgcgggcggcggcacggccatcgccggctcggtggaggcggtggccagactgaagcgttcccggctgaaggtgaggttctgcaccaacgagtcgcagaagtcccgggcagagctggtggggcagcttcagaggctgggatttgacatctctgagcaggaggtgaccgccccggcaccagctgcctgccagatcctgaaggagcraggcctgcgaccatacctgctcatccatgacrgagtccgctcagaatttgatcagatcgacacatccaacccaaactgtgtggtaattgcagacgcaggagaaagcttttcttatcaaaacatgaataacgccttccaggtgctcatggagctggaaaaacctgtgctcatatcactgggaaaagggcgttactacaaggagacctctggcctgatgctggacgttggtccctacatgaaggcgcttgagtatgcctgtggcatcaaagccgaggtggtggggaagccttctcctgagtttttcaagtctgccctgcaagcgataggagtggaagcccaccaggccgtcatgattggggacgatatcgtgggcgacgtcggcggtgcccagcggtgtggaatgagagcgctgcaggtgcgcacygggaagttcaggcccagtgacgagcaccatccggaagtgaaggctgatggactctttgcatttcagtgaagagcctggaagaaacccaggggcctcctatgcacagatcttgcagcccagaaccaagtcagcctccctgcgactgcccaggcacactgcccaccaccccacccccgaaacaatgccagcccgctgctttttctatcctcccagtcacctttgcagacaaagaccaggggcagctcccgagggcactgtgaaggctcccatgccacacagtgagaactgtagcctctgygtccaaggcacacagggtactttctggacccactgctggacagacttgaaggtgtcatgcccggtgtgtgcaggaggaaactaacagttcagtaaactctgccttgaccagca

SEQ ID NO: 1775 - DNA, 3277 bp, Homo sapiens
atggctctcaaaccatgtcttgaggccccaattgagtctgggctctgttcagggattgaatgtcatgctgagcacccaacactagttctgatgctctttgccagtgtgctggtgacttgccttgaggctgctaaactcaccgtaggcttccagaccccctggaacatctcccatccattcagcatgcaaaggctgggtgcaggcctccagattgccatggacaaggtcaactcagagctagtggaccttggaaatttcaccacttacaccaactcagcctgcagcaccaaggagtctcttgctattttcaacaaccaggtccagaacgaacagatttctgccctgtttggaccagcatgcccagaagcagctgaggttatcggcttgctggcctctgagtggaacaccccatgtttgactttgttggacaaaccacaaaactgtctgacacctgtgtgaaacttgtgtcacccaagcaggacattggtgatgtgctccaggaaagtctccagtacctgggctggaaacacattgggatgtttggaggctactctggggcttcctcctgggatggagtggatgaactgtggagggttgtagagaatgaactcaaatcccattttatcatcactgccagcatgagatacaccaacaatagtctagtccttcttcaagagcatctttggaggatatcatcaattgccagggttatcatcttaacgtgcagctcagaggatgcaaaaattattcttctggctgcagyaaacctgggactcarcactggagaatttgttttcatcattttgcagcagttggaggaccgtttttggaaggaagtactgacaaatcagaaaatgatgcacctccaaaaggtgtatgggtcactgcttctcattgccctcagctcctacagaaaaggcygtsgagacgaaggcttttggaaacaagtctaccaaacaccgaggaggtcgcccttccgcagcaccatctcctgggaggagcaggtragcccttactctgcctaccttcacgacgccgtcctgctctatgctgagaccgtgaagcaggtggtaaaggctggaggcgacttccaggatgggtggcagctggtcagcgctctgaagggttccagtcagaccacagtgcagggaatcacaggccctgtgtttgtggatgcccagggagaaaggcacatggattactctgtctatgccctgcagaagtctgaaaatgggccccttttactttcttttcttcattatgacagttatcaaaggaatttctccaatatgacctggccscatggctcccttcctgaagacagacctggctgtggattttataatgagctctgtgaaactcagtctgcttttacgggcgtgactgctgtgcttctgacattgatgatcctcattcctgtcttgggagctgscatcataggtctgattttaaggmtgcagaggcaaaacaaagacatctggtggcaaatcaattttgatgatatcaccattcttccccagaacaagccatcccagagagscacacctgtgtcaaaaggcatcaacagtaactcatctagtgtgatgatttctgtggacctcagctcttttgtcaagagccagcagtgggaagagctcttctatgccgcagtagggctttatcagggaaaccatgtggccatccgttacgttggtgaccaagcagaagcctgggttaggaagccgattgtgctacaggaaatacagctgatgggtgaattaaggcacgagagcattgttcccttctttggtatttgcaccgaaccacctaacatctgcattgtcacccagtattgcaaaaaaggaawttttcaggatgttttgagaaactcggatcatgaaatggattggatattcaaactctcatttgcatacgacatagtcaatggcatgctgttcctccacaggagccccctgggctcccacagcaacctgaaaccttccaactgcctgatggatggtcggctgcaggtgaagctgtcgtgattcgggctgtgggaactcaagcatggctaaaaatacagaacatatgatgagacagtgaccaaccactcagagctctactggactgccccagagctgctgcagttcccggagatgccctggtcgggtaccccgcaaggagatgtttacagcttcgccattctgatgagggagctgatctaccattgggaccaygggccttttgatgacctccacgaggcaccrgatgaaatcatcaaccaaatcaaagaccctgcagcagcagtcccactgcaaccttccctgcccgaggagaagggcaatgaaaagatcgtggccatggtgagggtgtgttgggatgaatctctggagaaaagacccagtttctcttccatcaagaaaactttacgagaggccagtcccagaggycatgtgagcatactggccagtgtgatgagcaagctggaagtgtatgccaattacctggaggaagtggtgcaagagaggaccagccagctgactgcagagaagaggaaggtggagaagcttctgtccaccaaagtgcccagcttcactggagaacaactactagccggaaggtccgtggaaccagaacatttcgaatctgtgacaatctttttatctgatattgttggattcacaaagctgtgttctctcagctcccctttgcaagtcgtcaagctcctcaatgacgtgtacagtttattcgatcacatcatcacaacttatgatgtttataaggttgagaccattggagatgcatacatggtggctagtggactccctaccacaatggaagccagcatgtggctgagattgccaccatgtccctgcacttcctcagtkccaccatctgcttccaaattgggcacatgccccaggagaagctccagcttcgkattggcctctacacaggtcctgtggtggctggtgtgctggggattaccatgtccagatactgtctatttggagacactgtcaacatggcatccagaatggagagcagcagttcacctctccggattcatgtctctcagagcactgcaagcaccctggtggcattgggagggtacgatttgctaaagagaggcaccattccagtcaagggcaaaggagagcaaacaactttctggttgaaagataaagaaggcttcactcttccactcccgaatttactgaggaaaaagccaaagtcccagagatattgtgaggtgagtattttctttcaagatgtttgtggagtcacatgaaagtct

SEQ ID NO: 1776 - DNA, 2222 bp, Homo sapiens
ctggctatcgagcgagcggggcgggaacgcggagttgcgccgccgctcgggcgccgggctccccgcggggcgcgcggcgcggggccgctggccggcggcggcggcggcatgaaggtcacgtcgctcgacgggcgccagctgcgcaagatgctccgcaaggaggcggcggcgcgctgcgtggtgctcgactgccggccctatctggccttcgctgcctcgaacgtgcgcggctcgctcaacgtcaacctcaactcggtggtgctgcggcgggcccggggcggcgcggtgtcggcgcgctacgtgctgcccgacgaggcggcgcgcgcgcggctcctgcaggagggcggcggcggcgtcgcggccgtggtggtgctggaccagggcagccgccactggcagaagctgcgagaggagagcgccgcgcgtgtcgtcctcacctcgctactcgcttgcctacccgccggcccgcgggtctacttcctcaaagggggatatgagactttctactcggaatatcctgagtgttgcgtggatgtaaaacccatttcacaagagaagattgagagtgasagagccctcatcagccagtgtggaaaaccagtggtaaatgtcagctacaggccagcttatgaccagggtggcccagttgaaatccttcccttcctctaccttggaagtgcctaccatgcatccaagtgcgagttcctcgccaacytgcacatcacagccctgctgaatgtctcccgacggacctccgaggcctgcrygacccacctacactacaaatggatccctgtggaagacagccacacggctgacattagctcccactttcaagaagcaatagacttcattgactgtgtcagggaaaagggaggcaaggtcctggtccactgtgaggctgggatctcccgttcacccaccatctgcatggcttaccttatgaagaccaagcagttccgcctgaaggaggccttcgattacatcaagcagaggaggagcatggtctcgcccaactttggcttcatgggccagctcctgcagtacgaatctgagatcctgccctccacgcycaacccccagcctccctcctgccaaggggaggcagcaggctcttcactgataggccatttgcagacactgagccctgacatgcagggtgcctactgcacattccctgcctcggtgctggcaccggtgcctacccactcaacagtctcagagctcagcagaagccctgtggcaacggccacatcctgctaaaactgggatggaggaatcggcccagccccaagagcaactgtgatttttgtttttaagactcatggacatttcatacctgtgcaatactgaagacctcattctgtcatgctgccccagtgagatagtgagtggtcaccaggctagcataaggcaataaatacctgcagcaacgtgggagaaagaagttgctggaccaggagaaaaggcagttatgaagccaattcattttgaaggaagcacaatttccaccttattttttgaactttggcagtttcaatgtctgtctctgttgcttcggggcataagctgatcaccgtctagttgggaaagtmaccctacagggtttgtagggacatgatcagcatcctgatttgaaccctgaaatgttgtgtagacaccctcttgggtccaatgaggtagttggttgaagtagcaagatgttggcttttctggattttttttgccatgggttcttcactgaccttggactttggcatgattcttagtcatacttgaacttgtctcattccacctcttctcagagcaactcttcctttgggaaaagagttcttcagatcatagaccaaaaaagtcataccttcgaggtggtagcagtagattccaggaggagaagggtacttgctaggtatcctgggtcagtggcggtgcaaactggtttcctcagctgcctgtccttctgtgtgcttatgtctcttgtgacaattgttttcctccctgcccctggaggttgtcttcaagctgtggacttctgggatttgcagattttgcaacgtggtactactttttttttctttttgtctgttagttatttctccaggggaaaaggcaataattttctaagacccgtgtgaatgtgaagaaaagcagtatgttactggttrttgttgttgttsttgttttttatagtgtaaaataaaaatagtraaaggagaaaagca

SEQ ID NO: 1777 - DNA, 2561 bp, Homo sapiens
tggccttatatgggcagccgcgtcacggacggcactcattcacataaaacgctgcgcggccggcggaatccccggcttctagggcggcgagcggccgggctggctatcgagcgagcggggcgggaacgcggagttgcgccgccgctcgggcgccgggctccgtcgcggccgcagccccgcgggtcgccctcccgtgcctcgcccgcggacaccctggccgtggacaccctggccgtgggcacccgcggggcgcgcggcgcggggccgctggccggcggcggcggcggcatgaaggtcacgtcgctcgacgggcgccagctgcgcaagatgctccgcaaggaggcggcggcgcgctgcgtggtgctcgactgccggccctatctggccttcgctgcctcgaacgtgcgcggctcgctcaacgtcaacctcaactcggtggtgctgcggcgggcccggggcggcgcggtgtcggcgcgctacgtgctgcccgacgaggcggcgcgcgcgcggctcctgcaggagggcggcggcggcgtcgcggccgtggtggtgctggaccagggcagccgccactggcagaagctgcgagaggagagcgccgcgcgtgtcgtcctcacctcgctactcgcttgcctacccgccggcccgcgggtctacttcctcaaagggggatatgagactttctactcggaatatcctgagtgttgcgtggatgtaaaacccatttcacaagagaagattgagagtgasagagccctcatcagccagtgtggaaaaccagtggtaaatgtcagctacaggccagcttatgaccagggtggcccagttgaaatccttcccttcctctaccttggaagtgcctaccatgcatccaagtgcgagttcctcgccaacytgcacatcacagccctgctgaatgtctcccgacggacctccgaggcctgcrygacccacctacactacaaatggatccctgtggaagacagccacacggctgacattagctcccactttcaagaagcaatagacttcattgactgtgtcagggaaaagggaggcaaggtcctggtccactgtgaggctgggatctcccgttcacccaccatctgcatggcttaccttatgaagaccaagcagttccgcctgaaggaggccttcgattacatcaagcagaggaggagcatggtctcgcccaactttggcttcatgggccagctcctgcagtacgaatctgagatcctgccctccacgcycaacccccagcctccctcctgccaaggggaggcagcaggctcttcactgataggccatttgcagacactgagccctgacatgcagggtgcctactgcacattccctgcctcggtgctggcaccggtgcctacccactcaacagtctcagagctcagcagaagccctgtggcaacggccacatcctgctaaaactgggatggaggaatcggcccagccccaagagcaactgtgatttttgtttttaagactcatggacatttcatacctgtgcaatactgaagacctcattctgtcatgctgccccagtgagatagtgagtggtcaccaggcttgcaaatgaacttcagacggacctcagggtaggttctcgggactgaaggaaggccaagccattacgggagcacagcatgtgctgactactgtacttccagacccctgccctcttgggactgcccagtccttgcacctcagagttcgccttttcatttcaagcataaggcaataaatacctgcagcaacgtgggagaaagaagttgctggaccaggagaaaaggcagttatgaagccaattcattttgaaggaagcacaatttccaccttattttttgaactttggcagtttcaatgtctgtctctgttgcttcggggcataagctgatcaccgtctagttgggaaagtmaccctacagggtttgtagggacatgatcagcatcctgatttgaaccctgaaatgttgtgtagacaccctcttgggtccaatgaggtagttggttgaagtagcaagatgttggcttttctggattttttttgccatgggttcttcactgaccttggactttggcatgattcttagtcatacttgaacttgtctcattccacctcttctcagagcaactcttcctttgggaaaagagttcttcagatcatagaccaaaaaagtcataccttcgaggtggtagcagtagattccaggaggagaagggtacttgctaggtatcctgggtcagtggcggtgcaaactggtttcctcagctgcctgtccttctgtgtgcttatgtctcttgtgacaattgttttcctccctgcccctggaggttgtcttcaagctgtggacttctgggatttgcagattttgcaacgtggtactactttttttttctttttgtctgttagttatttctccaggggaaaaggcaataattttctaagacccgtgtgaatgtgaagaaaagcagtatgttactggttrttgttgttgttsttgttttttatagtgtaaaataaaaatagtraaaggagaaaagca

SEQ ID NO: 1778 - DNA, 864 bp, Homo sapiens
tttgcagggcaaagcccaacaccttcccccactggtaagaattaatatttatatttttactaattttattttcttgttgcaaagtttatatatttaactacaattttctattattaacactgaaattatttttaaggataaattttataatcatgagtgattcttgacattcacttgttcttaaactttctgcttatacgttatagagtttaataactacctaaacatgttattaaatttgtatatatattttgtgtataaatagtaacttttcccaaacttgacagtaaatcacacaacaggtttctactctcttttaatattttaagactataaaaaaatgcatttaaattagataacaaaattttatagtctgaaagcaggttaacagctgtctatgtatgttatagatatgtagataacagatttgcatatgtctatatttctttaagagtatgttgcttttttcaatggtatgcaaaacctttgagactattgagatatttttaaataataattttcaaattctactgaacacttcaatagtccttataaatgtcttaatcatgagataaatttaaaacacagagatgctgcaaataaattcatacatagtacatacaaaataagagaaaaaattaaattgcagatggttaaatatcacatcacttaactgatgttactgaaaatgtattttcctgcataatcatatggttgacagtatgcattaagaaggtaagtaaaacaatgaagacaattttgatttaatatggtaatgcacaattccaactaacgtacattcaacagatcatgaaattgggttattaaaatgaatatttttgtcattaaataaaaattcygtcc

SEQ ID NO: 1779 - DNA, 5292 bp, Homo sapiens
ggaaattgttcytcgtctgataagacaacagtggagaaaggacgcatgctgtttcttagggacacggctgacttccagatatgaccatgtatttgtggcttaaactcttggcatttggctttgcctttctggacacagaagtatttgtgacagggcaaagcccaacaccttcccccactggattgactacagcaaagatgcccagtgttccactttcaagtgaccccttacctrctcacaccactgcattctcaccsgcaagcacctttgaaagagaaaatgacttctcagagaccacaacttctcttagtccagacaatacttccacccaagtatccccggactctttggataatgctagtgcttttaataccacaggtgtttcatcagtacagacgcctcaccttcccacgcacgcagactcgcagacgccctctgctggaactsacacgcagacattcagcggctccgccgccaatgcaaaactcaaccctaccccaggcagcaatgctatctcagatgtcccaggagagaggagtacagccagcacctttcctacagacccagtttccccattgacaaccaccctcagccttgcacaccacagctctgctgccttacctgcacgcacctccaacaccaccatcacagcgaacrcctcagatgcctaccttaatgcctctgaaacaaccactctgagcccttctggaagcgctgtcatttcaaccacaacaatagctactactccatctaagccaacatgtgatgaaaaatatgcaaacatcactgtggattacttatataacaaggaaactaaattatttacagcaaagctaaatgttaatgagaatgtggaatgtggaaacaatacttgcacaaacaatgaggtgcataaccttacagaatgtaaaaatgcgtctgtttccatatctcataattcatgtactgctcctgataagacattamtattagatgtgccaccaggggttgaaaagtttcagttacatgattgtacacaagttgaaaaagcagatactactatttgtttaaaatggaaaaatattraaacctttacttgtgatacacagaatattacctacagatttcartgtggtaatatgatatttgataataaagaaattaaattagaaaaccttgaacccgaacatgagtataagtgtgactcagaaatactctataataaccacaagtttactaacgcaagtaaaattattaaaacagattttgggagtccaggagagcctcagattattttttgtagaagtgaagctgcacatcaaggagtaattacctggaatccccctcaaagatcatttcataattttaycctctgttatataaaagagacagaaaaagattgcctcaatctggataaaaacctgatcaaatatgatttgcaaaatttaaaaccttatacgaaatatgttttatcattacatgcctacatcattgcaaaagtgcaacgtaatggaagtgctgcaatgtgtcatttcacaactaaaagtgctcctccaagccaggtctggaacatgactgtctccatgacatcagataatagtatgcatgtcaagtgtaggcctcccagggaccgtaatggcccccatgaacgttaccatttggaagttgaagctggaaatactctggttagaaatgagtcgcataagaattgcgatttccgtgtaaaagatcttcaatattcaacagactacacttttaaggcctattttcacaatggagactatcctggagaaccctttattttacatcattcaacatcttataattctaaggcactgatagcatttctggcatttctgattattgtgacatcaatagccctgcttgttgttctctacaaaatctatgatctacataagaaaagatcctgcaatttagatgaacagcaggagcttgttgaaagggatgatgaaaaacaactgatgaatgtggagccaatccatgcagatattttgttggaaacttataagaggaagattgctgatgaaggaagactttttctggctgaatttcagagcatcccgcgggtgttcagcaagtttcctataaaggaagctcgaaagccctttaaccagaataaaaaccgttatgttgacattcttccttatgattataaccgtgttgaactctctgagataaacggagatgcagggtcaaactacataaatgccagctatattgatggtttcaaagaacccaggaaatacattgctgcacaaggtcccagggatgaaactgttgatgatttctggaggatgatttgggaacagaaagccacagttattgtcatggtcactcgatgtgaagaaggaaacaggaacaagtgtgcagaatactggccgtcaatggaagagggyactcgggcttttggagatgttgttgtaaagatcaaccagcacaaaagatgtccagattacatcattcagaaattgaacattgtaaataaaaaagaaaaagcaactggaagagaggtgactcacattcagttcaccagctggccagaccacggggtgcctgaggatcctcacttgctcctcaaactgagaaggagagtgaatgccttcagcaatttcttcagtggtcccattgtggtgcactgcagtgctggtgttgggcgcacaggaacctatatcggaattgatgccatgctagaaggcctggaagccgagaacaaagtggatgtttatggttatgttgtcaagctaaggcgacagagatgcctgatggttcaagtagaggcccagtacatcttgatccatcaggctttggtggaatacaatcagtttggagaaacagaagtgaatttgtctgaattacatccatatctacataacatgaagaaaagggatccacccagtgagccgtctccactagaggctgaattccagagacttccttcatataggagctggaggacacagcacattggaaatcaagaagaaaataaaagtaaaaacaggaattctaatgtcatcccatatgactataacagagtgccacttaaacatgagctggaaatgagtaaagagagtgagcatgattcagatgaatcctctgatgatgacagtgattcagaggaaccaagcaaatacatcaatgcatcttttataatgagctactggaaacctgaagtgatgattgctgctcagggaccactgaaggagaccattggtgacttttggcagatgatcttccaaagaaaagtcaaagttattgttatgctgacagaactgaaacatggagaccaggaaatctgtgctcagtactggggagaaggaaagcaaacatatggagatattgaagttgacctgaaagacacagacaaatcttcaacttatacccttcgtgtctttgaactgagacattccaagaggaaagactctcgaactgtgtaccagtaccaatatacaaactggagtgtggagcagcttcctgcagaacccaaggaattaatctctatgattcaggtcgtcaaacaaaaacttccccagaagaattcctctgaagggaacaagcatcacaagagtacacctctactcattcactgcagggatggatctcagcaaacgggaatattttgtgctttgttaaatctcttagaaagtgcggaaacagaagaggtagtggatatttttcaagtggtaaaagctctacgcaaagctaggccaggcatggtttccacattcgagcaatatcaattcctatatgacgtcattgccagcacctaccctgctcagaatggacaagtaaagaaaaacaaccatcaagaagataaaattgaatttgataatgaagtggacaaagtaaagcaggatgctaaytgtgttaatccacttggtgccccagaaaagctccctgaagcaaaggaacaggctgaaggttctgaacccacgmgtggcactgaggggccagaacattctgtcaatggtcctgcaagtccagctttaaatcaaggttcataggaaaagacataaatgaggaaactccaamcctcctgttagctgttatttctatttttgtagaagtaggaagtgaaaataggtatacagtggattaattaaatgcagcgaaccaatatttgtagaagggttatattttactactgtggaaaaatatttaagatagttttgccagaacagtttgtacagacgtatgcttattttaaaattttatctcttattcagtaaaaaacaacttctttgtaatcgttatgtgtgtatatgtatgtgtgtatgggtgtgtgtttgtgtgagagacagagaaagagagagaattctttcaagtgaatctaaaagcttttgcttttcctttgtttttatgaagaaaaaatacattttatattagaagtgttaacttagcttgaaggatctgtttttaaaaatcataaactgtgtgcagactcaataaaatcatgtacatttctgaaatgacctcaagatgtcctccttgttctactcatatatatctatcttatatagtttactattttacttctagagatagtacataaaggtggtatgtgtgtgtatgctactacaaaaaagttgttaactaaattaacattgggaaatcttatattccatatattagcatttagtccaatgtctttttaagcttatttaattaaaaaatttccagtgagcttatcatgctgtctttacatggggttttcaattttgcatgctcgattattccctgtacaatatttaaaatttattgcttgatacttttgacaacaaattaggttttgtacaattgaacttaaataaatgtcattaaaataaataaatgcaatatgtattaatattcattgtataaaaatagaagaatacaaacatatttgttaaatatttacatatgaaatttaatatagctatttttatggaatttttcattgatatgaaaaatatgatattgcatatgcatagttcccatgttaaatcccattcataactttcattaaagcatttactttgaatttctccaatgcttagaatgtttttaccaggaatggatgtcgctaatcataataaaattcaaccattatttttttcttgtttataatacattgtgttatatgttcaaatatgaaatgtgtatgcacctattgaaatatgtttaatgcatttattaacatttgcaggacacttttacaggccccaattatccaatagtctaataattgtttaagatctagaaaaaaaaaatcaagaatagtggtatttttcatgaagtaataaaaactcgttttgg

SEQ ID NO: 1780 - DNA, 5148 bp, Homo sapiens
ggaaattgttcytcgtctgataagacaacagtggagaaaggacgcatgctgtttcttagggacacggctgacttccagatatgaccatgtatttgtggcttaaactcttggcatttggctttgcctttctggacacagaagtatttgtgacagggcaaagcccaacaccttcccccactggattgactacagcaaagatgcccagtgttccactttcaagtgaccccttacctrctcacaccactgcattctcaccsgcaagcacctttgaaagagaaaatgacttctcagagaccacaacttctcttagtccagacaatacttccacccaagtatccccggactctttggataatgctagtgcttttaataccacaggtgtttcatcagtacagacgcctcaccttcccacgcacgcagactcgcagacgccctctgctggaactsacacgcagacattcagcggctccgccgccaatgcaaaactcaaccctaccccaggcagcaatgctatctcagatgcctaccttaatgcctctgaaacaaccactctgagcccttctggaagcgctgtcatttcaaccacaacaatagctactactccatctaagccaacatgtgatgaaaaatatgcaaacatcactgtggattacttatataacaaggaaactaaattatttacagcaaagctaaatgttaatgagaatgtggaatgtggaaacaatacttgcacaaacaatgaggtgcataaccttacagaatgtaaaaatgcgtctgtttccatatctcataattcatgtactgctcctgataagacattamtattagatgtgccaccaggggttgaaaagtttcagttacatgattgtacacaagttgaaaaagcagatactactatttgtttaaaatggaaaaatattraaacctttacttgtgatacacagaatattacctacagatttcartgtggtaatatgatatttgataataaagaaattaaattagaaaaccttgaacccgaacatgagtataagtgtgactcagaaatactctataataaccacaagtttactaacgcaagtaaaattattaaaacagattttgggagtccaggagagcctcagattattttttgtagaagtgaagctgcacatcaaggagtaattacctggaatccccctcaaagatcatttcataattttaycctctgttatataaaagagacagaaaaagattgcctcaatctggataaaaacctgatcaaatatgatttgcaaaatttaaaaccttatacgaaatatgttttatcattacatgcctacatcattgcaaaagtgcaacgtaatggaagtgctgcaatgtgtcatttcacaactaaaagtgctcctccaagccaggtctggaacatgactgtctccatgacatcagataatagtatgcatgtcaagtgtaggcctcccagggaccgtaatggcccccatgaacgttaccatttggaagttgaagctggaaatactctggttagaaatgagtcgcataagaattgcgatttccgtgtaaaagatcttcaatattcaacagactacacttttaaggcctattttcacaatggagactatcctggagaaccctttattttacatcattcaacatcttataattctaaggcactgatagcatttctggcatttctgattattgtgacatcaatagccctgcttgttgttctctacaaaatctatgatctacataagaaaagatcctgcaatttagatgaacagcaggagcttgttgaaagggatgatgaaaaacaactgatgaatgtggagccaatccatgcagatattttgttggaaacttataagaggaagattgctgatgaaggaagactttttctggctgaatttcagagcatcccgcgggtgttcagcaagtttcctataaaggaagctcgaaagccctttaaccagaataaaaaccgttatgttgacattcttccttatgattataaccgtgttgaactctctgagataaacggagatgcagggtcaaactacataaatgccagctatattgatggtttcaaagaacccaggaaatacattgctgcacaaggtcccagggatgaaactgttgatgatttctggaggatgatttgggaacagaaagccacagttattgtcatggtcactcgatgtgaagaaggaaacaggaacaagtgtgcagaatactggccgtcaatggaagagggyactcgggcttttggagatgttgttgtaaagatcaaccagcacaaaagatgtccagattacatcattcagaaattgaacattgtaaataaaaaagaaaaagcaactggaagagaggtgactcacattcagttcaccagctggccagaccacggggtgcctgaggatcctcacttgctcctcaaactgagaaggagagtgaatgccttcagcaatttcttcagtggtcccattgtggtgcactgcagtgctggtgttgggcgcacaggaacctatatcggaattgatgccatgctagaaggcctggaagccgagaacaaagtggatgtttatggttatgttgtcaagctaaggcgacagagatgcctgatggttcaagtagaggcccagtacatcttgatccatcaggctttggtggaatacaatcagtttggagaaacagaagtgaatttgtctgaattacatccatatctacataacatgaagaaaagggatccacccagtgagccgtctccactagaggctgaattccagagacttccttcatataggagctggaggacacagcacattggaaatcaagaagaaaataaaagtaaaaacaggaattctaatgtcatcccatatgactataacagagtgccacttaaacatgagctggaaatgagtaaagagagtgagcatgattcagatgaatcctctgatgatgacagtgattcagaggaaccaagcaaatacatcaatgcatcttttataatgagctactggaaacctgaagtgatgattgctgctcagggaccactgaaggagaccattggtgacttttggcagatgatcttccaaagaaaagtcaaagttattgttatgctgacagaactgaaacatggagaccaggaaatctgtgctcagtactggggagaaggaaagcaaacatatggagatattgaagttgacctgaaagacacagacaaatcttcaacttatacccttcgtgtctttgaactgagacattccaagaggaaagactctcgaactgtgtaccagtaccaatatacaaactggagtgtggagcagcttcctgcagaacccaaggaattaatctctatgattcaggtcgtcaaacaaaaacttccccagaagaattcctctgaagggaacaagcatcacaagagtacacctctactcattcactgcagggatggatctcagcaaacgggaatattttgtgctttgttaaatctcttagaaagtgcggaaacagaagaggtagtggatatttttcaagtggtaaaagctctacgcaaagctaggccaggcatggtttccacattcgagcaatatcaattcctatatgacgtcattgccagcacctaccctgctcagaatggacaagtaaagaaaaacaaccatcaagaagataaaattgaatttgataatgaagtggacaaagtaaagcaggatgctaaytgtgttaatccacttggtgccccagaaaagctccctgaagcaaaggaacaggctgaaggttctgaacccacgmgtggcactgaggggccagaacattctgtcaatggtcctgcaagtccagctttaaatcaaggttcataggaaaagacataaatgaggaaactccaamcctcctgttagctgttatttctatttttgtagaagtaggaagtgaaaataggtatacagtggattaattaaatgcagcgaaccaatatttgtagaagggttatattttactactgtggaaaaatatttaagatagttttgccagaacagtttgtacagacgtatgcttattttaaaattttatctcttattcagtaaaaaacaacttctttgtaatcgttatgtgtgtatatgtatgtgtgtatgggtgtgtgtttgtgtgagagacagagaaagagagagaattctttcaagtgaatctaaaagcttttgcttttcctttgtttttatgaagaaaaaatacattttatattagaagtgttaacttagcttgaaggatctgtttttaaaaatcataaactgtgtgcagactcaataaaatcatgtacatttctgaaatgacctcaagatgtcctccttgttctactcatatatatctatcttatatagtttactattttacttctagagatagtacataaaggtggtatgtgtgtgtatgctactacaaaaaagttgttaactaaattaacattgggaaatcttatattccatatattagcatttagtccaatgtctttttaagcttatttaattaaaaaatttccagtgagcttatcatgctgtctttacatggggttttcaattttgcatgctcgattattccctgtacaatatttaaaatttattgcttgatacttttgacaacaaattaggttttgtacaattgaacttaaataaatgtcattaaaataaataaatgcaatatgtattaatattcattgtataaaaatagaagaatacaaacatatttgttaaatatttacatatgaaatttaatatagctatttttatggaatttttcattgatatgaaaaatatgatattgcatatgcatagttcccatgttaaatcccattcataactttcattaaagcatttactttgaatttctccaatgcttagaatgtttttaccaggaatggatgtcgctaatcataataaaattcaaccattatttttttcttgtttataatacattgtgttatatgttcaaatatgaaatgtgtatgcacctattgaaatatgtttaatgcatttattaacatttgcaggacacttttacaggccccaattatccaatagtctaataattgtttaagatctagaaaaaaaaaatcaagaatagtggtatttttcatgaagtaataaaaactcgttttgg

SEQ ID NO: 1781 - DNA, 5139 bp, Homo sapiens
ggcaaagcccaacaccttcccccactggattgactacagcaaagatgcccagtgttccactttcaagtgaccccttacctrctcacaccactgcattctcaccsgcaagcacctttgaaagagaaaatgacttctcagagaccacaacttctcttagtccagacaatacttccacccaagtatccccggactctttggataatgctagtgcttttaataccacaggtgtttcatcagtacagacgcctcaccttcccacgcacgcagactcgcagacgccctctgctggaactsacacgcagacattcagcggctccgccgccaatgcaaaactcaaccctaccccaggcagcaatgctatctcagatgtcccaggagagaggagtacagccagcacctttcctacagacccagtttccccattgacaaccaccctcagccttgcacaccacagctctgctgccttacctgcacgcacctccaacaccaccatcacagcgaacrcctcagatgcctaccttaatgcctctgaaacaaccactctgagcccttctggaagcgctgtcatttcaaccacaacaatagctactactccatctaagccaacatgtgatgaaaaatatgcaaacatcactgtggattacttatataacaaggaaactaaattatttacagcaaagctaaatgttaatgagaatgtggaatgtggaaacaatacttgcacaaacaatgaggtgcataaccttacagaatgtaaaaatgcgtctgtttccatatctcataattcatgtactgctcctgataagacattamtattagatgtgccaccaggggttgaaaagtttcagttacatgattgtacacaagttgaaaaagcagatactactatttgtttaaaatggaaaaatattraaacctttacttgtgatacacagaatattacctacagatttcartgtggtaatatgatatttgataataaagaaattaaattagaaaaccttgaacccgaacatgagtataagtgtgactcagaaatactctataataaccacaagtttactaacgcaagtaaaattattaaaacagattttgggagtccaggagagcctcagattattttttgtagaagtgaagctgcacatcaaggagtaattacctggaatccccctcaaagatcatttcataattttaycctctgttatataaaagagacagaaaaagattgcctcaatctggataaaaacctgatcaaatatgatttgcaaaatttaaaaccttatacgaaatatgttttatcattacatgcctacatcattgcaaaagtgcaacgtaatggaagtgctgcaatgtgtcatttcacaactaaaagtgctcctccaagccaggtctggaacatgactgtctccatgacatcagataatagtatgcatgtcaagtgtaggcctcccagggaccgtaatggcccccatgaacgttaccatttggaagttgaagctggaaatactctggttagaaatgagtcgcataagaattgcgatttccgtgtaaaagatcttcaatattcaacagactacacttttaaggcctattttcacaatggagactatcctggagaaccctttattttacatcattcaacatcttataattctaaggcactgatagcatttctggcatttctgattattgtgacatcaatagccctgcttgttgttctctacaaaatctatgatctacataagaaaagatcctgcaatttagatgaacagcaggagcttgttgaaagggatgatgaaaaacaactgatgaatgtggagccaatccatgcagatattttgttggaaacttataagaggaagattgctgatgaaggaagactttttctggctgaatttcagagcatcccgcgggtgttcagcaagtttcctataaaggaagctcgaaagccctttaaccagaataaaaaccgttatgttgacattcttccttatgattataaccgtgttgaactctctgagataaacggagatgcagggtcaaactacataaatgccagctatattgatggtttcaaagaacccaggaaatacattgctgcacaaggtcccagggatgaaactgttgatgatttctggaggatgatttgggaacagaaagccacagttattgtcatggtcactcgatgtgaagaaggaaacaggaacaagtgtgcagaatactggccgtcaatggaagagggyactcgggcttttggagatgttgttgtaaagatcaaccagcacaaaagatgtccagattacatcattcagaaattgaacattgtaaataaaaaagaaaaagcaactggaagagaggtgactcacattcagttcaccagctggccagaccacggggtgcctgaggatcctcacttgctcctcaaactgagaaggagagtgaatgccttcagcaatttcttcagtggtcccattgtggtgcactgcagtgctggtgttgggcgcacaggaacctatatcggaattgatgccatgctagaaggcctggaagccgagaacaaagtggatgtttatggttatgttgtcaagctaaggcgacagagatgcctgatggttcaagtagaggcccagtacatcttgatccatcaggctttggtggaatacaatcagtttggagaaacagaagtgaatttgtctgaattacatccatatctacataacatgaagaaaagggatccacccagtgagccgtctccactagaggctgaattccagagacttccttcatataggagctggaggacacagcacattggaaatcaagaagaaaataaaagtaaaaacaggaattctaatgtcatcccatatgactataacagagtgccacttaaacatgagctggaaatgagtaaagagagtgagcatgattcagatgaatcctctgatgatgacagtgattcagaggaaccaagcaaatacatcaatgcatcttttataatgagctactggaaacctgaagtgatgattgctgctcagggaccactgaaggagaccattggtgacttttggcagatgatcttccaaagaaaagtcaaagttattgttatgctgacagaactgaaacatggagaccaggaaatctgtgctcagtactggggagaaggaaagcaaacatatggagatattgaagttgacctgaaagacacagacaaatcttcaacttatacccttcgtgtctttgaactgagacattccaagaggaaagactctcgaactgtgtaccagtaccaatatacaaactggagtgtggagcagcttcctgcagaacccaaggaattaatctctatgattcaggtcgtcaaacaaaaacttccccagaagaattcctctgaagggaacaagcatcacaagagtacacctctactcattcactgcagggatggatctcagcaaacgggaatattttgtgctttgttaaatctcttagaaagtgcggaaacagaagaggtagtggatatttttcaagtggtaaaagctctacgcaaagctaggccaggcatggtttccacattcgagcaatatcaattcctatatgacgtcattgccagcacctaccctgctcagaatggacaagtaaagaaaaacaaccatcaagaagataaaattgaatttgataatgaagtggacaaagtaaagcaggatgctaaytgtgttaatccacttggtgccccagaaaagctccctgaagcaaaggaacaggctgaaggttctgaacccacgmgtggcactgaggggccagaacattctgtcaatggtcctgcaagtccagctttaaatcaaggttcataggaaaagacataaatgaggaaactccaamcctcctgttagctgttatttctatttttgtagaagtaggaagtgaaaataggtatacagtggattaattaaatgcagcgaaccaatatttgtagaagggttatattttactactgtggaaaaatatttaagatagttttgccagaacagtttgtacagacgtatgcttattttaaaattttatctcttattcagtaaaaaacaacttctttgtaatcgttatgtgtgtatatgtatgtgtgtatgggtgtgtgtttgtgtgagagacagagaaagagagagaattctttcaagtgaatctaaaagcttttgcttttcctttgtttttatgaagaaaaaatacattttatattagaagtgttaacttagcttgaaggatctgtttttaaaaatcataaactgtgtgcagactcaataaaatcatgtacatttctgaaatgacctcaagatgtcctccttgttctactcatatatatctatcttatatagtttactattttacttctagagatagtacataaaggtggtatgtgtgtgtatgctactacaaaaaagttgttaactaaattaacattgggaaatcttatattccatatattagcatttagtccaatgtctttttaagcttatttaattaaaaaatttccagtgagcttatcatgctgtctttacatggggttttcaattttgcatgctcgattattccctgtacaatatttaaaatttattgcttgatacttttgacaacaaattaggttttgtacaattgaacttaaataaatgtcattaaaataaataaatgcaatatgtattaatattcattgtataaaaatagaagaatacaaacatatttgttaaatatttacatatgaaatttaatatagctatttttatggaatttttcattgatatgaaaaatatgatattgcatatgcatagttcccatgttaaatcccattcataactttcattaaagcatttactttgaatttctccaatgcttagaatgtttttaccaggaatggatgtcgctaatcataataaaattcaaccattatttttttcttgtttataatacattgtgttatatgttcaaatatgaaatgtgtatgcacctattgaaatatgtttaatgcatttattaacatttgcaggacacttttacaggccccaattatccaatagtctaataattgtttaagatctagaaaaaaaaaatcaagaatagtggtatttttcatgaagtaataaaaactcgttttgg

SEQ ID NO: 1782 - DNA, 4995 bp, Homo sapiens
ggcaaagcccaacaccttcccccactggattgactacagcaaagatgcccagtgttccactttcaagtgaccccttacctrctcacaccactgcattctcaccsgcaagcacctttgaaagagaaaatgacttctcagagaccacaacttctcttagtccagacaatacttccacccaagtatccccggactctttggataatgctagtgcttttaataccacaggtgtttcatcagtacagacgcctcaccttcccacgcacgcagactcgcagacgccctctgctggaactsacacgcagacattcagcggctccgccgccaatgcaaaactcaaccctaccccaggcagcaatgctatctcagatgcctaccttaatgcctctgaaacaaccactctgagcccttctggaagcgctgtcatttcaaccacaacaatagctactactccatctaagccaacatgtgatgaaaaatatgcaaacatcactgtggattacttatataacaaggaaactaaattatttacagcaaagctaaatgttaatgagaatgtggaatgtggaaacaatacttgcacaaacaatgaggtgcataaccttacagaatgtaaaaatgcgtctgtttccatatctcataattcatgtactgctcctgataagacattamtattagatgtgccaccaggggttgaaaagtttcagttacatgattgtacacaagttgaaaaagcagatactactatttgtttaaaatggaaaaatattraaacctttacttgtgatacacagaatattacctacagatttcartgtggtaatatgatatttgataataaagaaattaaattagaaaaccttgaacccgaacatgagtataagtgtgactcagaaatactctataataaccacaagtttactaacgcaagtaaaattattaaaacagattttgggagtccaggagagcctcagattattttttgtagaagtgaagctgcacatcaaggagtaattacctggaatccccctcaaagatcatttcataattttaycctctgttatataaaagagacagaaaaagattgcctcaatctggataaaaacctgatcaaatatgatttgcaaaatttaaaaccttatacgaaatatgttttatcattacatgcctacatcattgcaaaagtgcaacgtaatggaagtgctgcaatgtgtcatttcacaactaaaagtgctcctccaagccaggtctggaacatgactgtctccatgacatcagataatagtatgcatgtcaagtgtaggcctcccagggaccgtaatggcccccatgaacgttaccatttggaagttgaagctggaaatactctggttagaaatgagtcgcataagaattgcgatttccgtgtaaaagatcttcaatattcaacagactacacttttaaggcctattttcacaatggagactatcctggagaaccctttattttacatcattcaacatcttataattctaaggcactgatagcatttctggcatttctgattattgtgacatcaatagccctgcttgttgttctctacaaaatctatgatctacataagaaaagatcctgcaatttagatgaacagcaggagcttgttgaaagggatgatgaaaaacaactgatgaatgtggagccaatccatgcagatattttgttggaaacttataagaggaagattgctgatgaaggaagactttttctggctgaatttcagagcatcccgcgggtgttcagcaagtttcctataaaggaagctcgaaagccctttaaccagaataaaaaccgttatgttgacattcttccttatgattataaccgtgttgaactctctgagataaacggagatgcagggtcaaactacataaatgccagctatattgatggtttcaaagaacccaggaaatacattgctgcacaaggtcccagggatgaaactgttgatgatttctggaggatgatttgggaacagaaagccacagttattgtcatggtcactcgatgtgaagaaggaaacaggaacaagtgtgcagaatactggccgtcaatggaagagggyactcgggcttttggagatgttgttgtaaagatcaaccagcacaaaagatgtccagattacatcattcagaaattgaacattgtaaataaaaaagaaaaagcaactggaagagaggtgactcacattcagttcaccagctggccagaccacggggtgcctgaggatcctcacttgctcctcaaactgagaaggagagtgaatgccttcagcaatttcttcagtggtcccattgtggtgcactgcagtgctggtgttgggcgcacaggaacctatatcggaattgatgccatgctagaaggcctggaagccgagaacaaagtggatgtttatggttatgttgtcaagctaaggcgacagagatgcctgatggttcaagtagaggcccagtacatcttgatccatcaggctttggtggaatacaatcagtttggagaaacagaagtgaatttgtctgaattacatccatatctacataacatgaagaaaagggatccacccagtgagccgtctccactagaggctgaattccagagacttccttcatataggagctggaggacacagcacattggaaatcaagaagaaaataaaagtaaaaacaggaattctaatgtcatcccatatgactataacagagtgccacttaaacatgagctggaaatgagtaaagagagtgagcatgattcagatgaatcctctgatgatgacagtgattcagaggaaccaagcaaatacatcaatgcatcttttataatgagctactggaaacctgaagtgatgattgctgctcagggaccactgaaggagaccattggtgacttttggcagatgatcttccaaagaaaagtcaaagttattgttatgctgacagaactgaaacatggagaccaggaaatctgtgctcagtactggggagaaggaaagcaaacatatggagatattgaagttgacctgaaagacacagacaaatcttcaacttatacccttcgtgtctttgaactgagacattccaagaggaaagactctcgaactgtgtaccagtaccaatatacaaactggagtgtggagcagcttcctgcagaacccaaggaattaatctctatgattcaggtcgtcaaacaaaaacttccccagaagaattcctctgaagggaacaagcatcacaagagtacacctctactcattcactgcagggatggatctcagcaaacgggaatattttgtgctttgttaaatctcttagaaagtgcggaaacagaagaggtagtggatatttttcaagtggtaaaagctctacgcaaagctaggccaggcatggtttccacattcgagcaatatcaattcctatatgacgtcattgccagcacctaccctgctcagaatggacaagtaaagaaaaacaaccatcaagaagataaaattgaatttgataatgaagtggacaaagtaaagcaggatgctaaytgtgttaatccacttggtgccccagaaaagctccctgaagcaaaggaacaggctgaaggttctgaacccacgmgtggcactgaggggccagaacattctgtcaatggtcctgcaagtccagctttaaatcaaggttcataggaaaagacataaatgaggaaactccaamcctcctgttagctgttatttctatttttgtagaagtaggaagtgaaaataggtatacagtggattaattaaatgcagcgaaccaatatttgtagaagggttatattttactactgtggaaaaatatttaagatagttttgccagaacagtttgtacagacgtatgcttattttaaaattttatctcttattcagtaaaaaacaacttctttgtaatcgttatgtgtgtatatgtatgtgtgtatgggtgtgtgtttgtgtgagagacagagaaagagagagaattctttcaagtgaatctaaaagcttttgcttttcctttgtttttatgaagaaaaaatacattttatattagaagtgttaacttagcttgaaggatctgtttttaaaaatcataaactgtgtgcagactcaataaaatcatgtacatttctgaaatgacctcaagatgtcctccttgttctactcatatatatctatcttatatagtttactattttacttctagagatagtacataaaggtggtatgtgtgtgtatgctactacaaaaaagttgttaactaaattaacattgggaaatcttatattccatatattagcatttagtccaatgtctttttaagcttatttaattaaaaaatttccagtgagcttatcatgctgtctttacatggggttttcaattttgcatgctcgattattccctgtacaatatttaaaatttattgcttgatacttttgacaacaaattaggttttgtacaattgaacttaaataaatgtcattaaaataaataaatgcaatatgtattaatattcattgtataaaaatagaagaatacaaacatatttgttaaatatttacatatgaaatttaatatagctatttttatggaatttttcattgatatgaaaaatatgatattgcatatgcatagttcccatgttaaatcccattcataactttcattaaagcatttactttgaatttctccaatgcttagaatgtttttaccaggaatggatgtcgctaatcataataaaattcaaccattatttttttcttgtttataatacattgtgttatatgttcaaatatgaaatgtgtatgcacctattgaaatatgtttaatgcatttattaacatttgcaggacacttttacaggccccaattatccaatagtctaataattgtttaagatctagaaaaaaaaaatcaagaatagtggtatttttcatgaagtaataaaaactcgttttgg

SEQ ID NO: 1783 - DNA, 4663 bp, Homo sapiens
tttgcagggcaaagcccaacaccttcccccactgatgcctaccttaatgcctctgaaacaaccactctgagcccttctggaagcgctgtcatttcaaccacaacaatagctactactccatctaagccaacatgtgatgaaaaatatgcaaacatcactgtggattacttatataacaaggaaactaaattatttacagcaaagctaaatgttaatgagaatgtggaatgtggaaacaatacttgcacaaacaatgaggtgcataaccttacagaatgtaaaaatgcgtctgtttccatatctcataattcatgtactgctcctgataagacattamtattagatgtgccaccaggggttgaaaagtttcagttacatgattgtacacaagttgaaaaagcagatactactatttgtttaaaatggaaaaatattraaacctttacttgtgatacacagaatattacctacagatttcartgtggtaatatgatatttgataataaagaaattaaattagaaaaccttgaacccgaacatgagtataagtgtgactcagaaatactctataataaccacaagtttactaacgcaagtaaaattattaaaacagattttgggagtccaggagagcctcagattattttttgtagaagtgaagctgcacatcaaggagtaattacctggaatccccctcaaagatcatttcataattttaycctctgttatataaaagagacagaaaaagattgcctcaatctggataaaaacctgatcaaatatgatttgcaaaatttaaaaccttatacgaaatatgttttatcattacatgcctacatcattgcaaaagtgcaacgtaatggaagtgctgcaatgtgtcatttcacaactaaaagtgctcctccaagccaggtctggaacatgactgtctccatgacatcagataatagtatgcatgtcaagtgtaggcctcccagggaccgtaatggcccccatgaacgttaccatttggaagttgaagctggaaatactctggttagaaatgagtcgcataagaattgcgatttccgtgtaaaagatcttcaatattcaacagactacacttttaaggcctattttcacaatggagactatcctggagaaccctttattttacatcattcaacatcttataattctaaggcactgatagcatttctggcatttctgattattgtgacatcaatagccctgcttgttgttctctacaaaatctatgatctacataagaaaagatcctgcaatttagatgaacagcaggagcttgttgaaagggatgatgaaaaacaactgatgaatgtggagccaatccatgcagatattttgttggaaacttataagaggaagattgctgatgaaggaagactttttctggctgaatttcagagcatcccgcgggtgttcagcaagtttcctataaaggaagctcgaaagccctttaaccagaataaaaaccgttatgttgacattcttccttatgattataaccgtgttgaactctctgagataaacggagatgcagggtcaaactacataaatgccagctatattgatggtttcaaagaacccaggaaatacattgctgcacaaggtcccagggatgaaactgttgatgatttctggaggatgatttgggaacagaaagccacagttattgtcatggtcactcgatgtgaagaaggaaacaggaacaagtgtgcagaatactggccgtcaatggaagagggyactcgggcttttggagatgttgttgtaaagatcaaccagcacaaaagatgtccagattacatcattcagaaattgaacattgtaaataaaaaagaaaaagcaactggaagagaggtgactcacattcagttcaccagctggccagaccacggggtgcctgaggatcctcacttgctcctcaaactgagaaggagagtgaatgccttcagcaatttcttcagtggtcccattgtggtgcactgcagtgctggtgttgggcgcacaggaacctatatcggaattgatgccatgctagaaggcctggaagccgagaacaaagtggatgtttatggttatgttgtcaagctaaggcgacagagatgcctgatggttcaagtagaggcccagtacatcttgatccatcaggctttggtggaatacaatcagtttggagaaacagaagtgaatttgtctgaattacatccatatctacataacatgaagaaaagggatccacccagtgagccgtctccactagaggctgaattccagagacttccttcatataggagctggaggacacagcacattggaaatcaagaagaaaataaaagtaaaaacaggaattctaatgtcatcccatatgactataacagagtgccacttaaacatgagctggaaatgagtaaagagagtgagcatgattcagatgaatcctctgatgatgacagtgattcagaggaaccaagcaaatacatcaatgcatcttttataatgagctactggaaacctgaagtgatgattgctgctcagggaccactgaaggagaccattggtgacttttggcagatgatcttccaaagaaaagtcaaagttattgttatgctgacagaactgaaacatggagaccaggaaatctgtgctcagtactggggagaaggaaagcaaacatatggagatattgaagttgacctgaaagacacagacaaatcttcaacttatacccttcgtgtctttgaactgagacattccaagaggaaagactctcgaactgtgtaccagtaccaatatacaaactggagtgtggagcagcttcctgcagaacccaaggaattaatctctatgattcaggtcgtcaaacaaaaacttccccagaagaattcctctgaagggaacaagcatcacaagagtacacctctactcattcactgcagggatggatctcagcaaacgggaatattttgtgctttgttaaatctcttagaaagtgcggaaacagaagaggtagtggatatttttcaagtggtaaaagctctacgcaaagctaggccaggcatggtttccacattcgagcaatatcaattcctatatgacgtcattgccagcacctaccctgctcagaatggacaagtaaagaaaaacaaccatcaagaagataaaattgaatttgataatgaagtggacaaagtaaagcaggatgctaaytgtgttaatccacttggtgccccagaaaagctccctgaagcaaaggaacaggctgaaggttctgaacccacgmgtggcactgaggggccagaacattctgtcaatggtcctgcaagtccagctttaaatcaaggttcataggaaaagacataaatgaggaaactccaamcctcctgttagctgttatttctatttttgtagaagtaggaagtgaaaataggtatacagtggattaattaaatgcagcgaaccaatatttgtagaagggttatattttactactgtggaaaaatatttaagatagttttgccagaacagtttgtacagacgtatgcttattttaaaattttatctcttattcagtaaaaaacaacttctttgtaatcgttatgtgtgtatatgtatgtgtgtatgggtgtgtgtttgtgtgagagacagagaaagagagagaattctttcaagtgaatctaaaagcttttgcttttcctttgtttttatgaagaaaaaatacattttatattagaagtgttaacttagcttgaaggatctgtttttaaaaatcataaactgtgtgcagactcaataaaatcatgtacatttctgaaatgacctcaagatgtcctccttgttctactcatatatatctatcttatatagtttactattttacttctagagatagtacataaaggtggtatgtgtgtgtatgctactacaaaaaagttgttaactaaattaacattgggaaatcttatattccatatattagcatttagtccaatgtctttttaagcttatttaattaaaaaatttccagtgagcttatcatgctgtctttacatggggttttcaattttgcatgctcgattattccctgtacaatatttaaaatttattgcttgatacttttgacaacaaattaggttttgtacaattgaacttaaataaatgtcattaaaataaataaatgcaatatgtattaatattcattgtataaaaatagaagaatacaaacatatttgttaaatatttacatatgaaatttaatatagctatttttatggaatttttcattgatatgaaaaatatgatattgcatatgcatagttcccatgttaaatcccattcataactttcattaaagcatttactttgaatttctccaatgcttagaatgtttttaccaggaatggatgtcgctaatcataataaaattcaaccattatttttttcttgtttataatacattgtgttatatgttcaaatatgaaatgtgtatgcacctattgaaatatgtttaatgcatttattaacatttgcaggacacttttacaggccccaattatccaatagtctaataattgtttaagatctagaaaaaaaaaatcaagaatagtggtatttttcatgaagtaataaaaactcgttttgg

SEQ ID NO: 1784 - DNA, 5353 bp, Homo sapiens
ttgattggccggcctgtgatggtaccttactggtctttggggttccagctgtgtcgctatggctaccagaatgactctgagatcgccagcttgtatgatgagatggtggctgcccagatcccttatgaygtgcagtactcagacatcgactacatggagcggcagctggacttcaccctcagccccaagtttgcygggtttccagctctgatcaatcgcatgaaggctgatgggatgcgggtcatcctcattctggatccagccatttctggcaatgagacacagccttatcctgccttcactcggggcgtggaggatgacgtcttcatcaaatacccaaatgatggagacattgtctggggaaagctatatcgagcttatgtggccttcccagactttttccgtaattcaactgccaagtggtggaagagggaaatagaagaactatacaacaatccacagaatccagagaggagcttgaagtttgatggcatgtggattgatatgaatgaaccatcaagcttcgtgaatggggcagtttctccaggctgcagggacgcctctctgaaccaccctccctacatgccacatttggagtccagggacaggggcctgagcagcaagaccctttgtatggagagtcagcagatcctcccagacggctccctggtgcagcactacaacgtgcacaacctgtatgggtggtcccagaccagacccacatacgaagccgtgcaggaggtgacgggacagcgaggggtcgtcatcacccgctccacatttccctcttctggccgctgggcaggacattggctgggagacaacacggccgcatgggatcagctgaagaagtctatcattggctccttttatttcctcttgtttcagacgggagcagatatctgtgggttctttcaagacgctgagtacgagatgtgtgttcgctggwtgcagctgggggccttttaccccttctcaagaaaccacaataccattgggaccaggagacaagaccctgtgtcctgggatgctgcttttgtgaatatttccagaaatgtcctgcagaccagatacaccctgttgccatatctgtataccttgatgcaaaaggcccacacggagggcgtcactgttgtgcggcctctgctccatgagtttgtgtcagaccaggtgacatgggacatagacagtcagttcctgctgggcccagccttcctggtcagccctgtcctggagcgcaatgccagaaatgtcactgcatatttccctagagcccgttggtacgattactacacgggtgtggatattaatgcaagaggagagtggaagaccttgccagcccctcttgaccacattaatcttcatgtccgtgggggctacatcctgccctggcaagagcctgcactgaacacccacttaagtcgaaagaaccctcttggtcttattattgccctagatgaaaacaaagaagcaaaaggagaacttttctgggatgatgggcaaacaaaggatactgtggccaagaaagtatatcttttatgtgagttttctgtcactcaaaaccacttggaggtgactatttcacaatcaacctacaaggaccccaataatttagcattcaatgagattaaaattcttgggatggaggaacctagcaatgttacggtgaaacacaatggtgtcccaagtcagacttctcctacagtcacttatgattctaacctgaaggtcgccattatcacagacatcaatcttttcctgggagaagcatacacagtggagtggagcataaagataagggatgaagaaaaaatagactgttaccctgatgagaatggtgattctgcagaaaactgcactgcccgtggctgtatctgggaggcatccaattcttctggagtccctttttgctattttgtcaaygacctatactctgtcagtgatgttcagtataaytcccatggggccacagctgacatctccttaaagtcttcygttyatgccaatgccttcccytccacacccgtgaacccccttcgcctggatgtcacttaccataagaatgaaatgctacagttcaagatttatgatcccaacaacaatcggtatgaagttccagtccctctgaacatacccagcgtgccatccagcacccctgagggtcaactctatgatgtcctcattaagaagaatccatttgggattgaaattcgccggaagagtacaggcactataatttgggactctcagctccttggcttcaccttcaatgacatgtttatccgcatctccacccgccttccctccaagtacctctatggctttggggagactgagcacacgtcctacaggagagacttggagtggcacacttgggggatgttctcccgagaccagcccccagggtacaagaagaattcctatggtgtccacccctactacatggggctagaggaggatggcagtgcccatggagtgctcctgctgaacagcaatgccatggatgtgacgttccagcccctgcctgccttgacataccgtaccacagggggagttctggacttttatgtgttcttggggccaactccagagcttgtcacccagcagtacactgagttgattgsccggcctgtgatggtaccttactggtctttggggttccagctgtgtcgctatggctaccagaacgactctgagatckccagcttgtatgatgagatggtggctgcccagatcccttatgacgtgcagtactcagacatcgactacatggagcggcagctggacttcaccctcagccccaagtttgccgggtttccagctctgatcaatcgcatgaaggctgatgggatgcgggtcatcctcattctggatccagccatttctggcaatgagacacagccctatcctgccttcactcggggcgtggaggatgacgtcttcatcaagtacccaaatgatggagacattgtctggggaaaggtctggcctgattttcctgatgttgttgtgaatgggtctctagactgggacagtcaagtggagctatatcgagcttatgtggccttcccagactttttccgtaattcaactgccaagtggtggaagagggaaatagaagaactatacaacaatccacagaatccagagaggagcttgaagtttgatggcatgtggattgatatgaatgaaccatcaagcttcgtgaatggggcagtttctccaggctgcagggatgcctctctgaaccaccctccctacatgccgtatttggagtccagggacaggggcctgagcagcaagaccctgtgcatggagagtcagcagatcctcccagacggctccccggtgcagcactacaatgtgcacaacctgtacgggtggtcccagaccagacccacatacgaagccgtgcaggaggtgacaggacagcgaggggtcgtcatcacccgctccacatttccctcttctggccgctgggcaggacattggctgggagacaacacrgccgcgtgggatcagctgaagaagtctatcattggcatgatggagttcagcctcttcggcatatcctatacgggagcagatatctgtgggttctttcaagatgctgaatatgagatgtgtgttcgctggatgcagctgggggccttttaccccttctcaagaaaccacaacaccattgggaccaggagacaagaccctgtgtcctgggatgttgcttttgtgaatatttccagaactgtcctgcagaccagatacaccctgttgccatatctgtataccttgatgcataaggcccacacggagggcgtcactgttgtgcggcctctgctccatgartttgtgtcagaccaggtgacatgggacatagacagtcagttcctgctgggcccagccttcctggtcagccctgtcctggagcgtaatgccagaaatgtcactgcatatttccctagagcccgctggtatgattactacacgggtgtggatattaatgcaagaggagagtggaagaccttgccagcccctcttgaccacattaatcttcatgtccgtgggggctacatcctgccctggcaagagcctgcactgaacacccacttaagccgccagaaattcatgggcttcaaaattgccttggatgatgaaggaactgctgggggctggctcttctgggatgatgggcaaagcattgatacctatgggaaaggactctattacttggccagcttttctgccagccagaatacgatgcaaagccatataattttcaacaattacatcactggtacaaatcctttgaaactgggctacattgaaatctggggagtgggcagtgtccccgttaccagtgtcagcatctctgtgagtggcatggtcataacaccctccttcaacaatgaccccacgacacaggtattaagcatcgatgtgactgacagaaacatcagcctacataattttacttcattgacgtggataagcactctgtgaatttttacagcaagattctaactaactatgaatgactttgaaactacttatacttcatactcataaaaattattgtgtgttgctaatttgttcatacccactattggtgaaatatttctgttaattttgttatatgttttttgtgtgaaccctaaaggttaaaccttagccctgtgggataggcagttagggaggtgtggaaaatctatgcattaccttaatgtctctgtgtggttagtatggtagtgactgttcatcatatgacatttactgaagatgaactgggtccatgatgaagtgtgtgtatgtccacgtttgtaatcatagaatggaccccattcttttgttaaatacacaagagaaagctttctgtgacagttccaggtcttgaagctaatcagcatctcaagaaagtatccagaaagaacatctgctagttggttataggcggtgggaggaataatatacctaattggttataggtggggggagcatgataagcaaagaaaaggcaaacacaaggaaagatcagatgaaacagaagatgatagtaaaagtgatcctaagtaagaacataatgtaaaattgtcagcagcctcatggggaggaaaaaggaagagtcaactcacttgaagaagagggtcttgagaaatccttagcataaagggctactggtgagattgagatctgagcaggcaaagctcaaaagagagtttggaggttaaaaataatttatttttgcagtagtgtgctttgaaatgtgtaaatcttatttctaatgtatacaaccacatttcacataaaaatatgcaatttatatgccagataaaaataaaacaagtgaatttgcaagtga

SEQ ID NO: 1785 - DNA, 2435 bp, Homo sapiens
atgcccgccgacacagcaggcagccgaggtaatgcatattcacaaggtgccttaatcccttgtgagactttcctggcagcggcacaccgctgtggactcagggttccaactcttacagtatttgcttgcactacgcttggtcgattagcctattcgatttccacttattcatttctgccttcatgtgaagcaacttctgtaagcaaggagcaatattatgatatggacataaaatttgaaatggcagacgtttgcaagctgccagctccccagtctggatgtgaactagcatcacagaatctggtgggtgaagatggagaaggttccctccccgtgcgctttcccttgacagcagacacagaggcccgggagctgttggcttaccaacccctagtccgttggtcagatattgggggtcctcaggccatgagcctgtgggcaataagtcctcatgccgaaaggagatttcggcttgattctggcgtaggtgaaagggattgctatggacaattactgtgcacctgggccttatgtaatttaacctcaacatcgtcctggggtgcatggtggtctccgtcttttctacatgaggctctgaaagatcagcattcctctttcactccaacctcctctactctgattctcttatctggtattctcttatatgaccctgttacagaaaaaggggactggaacataactcgccttaaggatttggtgaataatggtttgagtatggggctcatgctcctgactgagccagacttgagacctgctggagaagctcaaccccagcacttccctgctgtagaggataggaagccaggagcagaaagtccttcctgggcctctagtcccagaggggagctttttaaggtcaacaaatttaactcgagtcctcatgggaactgtggtcactatgacagactcagaggagactgggcctgtggagaaactcaaaacggaggtgtgtctgaagaaacgatgggaggtggaaaggttaaaaaatcaaaacrttctgtgaatgtggggttatcagaagctcaagatggagatgtgtctcaagaaacagtggaaaatgtaaaagttcaaaaatctcctcagaaatccaytgtattaacaaacggagagacagcaatgcagtctcccaattcagaatcaaaaaagaaaaagaagaaaaagggaaaaatgaarccagataatgaggaagataaccgtgaggtgcccagcctgcgcctgagactgacaggagcttttgacgatacttcatttgcttctctatctaatcttgtcaatgaaaacactttgaaggcaataaaagaaatgagctttatgaacatgactgaaattcagcataaaaccatcagatcactcctggaaggcagggatcttctagcagctgcaaaaacaggcagtgttgaactcactgttaagttaaagttcatgcccacgaatagaccaggggtctttattctctcacctactagagaactagccatgcaaatttttggtggtcttaaggagctaatactcaccacatgcatacctatgggttgataatgggtggcgataacacatctgctgaagcacagaaacttgctaatgggattaacatcattgtggccacaccaggccatctgcttgactatatgcagaatacaccagggtttatgtataaaaacctacaatatttggttattgatgaagctgatagaatcttggatgttgggtttgaagaggaattaaagcaaattattaaacttttgccaacatgcagacacactatgctcttatctgccacccaaactcgaaaagagccattgtatgttggcgatgatgataaagctaatgcaacagtggatggtcttgagcagggatacgttgtttgtccctctgaaaaaagattccttctgccctttgctgtccttaagaagaaccgaaagaggaagattatggtcttcttttcatcttctatgtctgtgaaatatcactatgagttgctaaattacatggatttgcccatcttggccattcatggaaagcaaaagcaaaataagggtacaaccacattcttccagttctgcaaagcagattcaggaatactattgtgtatggatgtggcagcaagaggactggacattcctgaagtcgactggatcgttcagcatgaccctctggatgaccctaaggaatatattcatcgtgtaagcagaacagccagaggtctaaatgggagaggtcatgycttgctcattttgtgcccagaagaaatggggttccttcactacttgaaacaatccaagtttccattaagtgaatttgacttttcctggtctaaaatttctgacattcagtctcagcttgagaaattaattgaaaagaactgctttcttcataaggcagcccaggaagcatataagtcatacacacgagcc

SEQ ID NO: 1786 - DNA, 2214 bp, Homo sapiens
ttcctttcccggcgtgcaccgcgaatccctcctcctcttctttacctctctccctyctcctcaggttctctatcgacgagtctggtagctgagcgttgggctgtaggtcgctgtgctgtgtgatcccccagagccatgcccgagatagtggatacctgttcgttggcctctccggcttccgtctgccggaccaagcacctgcacctkcgctgcagcgtcgactttactcgccggacgctgaccgggactgctgctctcacggtccagtctcaggaggacaatctgcgcagcctggttttggatacaaaggaccttacaatagaaaaagtagtgatcaatggacaagaagtcaaatatgctcttggagaaagacaaagttacaagggatcgccaatggaaatctctcttcctatcgctttgagcaaaaatcaagaaattgttatagaaatttcttttgagacctctccaaaatcttctgctctccagtggctcactcctgaacagacttctgggaaggaacacccatatctctttagtcagtgccaggccatccactgcagagcaatccttccttgtcaggacactccttctgtgaaattaacctatactgcagaggtgtctgtccctaaagaactggtggcacttatgagtgctattcgtgatggagaaacacctgacccagaagacccaagcaggaaaatatacaaattcatccaaaaagttccaataccctgctacctgattgctttagttgttggagctttagaaagcaggcaaattggcccaagaactttggtgtggtctgagaaagagcaggtggaaaagtctgcttatgagttttctgagactgaatctatgcttaaaatagcagaagatctgggaggaccgtatgtatggggacagtatgacctattggtcctgccaccatccttcccttatggtggcatggagaatccttgccttacttttgtaactcctactctactggcaggcgacaagtcactctccaatgtcattgcacatgaaatatctcatagctggacagggaatctagtgaccaacaaaacttgggatcacttttggttaaatgagggacatactgtgtacttggaacgccacatttgcggacgattgtttggtgaaaagttcagacattttaatgctctgggaggatggggagaactacagaattcggtaaagacatttggggagacacatcctttcaccaaacttgtggttgatctgacagatatagaccctgatgtagcttattcttcagttccctatgagaagggctttgctttacttttttaccttgaacaactgcttggaggaccagagattttcctaggattcttaaaagcttatgttgagaagttttcctataagagcataactactgatgactggaaggatttcctgtattcctattttaaagataaggttgatgttctcaatcaagttgattggaatgcctggctctaytctcctggactgcctcccataaagcccaattatgatatgactctgacaaatgcttgtattgccttaagtcaaagatggattactgccaaagawgatgatttaaattcattcaatgccacagacctgaaggatctctcttctcatcaattgaatgagtttttagcacagacgctccagagggcacctcttccattggggcacataaagcgaatgcaagaggtgtacaacttcaatgccattaacaattctgaaatacgattcagatggctgcggctctgcattcaatccaagtgggaggacgcaattcctttggcgctaaagatggcaactgaacaaggaagaatgaagtttacccggcccttattcaaggatcttgctgcctttgacaaatcccatgatcaagctgtccgaacctaccaagagcacaaagcaagcatgcatcccgtgastgcaatgctggtggggaaagacttaaaagtggattaaagacctgcgtattgatgattttagagatttctcttttttaaatggaattcgtaaagaaatataaaacttcagctcmcaattaaaactgtctttttagttttggctttttattgttttgttggtgattttactgaaataaagttgagctacttcttcttatagtggcatattctttgtaaattttaacaaggtttaatcttttgatttacaaattaaaaaattttgaattagctttatattaat

SEQ ID NO: 1787 - DNA, 2626 bp, Homo sapiens
ttcctttcccggcgtgcaccgcgaatccctcctcctcttctttacctctctccctyctcctcaggttctctatcgacgagtctggtagctgagcgttgggctgtaggtcgctgtgctgtgtgatcccccagagccatgcccgagatagtggatacctgttcgttggcctctccggcttccgtctgccggaccaagcacctgcacctkcgctgcagcgtcgactttactcgccggacgctgaccgggactgctgctctcacggtccagtctcaggaggacaatctgcgcagcctggttttggatacaaaggaccttacaatagaaaaagtagtgatcaatggacaagaagtcaaatatgctcttggagaaagacaaagttacaagggatcgccaatggaaatctctcttcctatcgctttgagcaaaaatcaagaaattgttatagaaatttcttttgagacctctccaaaatcttctgctctccagtggctcactcctgaacagacttctgggaaggaacacccatatctctttagtcagtgccaggccatccactgcagagcaatccttccttgtcaggacactccttctgtgaaattaacctatactgcagaggtgtctgtccctaaagaactggtggcacttatgagtgctattcgtgatggagaaacacctgacccagaagacccaagcaggaaaatatacaaattcatccaaaaagttccaataccctgctacctgattgctttagttgttggagctttagaaagcaggcaaattggcccaagaactttggtgtggtctgagaaagagcaggtggaaaagtctgcttatgagttttctgagactgaatctatgcttaaaatagcagaagatctgggaggaccgtatgtatggggacagtatgacctattggtcctgccaccatccttcccttatggtggcatggagaatccttgccttacttttgtaactcctactctactggcaggcgacaagtcactctccaatgtcattgcacatgaaatatctcatagctggacagggaatctagtgaccaacaaaacttgggatcacttttggttaaatgagggacatactgtgtacttggaacgccacatttgcggacgattgtttggtgaaaagttcagacattttaatgctctgggaggatggggagaactacagaattcggtaaagacatttggggagacacatcctttcaccaaacttgtggttgatctgacagatatagaccctgatgtagcttattcttcagttccctatgagaagggctttgctttacttttttaccttgaacaactgcttggaggaccagagattttcctaggattcttaaaagcttatgttgagaagttttcctataagagcataactactgatgactggaaggatttcctgtattcctattttaaagataaggttgatgttctcaatcaagttgattggaatgcctggctctaytctcctggactgcctcccataaagcccaattatgatatgactctgacaaatgcttgtattgccttaagtcaaagatggattactgccaaagawgatgatttaaattcattcaatgccacagacctgaaggatctctcttctcatcaattgaatgagtttttagcacagacgctccagagggcacctcttccattggggcacataaagcgaatgcaagaggtgtacaacttcaatgccattaacaattctgaaatacgattcaggtacatcattttaacttgtctctgtggaagaaagcagaaaactaaactcctttgaaagatggagaaagggaatgcagagtatgagacatacttgagtcttgagaattccttgtcaaactgactgcttctatataaatacttatagtggtatttaaggaatagttgcaatatgtaatctggtagtattaatctttttgttagactttgctctaaacctctcttgccttaaaagaaaaaaaaaaaattagaatgaaggattccgtggtaaataggctttctccacaaccaactaaatctactttgaaatgggaatagttagaaatattttattctattatatgttaatctttcttaattcaaatttgtaatgtgaggcttaaaccaaagtttaattccttcagaaattgcatgtataaggtatgtgagcacctacctgatctttcttaattcaaatttgtaatgtgaggcttaaaccaaagtttaattccttcagaaattggatttataaggtatgtgagcacctacctgatccagacctttaaaaatatatgatctttttcaagaaccagctcctcttctttctcttcaccaattattaaattgtatatataaggatttgagagtctcagaatcaagacataccataaagtggtgtacagtataactatagtggggttattcatatcactacagaagtaatattaagatatacctgtcatatcctgccccttcctcattttctactccatgctccccccaaatcctccttttagatggctgcggctctgcattcaatccaagtgggaggacgcaattcctttggcgctaaagatggcaactgaacaaggaagaatgaagtttacccggcccttattcaa

SEQ ID NO: 1788 - DNA, 2211 bp, Homo sapiens
ttcctttcccggcgtgcaccgcgaatccctcctcctcttctttacctctctccctyctcctcaggttctctatcgacgagtctggtagctgagcgttgggctgtaggtcgctgtgctgtgtgatcccccagagccatgcccgagatagtggatacctgttcgttggcctctccggcttccgtctgccggaccaagcacctgcacctkcgctgcagcgtcgactttactcgccggacgctgaccgggactgctgctctcacggtccagtctcaggaggacaatctgcgcagcctggttttggatacaaaggaccttacaatagaaaaagtagtgatcaatggacaagaagtcaaatatgctcttggagaaagacaaagttacaagggatcgccaatggaaatctctcttcctatcgctttgagcaaaaatcaagaaattgttatagaaatttcttttgagacctctccaaaatcttctgctctccagtggctcactcctgaacagacttctgggaaggaacacccatatctctttagtcagtgccaggccatccactgcagagcaatccttccttgtcaggacactccttctgtgaaattaacctatactgcagaggtgtctgtccctaaagaactggtggcacttatgagtgctattcgtgatggagaaacacctgacccagaagacccaagcaggaaaatatacaaattcatccaaaaagttccaataccctgctacctgattgctttagttgttggagctttagaaagcaggcaaattggcccaagaactttggtgtggtctgagaaagagcaggtggaaaagtctgcttatgagttttctgagactgaatctatgcttaaaatagcagaagatctgggaggaccgtatgtatggggacagtatgacctattggtcctgccaccatccttcccttatggtggcatggagaatccttgccttacttttgtaactcctactctactggcaggcgacaagtcactctccaatgtcattgcacatgaaatatctcatagctggacagggaatctagtgaccaacaaaacttgggatcacttttggttaaatgagggacatactgtgtacttggaacgccacatttgcggacgattgtttggtgaaaagttcagacattttaatgctctgggaggatggggagaactacagaattcggtaaagacatttggggagacacatcctttcaccaaacttgtggttgatctgacagatatagaccctgatgtagcttattcttcagttccctatgagaagggctttgctttacttttttaccttgaacaactgcttggaggaccagagattttcctaggattcttaaaagcttatgttgagaagttttcctataagagcataactactgatgactggaaggatttcctgtattcctattttaaagataaggttgatgttctcaatcaagttgattggaatgcctggctctaytctcctggactgcctcccataaagcccaattatgatatgactctgacaaatgcttgtattgccttaagtcaaagatggattactgtaaawgatgatttaaattcattcaatgccacagacctgaaggatctctcttctcatcaattgaatgagtttttagcacagacgctccagagggcacctcttccattggggcacataaagcgaatgcaagaggtgtacaacttcaatgccattaacaattctgaaatacgattcagatggctgcggctctgcattcaatccaagtgggaggacgcaattcctttggcgctaaagatggcaactgaacaaggaagaatgaagtttacccggcccttattcaaggatcttgctgcctttgacaaatcccatgatcaagctgtccgaacctaccaagagcacaaagcaagcatgcatcccgtgastgcaatgctggtggggaaagacttaaaagtggattaaagacctgcgtattgatgattttagagatttctcttttttaaatggaattcgtaaagaaatataaaacttcagctcmcaattaaaactgtctttttagttttggctttttattgttttgttggtgattttactgaaataaagttgagctacttcttcttatagtggcatattctttgtaaattttaacaaggtttaatcttttgatttacaaattaaaaaattttgaattagctttatattaat

SEQ ID NO: 1789 - DNA, 1920 bp, Homo sapiens
ttcctttcccggcgtgcaccgcgaatccctcctcctcttctttacctctctccctyctcctcaggttctctatcgacgagtctggtagctgagcgttgggctgtaggtcgctgtgctgtgtgatcccccagagccatgcccgagatagtggatacctgttcgttggcctctccggcttccgtctgccggaccaagcacctgcacctkcgctgcagcgtcgactttactcgccggacgctgaccgggactgctgctctcacggtccagtctcaggaggacaatctgcgcagcctggttttggatacaaaggaccttacaatagaaaaagtagtgatcaatggacaagaagtcaaatatgctcttggagaaagacaaagttacaagggatcgccaatggaaatctctcttcctatcgctttgagcaaaaatcaagaaattgttatagaaatttcttttgagacctctccaaaatcttctgctctccagtggctcactcctgaacagacttctgggaaggaacacccatatctctttagtcagtgccaggccatccactgcagagcaatccttccttgtcaggacactccttctgtgaaattaacctatactgcagaggtgtctgtccctaaagaactggtggcacttatgagtgctattcgtgatggagaaacacctgacccagaagacccaagcaggaaaatatacaaattcatccaaaaagttccaataccctgctacctgattgctttagttgttggagctttagaaagcaggcaaattggcccaagaactttggtgtggtctgagaaagagcaggtggaaaagtctgcttatgagttttctgagactgaatctatgcttaaaatagcagaagatctgggaggaccgtatgtatggggacagtatgacctattggtcctgccaccatccttcccttatggtggcatggagaatccttgccttacttttgtaactcctactctactggcaggcgacaagtcactctccaatgtcattgcacatgaaatatctcatagctggacagggaatctagtgaccaacaaaacttgggatcacttttggttaaatgagggacatactgtgtacttggaacgccacatttgcggacgattgtttggtgaaaagttcagacattttaatgctctgggaggatggggagaactacagaattcggtaaagacatttggggagacacatcctttcaccaaacttgtggttgatctgacagatatagaccctgatgtagcttattcttcagttccctatgagaagggctttgctttacttttttaccttgaacaactgcttggaggaccagagattttcctaggattcttaaaagcttatgttgagaagttttcctataagagcataactactgatgactggaaggatttcctgtattcctattttaaagataaggttgatgttctcaatcaagttgattggaatgcctggctctaytctcctggactgcctcccataaagcccaattatgatatgactctgacaaatgcttgtattgccttaagtcaaagatggattactgtaaataaaccaataagtattattaaattrtacttgaacaaaaataactaggtaacatttatttcaggccaaagawgatgatttaaattcattcaatgccacagacctgaaggatctctcttctcatcaattgaatgagtttttagcacagacgctccagagggcacctcttccattggggcacataaagcgaatgcaagaggtgtacaacttcaatgccattaacaattctgaaatacgattcagatggctgcggctctgcattcaatccaagtgggaggacgcaattcctttggcgctaaagatggcaactgaacaaggaagaatgaagtttacccggcccttattcaa

SEQ ID NO: 1790 - DNA, 2219 bp, Homo sapiens
ttggacctagcttggcgcggaatccgtgaattgcccgcggcccgagggtgcaggcctcctctagcccgtggaatccaaccccggctcctgtcagcagccctcccctgctgctccccatccctgccatcgtcttcatcgctgtgggcatctatttgttgctgctgggtctagtcctgctgactaggaactgcctgctggcccagggctgctgcgcggacggtagctccccctgcaggaagcaaggttcctccgggcccccagactgctgctggacctgtgcagaagcctgcaactttcctctgcctagcccggcccacttcctggatgcttgctgcccccagcccaccagagctgactgggcacctcgctgcccccgctgctgcccactctgcgactgtgcctgtacgtgccagctccccgactgccagagcctcaactgtctctgcttcgagatcaagctccgatgaggacccagggcccctgccctctggggagcggccagcccccagggcccatgtgccctcctccctgaagagcctttccccacgccactggaaccacagatggcctgccgagcacccaggcctgggaactggaagtggcagcgcagggcctggctccctgcagggcaggactcttggccggctggacggcagctcctctggagggccagaaaagagaggggctagtgctcgggcaggtgccctggcttcccttcccctccacacgtcaacgattctatttgaagttgggcaggggggtggcgctgctcaccacacacaagtgttataggaggagtctggcccttgagtaccgggtacgcaggggtgcctcaaccacactccgtccacggactctccgttattttaggaggtccctggccaaagatttatttctcttgacaaccaagggcctccgtctggatttccaaggaagaatttcctctgaagcaccggtgagaacttgctactaccagcaccatgccctaccaatatccagcactgaccccggagcagaagaaggarctgtctgacatcgctcaccgcatcgtggcacctggcaagggcatcctggctgcagatgagtccactgggagcattgccaagcggctgcagtccattggcaccgagaacaccgaggagaaccggcgcttctaccgccagctgctgctgacagctgacgaccgcgtgaacccckgcattgggggtgtcatcctcttccatgagacactctaccagaaggcggatgatgggcgtcccttcccccaagttatcaaatccaagggcggtgttgtgggcatcaaggtagacaagggcgtggtccccctggcagggacaaatggcgagactaccacccaagggttggrtgggctgtctgagcgctgtgcccagtacaagaaggacggagctgacttcgccaagtggcgttgtgtgctgaagattggggaacacaccccctcagccctcgccatcatggaaaatgccaatgttctggcccgttatgccagtatctgccagcaggtgggcctgcagaatggcattgtgcccatcgtggagcctgagatcctccctgatggggmccatgacttgaagcgctgccagtatgtgaccragaaggtgctggctgctgtctacaaggctctgagtgaccaccacatctacctggaaggcaccttgctgaagcccaacatggtcaccccaggccatgcttgcactcagaagttttctcatgaggagattgccatggcgaccgtcacagcgctgcgccgcacagtgccccccgctgtcactgggatcaccttcctgtctggaggccagagtgaggaggagkcgtccatcaacctcaatgccattaacaagtgccccctgctgaagccctgggccctgaccttctcytacggccgagccctgcaggcctctgccctgaaggcctggggcgggaagaaggagaacctgaaggctgcgcaggaggagtatgtcaagcgagccctggccaacagccttgcctgtcaaggaaagtacactccgagcggtcaggctggggctgctgccagcgagtccctyttygtctctaaccacgcctattaagcggaggtgttmccagkctggcttgcccgcgctctttyttccctcgtgacagtgktgtgtggtgtcgtctgtgaatgctaagtccatcaccctttccggsacactgccaaataaacagctatttaaggggra

SEQ ID NO: 1791 - DNA, 2207 bp, Homo sapiens
ttggacctagcttggcgcggaatccgtgaattgcccgcggcccgagggtgcaggcctcctctagcccgtggaatccaaccccggctcctgtcagcagccctcccctgctgctccccatccctgccatcgtcttcatcgctgtgggcatctatttgttgctgctgggtctagtcctgctgactaggaactgcctgctggcccagggctgctgcgcggacggtagctccccctgcaggaagcaaggttcctccgggcccccagactgctgctggacctgtgcagaagcctgcaactttcctctgcctagcccggcccacttcctggatgcttgctgcccccagcccaccagagctgactgggcacctcgctgcccccgctgctgcccactctgcgactgtgcctgtacgtgccagctccccgactgccagagcctcaactgtctctgcttcgagatcaagctccgatgaggacccagggcccctgccctctggggagcggccagcccccagggcccatgtgccctcctccctgaagagcctttccccacgccactggaaccacagatggcctgccgagcacccaggcctgggaactggaagtggcagcgcagggcctggctccctgcagggcaggactcttggccggctggacggcagctcctctggagggccagaaaagagaggggctagtgctcgggcaggtgccctggcttcccttcccctccacacgtcaacgattctatttgaagttgggcaggggggtggcgctgctcaccacacacaagtgttataggaggagtctggcccttgagtaccgggtacgcaggggtgcctcaaccacactccgtccacggactctccgttattttaggaggtccctggccaaagatttatttctcttgacaaccaagggcctccgtctggatttccaaggaagaatttcctctgaagcaccggtgagaacttgctactaccagcaccatgccctaccaatatccagcactgaccccggagcagaagaaggarctgtctgacatcgctcaccgcatcgtggcacctggcaagggcatcctggctgcagatgagtccactgggagcattgccaagcggctgcagtccattggcaccgagaacaccgaggagaaccggcgcttctaccgccagctgctgctgacagctgacgaccgcgtgaacccckgcattgggggtgtcatcctcttccatgagacactctaccagaaggcggatgatgggcgtcccttcccccaagttatcaaatccaagggcggtgttgtgggcatcaaggtagacaagggcgtggtccccctggcagggacaaatggcgagactaccacccaagggttggrtgggctgtctgagcgctgtgcccagtacaagaaggacggagctgacttcgccaagtggcgttgtgtgctgaagattggggaacacaccccctcagccctcgccatcatggaaaatgccaatgttctggcccgttatgccagtatctgccagcagaatggcattgtgcccatcgtggagcctgagatcctccctgatggggmccatgacttgaagcgctgccagtatgtgaccragaaggtgctggctgctgtctacaaggctctgagtgaccaccacatctacctggaaggcaccttgctgaagcccaacatggtcaccccaggccatgcttgcactcagaagttttctcatgaggagattgccatggcgaccgtcacagcgctgcgccgcacagtgccccccgctgtcactgggatcaccttcctgtctggaggccagagtgaggaggagkcgtccatcaacctcaatgccattaacaagtgccccctgctgaagccctgggccctgaccttctcytacggccgagccctgcaggcctctgccctgaaggcctggggcgggaagaaggagaacctgaaggctgcgcaggaggagtatgtcaagcgagccctggccaacagccttgcctgtcaaggaaagtacactccgagcggtcaggctggggctgctgccagcgagtccctyttygtctctaaccacgcctattaagcggaggtgttmccagkctggcttgcccgcgctctttyttccctcgtgacagtgktgtgtggtgtcgtctgtgaatgctaagtccatcaccctttccggsacactgccaaataaacagctatttaaggggra

SEQ ID NO: 1792 - DNA, 2279 bp, Homo sapiens
ttggacctagcttggcgcggaatccgtgaattgcccgcggcccgagggtgcaggcctcctctagcccgtggaatccaaccccggctcctgtcagcagccctcccctgctgctccccatccctgccatcgtcttcatcgctgtgggcatctatttgttgctgctgggtctagtcctgctgactaggaactgcctgctggcccagggctgctgcgcggacggtagctccccctgcaggaagcaaggttcctccgggcccccagactgctgctggacctgtgcagaagcctgcaactttcctctgcctagcccggcccacttcctggatgcttgctgcccccagcccaccagagctgactgggcacctcgctgcccccgctgctgcccactctgcgactgtgcctgtacgtgccagctccccgactgccagagcctcaactgtctctgcttcgagatcaagctccgatgaggacccagggcccctgccctctggggagcggccagcccccagggcccatgtgccctcctccctgaagagcctttccccacgccactggaaccacagatggcctgccgagcacccaggcctgggaactggaagtggcagcgcagggcctggctccctgcagggcaggactcttggccggctggacggcagctcctctggagggccagaaaagagaggggctagtgctcgggcaggtgccctggcttcccttcccctccacacgtcaacgattctatttgaagttgggcaggggggtggcgctgctcaccacacacaagtgttataggaggagtctggcccttgagtaccgggtacgcaggggtgcctcaaccacactccgtccacggactctccgttattttaggaggtccctggccaaagatttatttctcttgacaaccaagggcctccgtctggatttccaaggaagaatttcctctgaagcaccggaacttgctactaccagcaccatgccctaccaatatccagcactgaccccggagcagaagaaggarctgtctgacatcgctcaccgcatcgtggcacctggcaagggcatcctggctgcagatgagtccactgggagcattgccaagcggctgcagtccattggcaccgagaacaccgaggagaaccggcgcttctaccgccagctgctgctgacagctgacgaccgcgtgaacccckgcattgggggtgtcatcctcttccatgagacactctaccagaaggcggatgatgggcgtcccttcccccaagttatcaaatccaagggcggtgttgtgggcatcaaggtagacaagggcgtggtccccctggcagggacaaatggcgagactaccacccaagggttggrtgggctgtctgagcgctgtgcccagtacaagaaggacggagctgacttcgccaagtggcgttgtgtgctgaagattggggaacacaccccctcagccctcgccatcatggaaaatgccaatgttctggcccgttatgccagtatctgccagcagaatggcattgtgcccatcgtggagcctgagatcctccctgatggggmccatgacttgaagcgctgccagtatgtgaccragaaggtgctggctgctgtctacaaggctctgagtgaccaccacatctacctggaaggcaccttgctgaagcccaacatggtcaccccaggccatgcttgcactcagaagttttctcatgaggagattgccatggcgaccgtcacagcgctgcgccgcacagtgccccccgctgtcactgggatcaccttcctgtctggaggccagagtgaggaggagkcgtccatcaacctcaatgccattaacaagtgccccctgctgaagccctgggccctgaccttctcytacggccgagccctgcaggcctctgccctgaaggcctggggcgggaagaaggagaacctgaaggctgcgcaggaggagtatgtcaagcgagccctggccaacagccttgcctgtcaaggaaagtacactccgagcggtcaggctggggctgctgccagcgagtccctyttygtctctaaccacgcctattaagcggaggtgttmccaggctgcccccamcactycaggccctgccccctcccactcttgaagaggaggccgcctcctcggggstccagkctggcttgcccgcgctctttyttccctcgtgacagtgktgtgtggtgtcgtctgtgaatgctaagtccatcaccctttccggsacactgccaaataaacagctatttaaggggragtcggc

SEQ ID NO: 1793 - DNA, 1556 bp, Homo sapiens
tccttcttaaaaaaaaccagggctccagagaatcagaacagccaccatcaccgcagggagtcaagggaggagggagattagagaaggagccagggagggtggcagggaggccacgtgatccgagtcccctcacccctttccttcccacaggtccctggccaaagatttatttctcttgacaaccaagggcctccgtctggatttccaaggaagaatttcctctgaagcaccggaacttgctactaccagcaccatgccctaccaatatccagcactgaccccggagcagaagaaggarctgtctgacatcgctcaccgcatcgtggcacctggcaagggcatcctggctgcagatgagtccactgggagcattgccaagcggctgcagtccattggcaccgagaacaccgaggagaaccggcgcttctaccgccagctgctgctgacagctgacgaccgcgtgaacccckgcattgggggtgtcatcctcttccatgagacactctaccagaaggcggatgatgggcgtcccttcccccaagttatcaaatccaagggcggtgttgtgggcatcaaggtagacaagggcgtggtccccctggcagggacaaatggcgagactaccacccaagggttggrtgggctgtctgagcgctgtgcccagtacaagaaggacggagctgacttcgccaagtggcgttgtgtgctgaagattggggaacacaccccctcagccctcgccatcatggaaaatgccaatgttctggcccgttatgccagtatctgccagcagaatggcattgtgcccatcgtggagcctgagatcctccctgatggggmccatgacttgaagcgctgccagtatgtgaccragaaggtgctggctgctgtctacaaggctctgagtgaccaccacatctacctggaaggcaccttgctgaagcccaacatggtcaccccaggccatgcttgcactcagaagttttctcatgaggagattgccatggcgaccgtcacagcgctgcgccgcacagtgccccccgctgtcactgggatcaccttcctgtctggaggccagagtgaggaggagkcgtccatcaacctcaatgccattaacaagtgccccctgctgaagccctgggccctgaccttctcytacggccgagccctgcaggcctctgccctgaaggcctggggcgggaagaaggagaacctgaaggctgcgcaggaggagtatgtcaagcgagccctggccaacagccttgcctgtcaaggaaagtacactccgagcggtcaggctggggctgctgccagcgagtccctyttygtctctaaccacgcctattaagcggaggtgttmccaggctgcccccamcactycaggccctgccccctcccactcttgaagaggaggccgcctcctcggggstccagkctggcttgcccgcgctctttyttccctcgtgacagtgktgtgtggtgtcgtctgtgaatgctaagtccatcaccctttccggsacactgccaaataaacagctatttaaggggragtcggc

SEQ ID NO: 1794 - DNA, 1926 bp, Homo sapiens
gactgggcacctcgctgcccccgctgctgcccactctgcgactgtgcctgtacgtgccagctccccgactgccagagcctcaactgtctctgcttcgagatcaagctccgatgaggacccagggcccctgccctctggggagcggccagcccccagggcccatgtgccctcctccctgaagagcctttccccacgccactggaaccacagatggcctgccgagcacccaggcctgggaactggaagtggcagcgcagggcctggctccctgcagggcaggactcttggccggctggacggcagctcctctggagggccagaaaagagaggggctagtgctcgggcaggtgccctggcttcccttcccctccacacgtcaacgattctatttgaagttgggcaggggggtggcgctgctcaccacacacaagtgttataggaggagtctggcccttgagtaccgggtacgcaggggtgcctcaaccacactccgtccacggactctccgttattttaggaggtccctggccaaagatttatttctcttgacaaccaagggcctccgtctggatttccaaggaagaatttcctctgaagcaccggaacttgctactaccagcaccatgccctaccaatatccagcactgaccccggagcagaagaaggarctgtctgacatcgctcaccgcatcgtggcacctggcaagggcatcctggctgcagatgagtccactgggagcattgccaagcggctgcagtccattggcaccgagaacaccgaggagaaccggcgcttctaccgccagctgctgctgacagctgacgaccgcgtgaacccckgcattgggggtgtcatcctcttccatgagacactctaccagaaggcggatgatgggcgtcccttcccccaagttatcaaatccaagggcggtgttgtgggcatcaaggtagacaagggcgtggtccccctggcagggacaaatggcgagactaccacccaagggttggrtgggctgtctgagcgctgtgcccagtacaagaaggacggagctgacttcgccaagtggcgttgtgtgctgaagattggggaacacaccccctcagccctcgccatcatggaaaatgccaatgttctggcccgttatgccagtatctgccagcagaatggcattgtgcccatcgtggagcctgagatcctccctgatggggmccatgacttgaagcgctgccagtatgtgaccragaaggtgctggctgctgtctacaaggctctgagtgaccaccacatctacctggaaggcaccttgctgaagcccaacatggtcaccccaggccatgcttgcactcagaagttttctcatgaggagattgccatggcgaccgtcacagcgctgcgccgcacagtgccccccgctgtcactgggatcaccttcctgtctggaggccagagtgaggaggagkcgtccatcaacctcaatgccattaacaagtgccccctgctgaagccctgggccctgaccttctcytacggccgagccctgcaggcctctgccctgaaggcctggggcgggaagaaggagaacctgaaggctgcgcaggaggagtatgtcaagcgagccctggccaacagccttgcctgtcaaggaaagtacactccgagcggtcaggctggggctgctgccagcgagtccctyttygtctctaaccacgcctattaagcggaggtgttmccaggctgcccccamcactycaggccctgccccctcccactcttgaagaggaggccgcctcctcggggstccagkctggcttgcccgcgctctttyttccctcgtgacagtgktgtgtggtgtcgtctgtgaatgctaagtccatcaccctttccggsacactgccaaataaacagctatttaaggggragtcggc

SEQ ID NO: 1795 - DNA, 1152 bp, Homo sapiens
atgactgtaacttggaccacatgggtcccaacccgctctgaagtgcaattcgggttgcagccgtcrgggcccctgccyctccgcgcccagggcaccttcgtcccctttgtggacgggggcattctccggcggaagctctacatacaccgagtcacgcttcgcaagctgctgccaggggttcagtatgtttatcgctgtggcagtgcgcagggctggagccgtcggttccgcttcagggccctcaagaatggggcccactggagtccccgtctggctgtgtttggagacctgggggctgacaacccgaaggccgtcccccggctgcgcagggacacccagcagggcatgtatgacgccgttctccatgtgggagactttgcctacaacctggatcaggacaacgcccgtgttggggataggttcatgcggctcattgaacccgtggctgccagcctgccrtacatgacatgccctgggaatcatgaagaacgctacaacttctctaactacaaggctcgcttcagcatgccgggggataatgagggcctgtggtacagctgggatctgggtcccgcccacatcatctccttctccaccgaggtctatttctttctccattatggccgccacttggtacagaggcagtttcgctggctggagagcgacctccagaaagccaataagaaccgggcagcccggccgtggatcatcactatggggcaccggcccatgtactgctccaacgcagatctggacgactgcacacgacatgaaagcaaggtccgcaaaggcctccaaggcaagctgtacgggttggaggatcttttctacaaatatggagtggatctgcagctgtgggctcatgagcactcgtatgaacgactgtggccaatttacaactaccaggtatttaacggcagccgagagatgccctacacyaacccgcgagggcctgtccacatcatcacaggatctgctggctgtgaggagcggctgacgccctttgctgtcttcccgaggccctggagtgccgtgcgtgtgaaggagtacgggtatacgcggctgcacatcctcaacgggacccacatccacatccagcaggtgtcggacgaccaggatgggaagatcgtagatgatgtctgggtggtgaga

SEQ ID NO: 1796 - DNA, 2017 bp, Homo sapiens
ccctgggtcttcctagccccaagactctcaagtccatatgcctggaatcccccctcctgagacccttaaccctgcatcctccacaacagaagacccccaratgcacagccacacttccatctcaccctaataaaacccagacctttgcattcttctcctcggaacccccaaatccacaattttggggtgcattctcactcccagatcccaaatccaaagcccaagtgctcccctatgcaaatattcccaactcctttgttctacagcttatctgttgcccgctcctaaatccacagccctggggcacccctcctgaggtaccacagatttagtcgggaggtaccctctctgttcagcttccctggggtccccctcctcctcctttgctggttgtgtccaaagctaggtggggttcacggagaggatgtagttgggaggtgaaatgaggtgattttataaccagccaaagtccacccctttttttcaggcagtataaaggcaaaccaccccagccgtcaccatctatcattccactgccaccatgctggcctcagggctgcttctggtggccttgctggccagcctgactgtgatggtcttgatgtcagtctggcagcagaggaagagcagggggaagctgcctttgggacccaccccattgctctttattggaaactacctgcagctgaacacagagcacatatgtgactccatcatgaagatcagtgagcgctatggccccgtgttcaccattcacctggggccccggcgggtcgtggtgctgtgcggacatgatgccgtcaaggaggctctggtggaccaggctgaggagttcagcgggcgaggcgagcaggccaccttcgactggctcttcaaaggctatggagtgacctgccgcacctgggagcgcaccaagccgctcaggcgcttctccatcgccaycctgcgggacttcggggtgggcaagcgcggcatcaaggaggtatccaggagaaggcgggcttcctcatcaaggccgtctagggcacgcctccagcatctatcccaccttcttcctaagccgtaccacctccaatgtcatcagctccattgtctttggsgaccgctttgactatgaggacaaaagttcctgtcactgctgtgcatgatgctggaaagcttccagttcacggcamcctccacggggcagctctatgagatgttctcttcggtgatgaaacacctgccaggaccacagcaacaggcctttaaggagctgcaagggctggaggacttcattgccaagaaagtggagcacaaccagtgcacgctggatcccaattccccacgggacttcattgactcgtttctcatccgcatgcaaggggaggagaagaaccccaacacagagttctacttgaagaacctggtgctgaccacgttgaacctcttcgttgggggcactgagaccgtcagcaccaccctgcactacggcttcctgctgctcatgaagcacccagaggtggaggcaaaggtccatgagattgacagagtgatcggcaagaaccagcagcccaagtttgaggaccgggccaagacgctctacacagaggcagtgatccatgagatccaaagatttggagacttgctccccatgggtgtgtcccgcagggtcaagaaggacaccaagtttcgggatttcttcctctccaagggcatagaagtgttccctatgctgggctccgtgctgagagacctcaggttcttctccaacccccgggacttcaatccccagcacttcctgggtgagaaggggcagtttaagaagcgtgatgcttttgtgcccttctccatcagaaggcggaactgtttcagagaaggcctggccagaatggagctctttctctacctcaccaccatcatgcagaacttccgcttcaaatcgcggcagtcgcctaaggacattgttgtgtcccccaaacacgtgggctttgtcacaatcccacgaaactacaccaagtgctacttgccttgctgy

SEQ ID NO: 1797 - DNA, 3828 bp, Homo sapiens
gctttgatgtggaaaatggcccttccccaggtcggagtccactggatccccaggccagctcttccgctgggctggtacttcacgccacctttcctgggcacagccagcgcagagagtcatttctctacagatcagacagcgactatgacttgtcaccaaaggcgatgtcgagaaactcttctcttccaagcgagcaacacggcgatgacttgattgtaactccttttgcccaggtccttgccagcttgcgaagtgtgagaaacaacttcactatactgacaaaccttcatggtacatctaacaagaggtccccagctgctagtcagcctcctgtctccagagtcaacccacaagaagaatcttatcaaaaattagcaatggaaacgctggaggaattagactggtgtttagaccagctagagaccatacagacctaccggtctgtcagtgagatggcttctaacaagttcaaaagaatgctgaaccgggagctgacacacctctcagagatgagccgatcagggaaccaggtgtctgaatacatttcaaatactttcttagacaagcagaatgatgtggagatcccatctcctacccagaaagacagggagaaaaagaaaaagcagcagctcatgacccagataagtggagtgaagaaattaatgcatagttcaagcctaaacaatacaagcatctcacgctttggagtcaacactgaaaatgaagatcacctggccaaggagctggaagacctgaacaaatggggtcttaacatctttaatgtggctggatattctcacaatagacccctaacatgcatcatgtatgctatattccaggaaagagacctcctaaagacattcagaatctcatctgacacatttataacctacatgatgactttagaagaccattaccattctgacgtggcatatcacaacagcctgcacgctgctgatgtagcccagtcgacccatgttctcctttctacaccagcattagacgctgtcttcacagatttggaratcctggctgccatttttgcagctgccatccatgacgttgatcatcctggagtctccaatcagtttctcatcaacacaaattcagaacttgctttgatgtataatgatgaatctgtgttggaaaatcatcaccttgctgtgggtttcaaactgctgcaagaagaacactgtgacatcttcatgaatctcaccaagaagcagcgtcagacactcaggaagatggttattgacatggtgttagcaactgatatgtctaaacatatgagcctgctggcagacctgaagacaatggtagaaacgaagaaagttacaagttcaggcgttcttctcctagacaactataccgatcgcattcaggtccttcgcaacatggtmcactgtgcagacctgagcaaccccaccaagtccttggaattgtatcggcaatggacagaccgcatcatggaggaatttttccagcagggagacaaagagcgggagaggggaatggaaattagcccaatgtgtgataaacacacagcttctgtggaaaaatcccaggttggtttcatcgactacattgtccatccattgtgggagacatgggcagatttggtacagcctgatgctcaggacattctcgataccttagaagataacaggaactggtatcagagcatgatacctcaaagtccctcaccaccactggacgagcagaacagggactgccagggtctgatggagaagtttcagttyraaytgactctcgatgaggaagattctgaaggacctgagaaggagggagagggacacagctatttcwgcagcacaaagacgctttgtgtgattgatccagaaaacagagattccctgggagagactgacatagacattgcaacagaagacaagtcccccgtggatacataatccccctctccctgtggagatgaacattctatccttgatragcatgccagctatgtggtagggccagcccaccatgggggccaagacctgcacaggacaagggccacctggcctttcagttacttgagtttggagtcagaaagcaagaccaggaagcaaatagcagctcaggaaatcccacggttgacttgccttgatggcaagcttggtggagagggctgaagctgttgctgggggccgattctgatcaagacacatggcttgaaaatggaagacacaaaactgagagatcattctgcactaagtttcgggaacttatccccgacagtgactgaactcactgactaataacttcatttatgaatcttctcmcttgtccctttgtctgccaacctgtgtgccttttttgtaaaacattttcatgtctttaaaatgcctgttgaatacctggagtttagtatcaactyctacacagataagctttcaaagttgacaaacttttttgactctttctggaaaagggaaagaaaatagtcttccttctttcttgggcaatatccttcactttactacagttacttttgcaaacagacagaaaggatacacttctaaccacattttacttccttcccctgttgtccagtccaactccacagtcactcttaaaacttctctctgtttgcctgcctccaacagtacttttaactttttgctgtaaacagaataaaattgaacaaattagggggtagaaaggagcagtggtgtcgttcaccgtgagagtctgcatagaactcagcagtgtgccctgctgtgtcttggaccctgccccccacaggagttgtacagtccctggccctgttccctacctcctctcttcaccccgttaggctgttttcaatgtaatgctgccgtccttctcttgcactgccttctgcgctaacacctccattcctgtttataaccgtgtatttattacttartgtatataatgtaatgttttgtaagttattaatttatatatctaacattgcctgccaatggtggtgttaaatttgtgtagaaaactctgcctaagagttacgactttttcttgtaatgttttgtattgtgtattatataacccaaacgtcacttagtagagacatatggcccccttggcagagaggacaggggtgggcttttgttcaaagggtctgccctttccctgcctgagttgctacttctgcacaacccctttatgaaccagttttggaaacaatattctcacattagatactaaatggtttatactgagcttttacttttgtatagcttgataggggcagggggcaatgggatgtagtttttacccaggttctatccaaatctatgtgggcatgagttgggttataactggatcctactatcattgtggctttggttcaaaaggaaacactacatttgctcacagatgattcttctgaatgctcccgaactactgactttgaagaggtagcctcctgcctgccattaagcaggaatgtcatgttccagttcattacaaaagaaaacaataaaacaatgtgaatttttataataaaatgtgaactgatgtagcaaattacgcaaatgtgaagcctcttctgataacacttgttaggcctcttactgatgtcagtttcagtttgtaaaatatgtttcatgctttcagttcagcattgtgactcagtaattacagaaaatggcacaaatgtgcatgaccaatgtatgtctatgaacactgcattgtttcaggtggacattttatcattttcaaatgtttctcacaatgtatgttatagtattattattatatattgtgttcaaatgcattctaaagagacttttatatgaggtgaataaagaaaagcatgattag

SEQ ID NO: 1798 - DNA, 3978 bp, Homo sapiens
aaccagttttcacccgaattttgactgtttcatttagaagaaaagcaaaatgagaaaaagctttcctcatttctccttgagatggcaaagcactcagaaatgacatcacataccctaaagaaccctgggatgactaaggcagagagagtctgagaaaactctttggtgcttctgcctttagttttaggacacatttatgcagatgagcttataagagaccgttccctccgccttcttcctcagaggaagtttcttggtagatcaccgacacctcatccaggcggggggttggggggaaacttggcaccagccatcccaggcagagcaccactgtgatttgttctcctggtggagagagctggaaggaaggagccagcgtgcaaataatgaaggagcacgggggcaccttcagtagcaccggaatcagcggtggtagcggtgactctgctatggacagcctgcagccgctccagcctaactacatgcctgtgtgtttgtttgcagaagaatcttatcaaaaattagcaatggaaacgctggaggaattagactggtgtttagaccagctagagaccatacagacctaccggtctgtcagtgagatggcttctaacaagttcaaaagaatgctgaaccgggagctgacacacctctcagagatgagccgatcagggaaccaggtgtctgaatacatttcaaatactttcttagacaagcagaatgatgtggagatcccatctcctacccagaaagacagggagaaaaagaaaaagcagcagctcatgacccagataagtggagtgaagaaattaatgcatagttcaagcctaaacaatacaagcatctcacgctttggagtcaacactgaaaatgaagatcacctggccaaggagctggaagacctgaacaaatggggtcttaacatctttaatgtggctggatattctcacaatagacccctaacatgcatcatgtatgctatattccaggaaagagacctcctaaagacattcagaatctcatctgacacatttataacctacatgatgactttagaagaccattaccattctgacgtggcatatcacaacagcctgcacgctgctgatgtagcccagtcgacccatgttctcctttctacaccagcattagacgctgtcttcacagatttggaratcctggctgccatttttgcagctgccatccatgacgttgatcatcctggagtctccaatcagtttctcatcaacacaaattcagaacttgctttgatgtataatgatgaatctgtgttggaaaatcatcaccttgctgtgggtttcaaactgctgcaagaagaacactgtgacatcttcatgaatctcaccaagaagcagcgtcagacactcaggaagatggttattgacatggtgttagcaactgatatgtctaaacatatgagcctgctggcagacctgaagacaatggtagaaacgaagaaagttacaagttcaggcgttcttctcctagacaactataccgatcgcattcaggtccttcgcaacatggtmcactgtgcagacctgagcaaccccaccaagtccttggaattgtatcggcaatggacagaccgcatcatggaggaatttttccagcagggagacaaagagcgggagaggggaatggaaattagcccaatgtgtgataaacacacagcttctgtggaaaaatcccaggttggtttcatcgactacattgtccatccattgtgggagacatgggcagatttggtacagcctgatgctcaggacattctcgataccttagaagataacaggaactggtatcagagcatgatacctcaaagtccctcaccaccactggacgagcagaacagggactgccagggtctgatggagaagtttcagttyraaytgactctcgatgaggaagattctgaaggacctgagaaggagggagagggacacagctatttcwgcagcacaaagacgctttgtgtgattgatccagaaaacagagattccctgggagagactgacatagacattgcaacagaagacaagtcccccgtggatacataatccccctctccctgtggagatgaacattctatccttgatragcatgccagctatgtggtagggccagcccaccatgggggccaagacctgcacaggacaagggccacctggcctttcagttacttgagtttggagtcagaaagcaagaccaggaagcaaatagcagctcaggaaatcccacggttgacttgccttgatggcaagcttggtggagagggctgaagctgttgctgggggccgattctgatcaagacacatggcttgaaaatggaagacacaaaactgagagatcattctgcactaagtttcgggaacttatccccgacagtgactgaactcactgactaataacttcatttatgaatcttctcmcttgtccctttgtctgccaacctgtgtgccttttttgtaaaacattttcatgtctttaaaatgcctgttgaatacctggagtttagtatcaactyctacacagataagctttcaaagttgacaaacttttttgactctttctggaaaagggaaagaaaatagtcttccttctttcttgggcaatatccttcactttactacagttacttttgcaaacagacagaaaggatacacttctaaccacattttacttccttcccctgttgtccagtccaactccacagtcactcttaaaacttctctctgtttgcctgcctccaacagtacttttaactttttgctgtaaacagaataaaattgaacaaattagggggtagaaaggagcagtggtgtcgttcaccgtgagagtctgcatagaactcagcagtgtgccctgctgtgtcttggaccctgccccccacaggagttgtacagtccctggccctgttccctacctcctctcttcaccccgttaggctgttttcaatgtaatgctgccgtccttctcttgcactgccttctgcgctaacacctccattcctgtttataaccgtgtatttattacttartgtatataatgtaatgttttgtaagttattaatttatatatctaacattgcctgccaatggtggtgttaaatttgtgtagaaaactctgcctaagagttacgactttttcttgtaatgttttgtattgtgtattatataacccaaacgtcacttagtagagacatatggcccccttggcagagaggacaggggtgggcttttgttcaaagggtctgccctttccctgcctgagttgctacttctgcacaacccctttatgaaccagttttggaaacaatattctcacattagatactaaatggtttatactgagcttttacttttgtatagcttgataggggcagggggcaatgggatgtagtttttacccaggttctatccaaatctatgtgggcatgagttgggttataactggatcctactatcattgtggctttggttcaaaaggaaacactacatttgctcacagatgattcttctgaatgctcccgaactactgactttgaagaggtagcctcctgcctgccattaagcaggaatgtcatgttccagttcattacaaaagaaaacaataaaacaatgtgaatttttataataaaatgtgaactgatgtagcaaattacgcaaatgtgaagcctcttctgataacacttgttaggcctcttactgatgtcagtttcagtttgtaaaatatgtttcatgctttcagttcagcattgtgactcagtaattacagaaaatggcacaaatgtgcatgaccaatgtatgtctatgaacactgcattgtttcaggtggacattttatcattttcaaatgtttctcacaatgtatgttatagtattattattatatattgtgttcaaatgcattctaaagagacttttatatgaggtgaataaagaaaagcatgattag

SEQ ID NO: 1799 - DNA, 3124 bp, Homo sapiens
agcggacctgagacgcaaggagaagccctgcctctggagtccagctcctttcctcttctggttttcctcggaaggggccaggagacactggaaggtccggacggcagggaaggggacggggttctttccagtcccacccgtgtagggacacctctccccctcatcccccgatgtaccctcgctgaatctgggatgggagagacgaaccgagtctaggcatctgcgtagcagcgccggggagagcggggagcccagggcggagcccagtcgactcccggattcccctgccccgcccccggcacgaggccccgccccggcggccccgcccctcctcgggactcgaccgggctgcgctcactgcccagccggggccccgggagcctccaggctcccgcccgccctgagctgcggcctccgcatggaggggccactcactccaccaccgctgcagggaggcggagccgccgctgttccggagcccggagcccggcaacacccgggacacgagacggcggcgcagcggtacagcgcccgactgctgcaggccggctacgagcccgagagcgacttcctgattctcccaggattcatagacttcatagctgatgaggtggacctgacctcagccctgacccggaagatcacgctgaagacgccactsatctcctcccccatggacactgtgacagaggctgacatggccattgccatggctctgatgggaggtattggtttcattcaccacaactgcaccccagagttccaggccaaygaggtgcggaaggtcaaggcaatttgaacagggcttcatcacggaccctgtggtgctgagcccctcgcacactgtgggcgatgtgctggaggccaagatgcggcatggcttctctggcatccccatcactgagacgggcaccatgggcagcaagctggtgggcatcgtcacctcccgagacatcgactttcttgctgagaaggaccacaccaccctcctcagtgaggtgatgacgccaaggattgaactggtggtggctccagcaggtgtgacgttgaaagaggcaaatgagatcctgcagcgtagcaagaaagggaagctgcctatcgtcaatgattgcgatgagctggtggccatcatcgcccgcaccgacctgaagaagaaycgagactaccctctggcctccaaggattcccagaagcagctsctctgtggggcagctgtgggcacccgtgaggatgacaaataccgtctggacctgctcacccaggcgggcgtcgacgtcatagtcttggactcgtcccaagggaattcggtgtatcagatcgccatggtgcattacatcaaacagaagtacccccacctccaggtgattggggggaacgtggtgacagcagcccaggccaagaacctgattgatgctggtgtggacgggctgcgcgtgggcatgggctgcggctccatctgcatcacccaggaagtgatggcctgtggtcggccccagggcactgctgtgtacaaggtggctgagtatgcccggcgctttggtgtgcccatcatagccgatggcggcatccagaccgtgggacacgtggtcaaggccctggcccttggagcctccacagtgatgatgggctccctgctggccgccactacggaggcccctggcgagtacttcttctcagacggggtgcggctcaagaagtaccggggcatgggctcactggatgccatggagaagagcagcagcagccagaaacgatacttcagcgagggggataaagtgaagatcgcrcagggtgtctcgggctccatccaggacaaaggatccattcagaagttcgtgccctacctcatagcaggcatccaacacggctgccaggatatcggggcccgcagcctgtctgtccttcggtccatgatgtactcaggagagctcaagtttgagaagcggaccatgtcggcccagattgagggtggtgtccatggcctgcactcttacgaaaagcggctgtactgaggacagcggtggaggccgaggtggtggaggggatgcaccccagtgtccacttttgggcacagcctccctccataactgagtggtccacagatttgcactacgggttctccagctcctttccaggcagagaggaggggaggtcctgaggggactgctgcccctcactcggcatcccctgcagagtcaggactgctcycggggccaggctgccctgggagcccccctccragmccagccagccaggctctcaggmcctgcgcctgcctcaggtctttcttgctgcagcctgctccagcctggcccccaccccaggggcaggcggcccctcctggcttctcctgtagggcacctccctgcccctagcctcccaggaaatggtgctctcctggccctgcctctggcccttcccgggccgctgcccctcagccatgtggcacttctgagctcctgacctaggccaaggggaggtctctgcccccttccccggccctgggctacccttgggtcctgctcctcaggccgctcccctgtccctggccatgggtaggagactgccctggtcatggccgcctgcctgtcattcctgactcaccaccrtccccaggtgaaccattcctcccttctcctcagctgyagtcgaaggctttaactttgcacacttgggatcacagttgcgtcattgtgtattaaatacttggaataaatcaagcaggtctcaacgcctccactatcctgtctgtatgccctgtccattgggtggctggagccccatcagagttgggctggggggtatggcaccaggccctgcctccccaggaaggtttgagggtgttgaggtactgggggtggggtgggggtgtgctggtgcaggtgggccccatgtcaggaggtctcccaggcttcacctactgcaagccactcagcaactcctgcagccaggcagcattgttgaggggtcatcatggctgtagaattccagcatcggggcctcacacccagctgccggaaaacgccctccgcagcctcatcatgccacatggtgcagccagggcacaggtggaagtacagcatggccagcgcctgtggtctcatctgccgaaacacacctgtag

SEQ ID NO: 1800 - DNA, 2926 bp, Homo sapiens
agcggacctgagacgcaaggagaagccctgcctctggagtccagctcctttcctcttctggttttcctcggaaggggccaggagacactggaaggtccggacggcagggaaggggacggggttctttccagtcccacccgtgtagggacacctctccccctcatcccccgatgtaccctcgctgaatctgggatgggagagacgaaccgagtctaggcatctgcgtagcagcgccggggagagcggggagcccagggcggagcccagtcgactcccggattcccctgccccgcccccggcacgaggccccgccccggcggccccgcccctcctcgggactcgaccgggctgcgctcactgcccagccggggccccgggagcctccaggctcccgcccgccctgagctgcggcctccgcatggaggggccactcactccaccaccgctgcagggaggcggagccgccgctgttccggagcccggagcccggcaacacccgggacacgagacggcggcgcagcggtacagcgcccgactgctgcaggccggctacgagcccgagagcatggcggactacctgatcagcggcggcaccggctacgtgcccgaggatgggctcaccgcgcagcagctcttcgccagcgccgacggcctcacctacaacgacttcctgattctcccaggattcatagacttcatagctgatgaggtggacctgacctcagccctgacccggaagatcacgctgaagacgccactsatctcctcccccatggacactgtgacagaggctgacatggccattgccatggctctgatgggaggtattggtttcattcaccacaactgcaccccagagttccaggccaaygaggtgcggaagaagtttgaacagggcttcatcacggaccctgtggtgctgagcccctcgcacactgtgggcgatgtgctggaggccaagatgcggcatggcttctctggcatccccatcactgagacgggcaccatgggcagcaagctggtgggcatcgtcacctcccgagacatcgactttcttgctgagaaggaccacaccaccctcctcagtgaggtgatgacgccaaggattgaactggtggtggctccagcaggtgtgacgttgaaagaggcaaatgagatcctgcagcgtagcaagaaagggaagctgcctatcgtcaatgattgcgatgagctggtggccatcatcgcccgcaccgacctgaagaagaaycgagactaccctctggcctccaaggattcccagaagcagctsctctgtggggcagctgtgggcacccgtgaggatgacaaataccgtctggacctgctcacccaggcgggcgtcgacgtcatagtcttggactcgtcccaagggaattcggtgtatcagatcgccatggtgcattacatcaaacagaagtacccccacctccaggtgattggggggaacgtggtgacagcagcccaggccaagaacctgattgatgctggtgtggacgggctgcgcgtgggcatgggctgcggctccatctgcatcacccaggaagtgatggcctgtggtcggccccagggcactgctgtgtacaaggtggctgagtatgcccggcgctttggtgtgcccatcatagccgatggcggcatccagaccgtgggacacgtggtcaaggccctggcccttggagcctccacagtgatgatgggctccctgctggccgccactacggaggcccctggcgagtacttcttctcagacggggtgcggctcaagaagtaccggggcatgggctcactggatgccatggagaagagcagcagcagccagaaacgatacttcagcgagggggataaagtgaagatcgcrcagggtgtctcgggctccatccaggacaaaggatccattcagaagttcgtgccctacctcatagcaggcatccaacacggctgccaggatatcggggcccgcagcctgtctgtccttcggtccatgatgtactcaggagagctcaagtttgagaagcggaccatgtcggcccagattgagggtggtgtccatggcctgcactcttacgaaaagcggctgtactgaggacagcggtggaggccgaggtggtggaggggatgcaccccagtgtccacttttgggcacaccattcctcccttctcctcagctgyagtcgaaggctttaactttgcacacttgggatcacagttgcgtcattgtgtattaaatacttggaataaatcaagcaggtctcaacgcctccactatcctgtctgtatgccctgtccattgggtggctggagccccatcagagttgggctggggggtatggcaccaggccctgcctccccaggaaggtttgagggtgttgaggtactgggggtggggtgggggtgtgctggtgcaggtgggccccatgtcaggaggtctcccaggcttcacctactgcaagccactcagcaactcctgcagccaggcagcattgttgaggggtcatcatggctgtagaattccagcatcggggcctcacacccagctgccggaaaacgccctccgcagcctcatcatgccacatggtgcagccagggcacaggtggaagtacagcatggccagcgcctgtggtctcatctgccgaaacacacctgtagtcgccagcaggtagggcctgggcctgcctggatgtccttgggtccattccattctttctcccagcagctgtgaagtgtccaagccctgtgagggcgctgatggagaggcttgcgaggaagccaggagctgcaggagtggctggagagaggcgagaatgaatccagccccttccagctgagctctttccttgcttggcctggtggggggagactcctctgctcagggtctcccctgacctcgtggtgggggcttctcct

SEQ ID NO: 1801 - DNA, 3418 bp, Homo sapiens
agcggacctgagacgcaaggagaagccctgcctctggagtccagctcctttcctcttctggttttcctcggaaggggccaggagacactggaaggtccggacggcagggaaggggacggggttctttccagtcccacccgtgtagggacacctctccccctcatcccccgatgtaccctcgctgaatctgggatgggagagacgaaccgagtctaggcatctgcgtagcagcgccggggagagcggggagcccagggcggagcccagtcgactcccggattcccctgccccgcccccggcacgaggccccgccccggcggccccgcccctcctcgggactcgaccgggctgcgctcactgcccagccggggccccgggagcctccaggctcccgcccgccctgagctgcggcctccgcatggaggggccactcactccaccaccgctgcagggaggcggagccgccgctgttccggagcccggagcccggcaacacccgggacacgagacggcggcgcagcggtacagcgcccgactgctgcaggccggctacgagcccgagagccctagattggacctcgctacacacccgacgacaccccgttcaggtggctccaactcctggggttcaaacagtgcttgctggagtcctgtccgactgacttggcttacccctccttagctgtttcctcctagaactatcttcagtggtcttactggcaggtgttggtgtccagatggatcgccttcgcagggctagcatggcggactacctgatcagcggcggcaccggctacgtgcccgaggatgggctcaccgcgcagcagctcttcgccagcgccgacggcctcacctacaacgacttcctgattctcccaggattcatagacttcatagctgatgaggtggacctgacctcagccctgacccggaagatcacgctgaagacgccactsatctcctcccccatggacactgtgacagaggctgacatggccattgccatggctctgatgggaggtattggtttcattcaccacaactgcaccccagagttccaggccaaygaggtgcggaaggtcaagaagtttgaacagggcttcatcacggaccctgtggtgctgagcccctcgcacactgtgggcgatgtgctggaggccaagatgcggcatggcttctctggcatccccatcactgagacgggcaccatgggcagcaagctggtgggcatcgtcacctcccgagacatcgactttcttgctgagaaggaccacaccaccctcctcagtgaggtgatgacgccaaggattgaactggtggtggctccagcaggtgtgacgttgaaagaggcaaatgagatcctgcagcgtagcaagaaagggaagctgcctatcgtcaatgattgcgatgagctggtggccatcatcgcccgcaccgacctgaagaagaaycgagactaccctctggcctccaaggattcccagaagcagctsctctgtggggcagctgtgggcacccgtgaggatgacaaataccgtctggacctgctcacccaggcgggcgtcgacgtcatagtcttggactcgtcccaagggaattcggtgtatcagatcgccatggtgcattacatcaaacagaagtacccccacctccaggtgattggggggaacgtggtgacagcagcccaggccaagaacctgattgatgctggtgtggacgggctgcgcgtgggcatgggctgcggctccatctgcatcacccaggaagtgatggcctgtggtcggccccagggcactgctgtgtacaaggtggctgagtatgcccggcgctttggtgtgcccatcatagccgatggcggcatccagaccgtgggacacgtggtcaaggccctggcccttggagcctccacagtgatgatgggctccctgctggccgccactacggaggcccctggcgagtacttcttctcagacggggtgcggctcaagaagtaccggggcatgggctcactggatgccatggagaagagcagcagcagccagaaacgatacttcagcgagggggataaagtgaagatcgcrcagggtgtctcgggctccatccaggacaaaggatccattcagaagttcgtgccctacctcatagcaggcatccaacacggctgccaggatatcggggcccgcagcctgtctgtccttcggtccatgatgtactcaggagagctcaagtttgagaagcggaccatgtcggcccagattgagggtggtgtccatggcctgcactcttacgaaaagcggctgtactgaggacagcggtggaggccgaggtggtggaggggatgcaccccagtgtccacttttgggcacagcctccctccataactgagtggtccacagatttgcactacgggttctccagctcctttccaggcagagaggaggggaggtcctgaggggactgctgcccctcactcggcatcccctgcagagtcaggactgctcycggggccaggctgccctgggagcccccctccragmccagccagccaggctctcaggmcctgcgcctgcctcaggtctttcttgctgcagcctgctccagcctggcccccaccccaggggcaggcggcccctcctggcttctcctgtagggcacctccctgcccctagcctcccaggaaatggtgctctcctggccctgcctctggcccttcccgggccgctgcccctcagccatgtggcacttctgagctcctgacctaggccaaggggaggtctctgcccccttccccggccctgggctacccttgggtcctgctcctcaggccgctcccctgtccctggccatgggtaggagactgccctggtcatggccgcctgcctgtcattcctgactcaccaccrtccccaggtgaaccattcctcccttctcctcagctgyagtcgaaggctttaactttgcacacttgggatcacagttgcgtcattgtgtattaaatacttggaataaatcaagcaggtctcaacgcctccactatcctgtctgtatgccctgtccattgggtggctggagccccatcagagttgggctggggggtatggcaccaggccctgcctccccaggaaggtttgagggtgttgaggtactgggggtggggtgggggtgtgctggtgcaggtgggccccatgtcaggaggtctcccaggcttcacctactgcaagccactcagcaactcctgcagccaggcagcattgttgaggggtcatcatggctgtagaattccagcatcggggcctcacacccagctgccggaaaacgccctccgcagcctcatcatgccacatggtgcagccagggcacaggtggaagtacagcatggccagcgcctgtggtctcatctgccgaaacacacctgtag

SEQ ID NO: 1802 - DNA, 3331 bp, Homo sapiens
agcggacctgagacgcaaggagaagccctgcctctggagtccagctcctttcctcttctggttttcctcggaaggggccaggagacactggaaggtccggacggcagggaaggggacggggttctttccagtcccacccgtgtagggacacctctccccctcatcccccgatgtaccctcgctgaatctgggatgggagagacgaaccgagtctaggcatctgcgtagcagcgccggggagagcggggagcccagggcggagcccagtcgactcccggattcccctgccccgcccccggcacgaggccccgccccggcggccccgcccctcctcgggactcgaccgggctgcgctcactgcccagccggggccccgggagcctccaggctcccgcccgccctgagctgcggcctccgcatggaggggccactcactccaccaccgctgcagggaggcggagccgccgctgttccggagcccggagcccggcaacacccgggacacgagacggcggcgcagcggtacagcgcccgactgctgcaggccggctacgagcccgagagccctagattggacctcgctacacacccgacgacaccccgttcagaactatcttcagtggtcttactggcaggtgttggtgtccagatggatcgccttcgcagggctagcatggcggactacctgatcagcggcggcaccggctacgtgcccgaggatgggctcaccgcgcagcagctcttcgccagcgccgacggcctcacctacaacgacttcctgattctcccaggattcatagacttcatagctgatgaggtggacctgacctcagccctgacccggaagatcacgctgaagacgccactsatctcctcccccatggacactgtgacagaggctgacatggccattgccatggctctgatgggaggtattggtttcattcaccacaactgcaccccagagttccaggccaaygaggtgcggaaggtcaaggcaatttgaacagggcttcatcacggaccctgtggtgctgagcccctcgcacactgtgggcgatgtgctggaggccaagatgcggcatggcttctctggcatccccatcactgagacgggcaccatgggcagcaagctggtgggcatcgtcacctcccgagacatcgactttcttgctgagaaggaccacaccaccctcctcagtgaggtgatgacgccaaggattgaactggtggtggctccagcaggtgtgacgttgaaagaggcaaatgagatcctgcagcgtagcaagaaagggaagctgcctatcgtcaatgattgcgatgagctggtggccatcatcgcccgcaccgacctgaagaagaaycgagactaccctctggcctccaaggattcccagaagcagctsctctgtggggcagctgtgggcacccgtgaggatgacaaataccgtctggacctgctcacccaggcgggcgtcgacgtcatagtcttggactcgtcccaagggaattcggtgtatcagatcgccatggtgcattacatcaaacagaagtacccccacctccaggtgattggggggaacgtggtgacagcagcccaggccaagaacctgattgatgctggtgtggacgggctgcgcgtgggcatgggctgcggctccatctgcatcacccaggaagtgatggcctgtggtcggccccagggcactgctgtgtacaaggtggctgagtatgcccggcgctttggtgtgcccatcatagccgatggcggcatccagaccgtgggacacgtggtcaaggccctggcccttggagcctccacagtgatgatgggctccctgctggccgccactacggaggcccctggcgagtacttcttctcagacggggtgcggctcaagaagtaccggggcatgggctcactggatgccatggagaagagcagcagcagccagaaacgatacttcagcgagggggataaagtgaagatcgcrcagggtgtctcgggctccatccaggacaaaggatccattcagaagttcgtgccctacctcatagcaggcatccaacacggctgccaggatatcggggcccgcagcctgtctgtccttcggtccatgatgtactcaggagagctcaagtttgagaagcggaccatgtcggcccagattgagggtggtgtccatggcctgcactcttacgaaaagcggctgtactgaggacagcggtggaggccgaggtggtggaggggatgcaccccagtgtccacttttgggcacagcctccctccataactgagtggtccacagatttgcactacgggttctccagctcctttccaggcagagaggaggggaggtcctgaggggactgctgcccctcactcggcatcccctgcagagtcaggactgctcycggggccaggctgccctgggagcccccctccragmccagccagccaggctctcaggmcctgcgcctgcctcaggtctttcttgctgcagcctgctccagcctggcccccaccccaggggcaggcggcccctcctggcttctcctgtagggcacctccctgcccctagcctcccaggaaatggtgctctcctggccctgcctctggcccttcccgggccgctgcccctcagccatgtggcacttctgagctcctgacctaggccaaggggaggtctctgcccccttccccggccctgggctacccttgggtcctgctcctcaggccgctcccctgtccctggccatgggtaggagactgccctggtcatggccgcctgcctgtcattcctgactcaccaccrtccccaggtgaaccattcctcccttctcctcagctgyagtcgaaggctttaactttgcacacttgggatcacagttgcgtcattgtgtattaaatacttggaataaatcaagcaggtctcaacgcctccactatcctgtctgtatgccctgtccattgggtggctggagccccatcagagttgggctggggggtatggcaccaggccctgcctccccaggaaggtttgagggtgttgaggtactgggggtggggtgggggtgtgctggtgcaggtgggccccatgtcaggaggtctcccaggcttcacctactgcaagccactcagcaactcctgcagccaggcagcattgttgaggggtcatcatggctgtagaattccagcatcggggcctcacacccagctgccggaaaacgccctccgcagcctcatcatgccacatggtgcagccagggcacaggtggaagtacagcatggccagcgcctgtggtctcatctgccgaaacacacctgtag

SEQ ID NO: 1803 - DNA, 3053 bp, Homo sapiens
agcggacctgagacgcaaggagaagccctgcctctggagtccagctcctttcctcttctggttttcctcggaaggggccaggagacactggaaggtccggacggcagggaaggggacggggttctttccagtcccacccgtgtagggacacctctccccctcatcccccgatgtaccctcgctgaatctgggatgggagagacgaaccgagtctaggcatctgcgtagcagcgccggggagagcggggagcccagggcggagcccagtcgactcccggattcccctgccccgcccccggcacgaggccccgccccggcggccccgcccctcctcgggactcgaccgggctgcgctcactgcccagccggggccccgggagcctccaggctcccgcccgccctgagctgcggcctccgcatggaggggccactcactccaccaccgctgcagggaggcggagccgccgctgttccggagcccggagcccggcaacacccgggacacgagacggcggcgcagcggtacagcgcccgactgctgcaggccggctacgagcccgagagccctagattggacctcgctacacacccgacgacaccccgttcaggtggctccaactcctggggttcaaacagtgcttgctggagtcctgtccgactgacttggcttacccctccttagctgtttcctcctagaactatcttcagtggtcttactggcaggtgttggtgtccagatggatcgccttcgcagggctagcatggcggactacctgatcagcggcggcaccggctacgtgcccgaggatgggctcaccgcgcagcagctcttcgccagcgccgacggcctcacctacaacgacttcctgattctcccaggattcatagacttcatagctgatgaggtggacctgacctcagccctgacccggaagatcacgctgaagacgccactsatctcctcccccatggacactgtgacagaggctgacatggccattgccatggctaagtttgaacagggcttcatcacggaccctgtggtgctgagcccctcgcacactgtgggcgatgtgctggaggccaagatgcggcatggcttctctggcatccccatcactgagacgggcaccatgggcagcaagctggtgggcatcgtcacctcccgagacatcgactttcttgctgagaaggaccacaccaccctcctcagtgaggtgatgacgccaaggattgaactggtggtggctccagcaggtgtgacgttgaaagaggcaaatgagatcctgcagcgtagcaagaaagggaagctgcctatcgtcaatgattgcgatgagctggtggccatcatcgcccgcaccgacctgaagaagaaycgagactaccctctggcctccaaggattcccagaagcagctsctctgtggggcagctgtgggcacccgtgaggatgacaaataccgtctggacctgctcacccaggcgggcgtcgacgtcatagtcttggactcgtcccaagggaattcggtgtatcagatcgccatggtgcattacatcaaacagaagtacccccacctccaggtgattggggggaacgtggtgacagcagcccaggccaagaacctgattgatgctggtgtggacgggctgcgcgtgggcatgggctgcggctccatctgcatcacccaggaagtgatggcctgtggtcggccccagggcactgctgtgtacaaggtggctgagtatgcccggcgctttggtgtgcccatcatagccgatggcggcatccagaccgtgggacacgtggtcaaggccctggcccttggagcctccacagtgatgatgggctccctgctggccgccactacggaggcccctggcgagtacttcttctcagacggggtgcggctcaagaagtaccggggcatgggctcactggatgccatggagaagagcagcagcagccagaaacgatacttcagcgagggggataaagtgaagatcgcrcagggtgtctcgggctccatccaggacaaaggatccattcagaagttcgtgccctacctcatagcaggcatccaacacggctgccaggatatcggggcccgcagcctgtctgtccttcggtccatgatgtactcaggagagctcaagtttgagaagcggaccatgtcggcccagattgagggtggtgtccatggcctgcactcttacgaaaagcggctgtactgaggacagcggtggaggccgaggtggtggaggggatgcaccccagtgtccacttttgggcacaccattcctcccttctcctcagctgyagtcgaaggctttaactttgcacacttgggatcacagttgcgtcattgtgtattaaatacttggaataaatcaagcaggtctcaacgcctccactatcctgtctgtatgccctgtccattgggtggctggagccccatcagagttgggctggggggtatggcaccaggccctgcctccccaggaaggtttgagggtgttgaggtactgggggtggggtgggggtgtgctggtgcaggtgggccccatgtcaggaggtctcccaggcttcacctactgcaagccactcagcaactcctgcagccaggcagcattgttgaggggtcatcatggctgtagaattccagcatcggggcctcacacccagctgccggaaaacgccctccgcagcctcatcatgccacatggtgcagccagggcacaggtggaagtacagcatggccagcgcctgtggtctcatctgccgaaacacacctgtagtcgccagcaggtagggcctgggcctgcctggatgtccttgggtccattccattctttctcccagcagctgtgaagtgtccaagccctgtgagggcgctgatggagaggcttgcgaggaagccaggagctgcaggagtggctggagagaggcgagaatgaatccagccccttccagctgagctctttccttgcttggcctggtggggggagactcctctgctcagggtctcccctgacctcgtggtgggggcttctcct

SEQ ID NO: 1804 - DNA, 2269 bp, Homo sapiens
gaggcggggaggtggccactggctccgccccgctcccctctgacccggtgtctagtctctccgtcttcctgttccaaaccacgtggacgcgtctgggctgctggaggcagcccgagccgccgccgtcggtgtcgccgccaccaccaccatcggagtcacgagtcccgcgtctgtccgaagtcgccgctctcgggctgctcacgtctcttcggagagcgcgcacatggcgactcaggcgcactccctcagctacgcagggtgcaacttcttgcgccaacgtctggtcctgtctaccctgagcgggcgccccgtcaaaatccgaaagattcgggccagagacgacaacccgggcctccgagattttgaagccagcttcataaggctattggacaaaataacgaatggttctcgaattgaaataaaccaaacaggaacaaccttatattatcagcctggcctcctgtatggtggatctgtggaacatgactgtagcgtccttcgtggcattgggtattacctggagagtcttctttgsttggctccatttatgaagcacccgttaaaaatagttctacgaggagtgaccaatgatcaggttgacccttcarttgatgttcttaaggcaacagcactccctttgttgaaacaatttgggattgatggtgaatcatttgaactgaagattgtgcgacggggaatgcctcccggaggaggaggcgaagtggttttctcatgtcctgtgaggaaggtcttgaagcccattcaactcacagatccaggaaaaatcaaacgtattagaggaatggcgtactctgtacgtgtgtcacctcagatggcgaaccggattgtggattctgcaaggagcatcctcaacaagttcatacctgatatctatatttacacagatcacatgaaaggagtcaactctgggaagtctccgggctttgggttgtcactggttgctgagaccaccagtggcaccttcctcagtgctgaactggcctccaacccccagggccagggagcagcagtacttccagaggaccttggcaggaactgtgcccggctgctgctggaggaaatctacaggggtggatgcgtagactcgaccaaccaaagcctggcgctactactcatgacccttggacagcaggatgtytccaaagtcctgctaggccctctctctccctacacgatagaatttttgcggcatttgaagagctttttccagattatgtttaaaattgaaaccaagccatgtggtgaagaactcaagggtggggataaagtgctgatgacctgtgttggcattggtttctccaaccttagcaagaccctcaagtgataaccatcacaagataaggccccartgcctacagacaaagcagaagctgccacggacaccaatgggaccaagtccaaatggattaatccaggacagaatagccacttgcttaattttctgtgaagaaatatcaatatacaaataaaagacatccctgtagcatatggtttccagctgtttctccagtggcattgccattgcccaggaggggcccagtcaccatgagagctcccttgccttacctggaggaagaatgtgccttcaggccacagtcgtgctgctagaacagtctcrtagctgcagttcagctgtgcttcctcagcctactatcataggcttcctcagccctctgtcatatggctgttttscaaacctgtggagtctgttactgttctttctgcaaggactcacctccttgagccttggtttttgttgtagggattaaatgagataatatgagtggcagctcttcatgagtcctgcagtgctaagcaaatgtcagaaattggtgtattagactatttatctttgatcttctgaatggattgctgtcatggacacggacacggatcttcatctggttcattgtatttatatgtgagggatggatggctgcggggctccaagagcagcctcctgaagtgagggtggcaagtatgtgacagggcacccacaaaggcagacgaggactctgagaaccaacaggacttctctggtcttattctgaggctaagacaaaaaccgcacctgagccagatctctcagcctggcagctccaggacccgtgggccctgccactggcccatctcaacggctaggacctagagcatcatcaagctgcaggttaaacaggttggttggttctgatttgactgcacctctacaaggacctatggctgcacttgttgatactttcccgaggag

SEQ ID NO: 1805 - DNA, 2141 bp, Homo sapiens
gaggcggggaggtggccactggctccgccccgctcccctctgacccggtgtctagtctctccgtcttcctgttccaaaccacgtggacgcgtctgggctgctggaggcagcccgagccgccgccgtcggtgtcgccgccaccaccaccatcggagtcacgagtcccgcgtctgtccgaagtcgccgctctcgggctgctcacgtctcttcggagagcgcgcacatggcgactcaggcgcactccctcagctacgcagggtgcaacttcttgcgccaacgtctggtcctgtctaccctgagcgggcgccccgtcaaaatccgaaagattcgggccagagacgacaacccgggcctccgagattttgaagccagcttcataaggctattggacaaaataacgaatggttctcgaattgaaataaaccaaacaggaacaaccttatattatcagcctggcctcctgtatggtggatctgtggaacatgactgtagcgtccttcgtggcattgggtattacctggagagtcttctttgsttggctccatttatgaagcacccgttaaaaatagttctacgaggagtgaccaatgatcaggttgacccttcarttgatgttcttaaggcaacagcactccctttgttgaaacaatttgggattgatggtgaatcatttgaactgaagattgtgcgacggggaatgcctcccggaggaggaggcgaagtggttttctcatgtcctgtgaggaaggtcttgaagcccattcaactcacagatccaggaaaaatcaaacgtattagaggaatggcgtactctgtacgtgtgtcacctcagatggcgaaccggattgtggattctgcaaggagcatcctcaacaagttcatacctgatatctatatttacacagatcacatgaaaggagtcaactctgggaagtctccgggctttgggttgtcactggttgctgagaccaccagtggcaccttcctcagtgctgaactggcctccaacccccagggccagggagcagcagtacttccagaggaccttggcaggaactgtgcccggctgctgctggaggaaatctacaggggtggatgcgtagactcgaccaaccaaagcctggcgctactactcatgacccttggacagcaggatgtytccaaagtcctgctaggccctctctctccctacacgatagaatttttgcggcatttgaagagctttttccagattatgtttaaaattgaaaccaagccatgtggtgaagaactcaagggtggggataaagtgctgatgacctgtgttggcattggtttctccaaccttagcaagaccctcaagtgataaccatcacaagataaggccccartgcctacagacaaagcagaagctgccacggacaccaatgggaccaagtccaaatggattaatccaggacagaatagccacttgcttaattttctgtgaagaaatatcaatatacaaataaaagacatccctgtagcatatggtttccagctgtttctccagtggcattgccattgcccaggaggggcccagtcaccatgagagctcccttgccttacctggaggaagaatgtgccttcaggccacagtcgtgctgctagaacagtctcrtagctgcagttcagctgtgcttcctcagcctactatcataggcttcctcagccctctgtcatatggctgttttscaaacctgtggagtctgttactgttctttctgcaaggactcacctccttgagccttggtttttgttgtagggattaaatgagataatatgagtggcagctcttcatgagtcctgcagtgctaagcaaatgtcagaaattggtgtattagactatttatctttgatcttctgaatggattgctgtcatggacacggacacggatcttcatctggttcattgtatttatatgtgagggatggatggctgcggggctccaagtaagttattgggatgtttttatattccaggtgtgctgtacrttcttattttattttcacaayagctctgtgatgtaartgctatctccatgagaaaattcataaagggtgttttgttcctttgaaatgtataatgtaaagacattaaatctcctcatttaaggatctaa

SEQ ID NO: 1806 - DNA, 673 bp, Homo sapiens
gccatagtcgaccccaccatgctctttgacatcactgtcagtggtgagtccttgggccacatttccttagatccatttgcagacaaagctattaatacaaagacagcagaaaattttcatgctctgagcactggagagaaagaatttggttattaagagttcttgctttcacagtattattccaggatttatgtgtctgggtggtgatttcacatgccataatggcactggtggaaagtccatctatgcggagaaatttgatgatgagagcgtcatcctgaagtatacaggttctggcatcttgtccatggcaaatgctgtactcaacacaaatggttcccattttttcatctgcactgcaaagactgagtggttggtaggcaagcatgtggtcttcggcaaggtaaaagcaggcactaataaggtggaagccatggaatgctttgggtccaggaatggcaagaccagcaagaagatcattgctgactgtggaaaacgctaataartttgaatcatgttttatgttaaccacaagagaattgcttctgtagctcaggagagcacccctccaacccatttgctcacagtatcctataatctttgtgctatctctgctattctttaggttccatattttccttattcccttccatgtctagctggattacacagt

SEQ ID NO: 1807 - DNA, 1435 bp, Homo sapiens
atgttcctcgtacactgcaccagcaccactgcttcccttcccagtgagawcccgatcaagctttatcatgcagcccagaagggtgggggaaagaaaaagaattaggagraaatgttgyaaaagtaatgagataatatgagaatgtgctttgggaactgcgaatctggagtcactggtccatgaggaatctaggataagaagaaggaagctgtgaagaatggttggctaacagtgctggcaaggaattcagatcaacatacctctcaaaagaatggaagtctcttaaactcagacagaataaaggaggcacagagaagttatacaaattgtcctggcacaaaaaactgataagacttaagcccaggagtactggcccaagaagatattagactatggaaatgatgttggagaaaaagcaaatttgagcgattttcttatttgagttcaaaatgggtcttaaagcagtggggacaactggcaacataacaatgcatttggcctgggaactgctaaccaactcttagttcaatggcggttcaagaagttttgcaaaggagacaatagccttgaagataaggagcatagtggccggccatcagaagttgacaacgaccaattgagagcaatatttgaagctgatcctcttacaactacasgagaagttgccaaagaactcagtgtcgaccttcctatggttgttcggcatttgaagcaaattggaaaggtgagaaagctccatacatgggtgctgcatgagctgagtgagaagaaaaaaatcgtcattttgaagttttgtcttctcttgttcttcacaacggtgaactatctcatgattggattgtgacgtacgatgaaaagtagattttatatgacaatgggcaatgaccagctcagtggttggactgagaagacactccaaagcacttccaaaagccaaatttgcaccacaaaaaaaggtcatgatcactgttgggtggtctgctgccactccgatccactacagctttctgaatcctggcaaaaccattacatctgagaagtatgctcagcaaatagatgagatgcactgaaaactgcaatgcctgcagctggcattggtcaacagaaagggtccaattcttctcccaaccgcgtgttgcaaaactaatgcttcaaaagttgaacgaagttttgcctcatctgccatatttgcctgatctctcaccaactgatcaccacttttttaagcatctcgacagcacaactttttgcagggaaaatgcttccacaaccagcaggatgcagaaaatgctttccaagggttcatttaatcctgaaccatagattgttagctacaggaataaacaaacttatttctcactggcaaaaatttgttgattataatggttcctattttgattaataaagatgtgtttgagcctagttataatgattt

SEQ ID NO: 1808 - DNA, 3076 bp, Homo sapiens
ctctcgagggccggccggtttggcggcggctgcggagggtatctgaggctcggctgccaagccgaacgggctctggctcctcccagtggccggccggggcggaagcaggaggcgggggcagcgtgcgcgctgctggtcttctctcccgcggcgctggggcccgcgctccgctgctgttgctccattcggcgcttttctggcggctggctcctctccgctgccggctgctcctcgaccaggcctccttctcaacctcagcccgcggcgccgacccttccggcaccctcccgccccgtctcgtactgtcgccgtcaccgccgcggctccggccctggccccgatggctctgtgcaacggagactccaagctggagaatgctggaggagaccttaaggatggccaccaccactatgaaggagctgttgtcattctggatgctggtgctcagtacgggaaagtcatagaccgaagagtgagggaactgttcgtgcagtctgaaattttccccttggaaacaccagcatttgctataaaggaacaaggattccgtgctattatcatctctggaggacctaattctgtgtatgctgaagatgctccctggtttgatccagcaatattcactattggcaagcctgttcttggaatttgctatggtatgcagatgatgaataaggtatttggaggtactgtgcacaaaaaaagtgtcagagaagatggagttttcaacattagtgtggataatacatgttcattattcaggggccttcagaaggaagaagttgttttgcttacacatggagatagtgtagacaaagtagctgatggattcaaggttgtggcacgttctggaaacatagtagcaggcatagcaaatgaatctaaaaagttatatggagcacagttccaccctgaagttggccttacagaaaatggaaaagtaatactgaagaatttcctttatgatatagctggatgcagtggaaccttcaccgtgcagaacagagaacttgagtgtattcgagagatcaaagagagagtaggcacrtcaaaagttttggttttactcagtggtggagtagactcaacagtttgtacagctttgctaaatcgtgctttgaaccaagaacaagtcattgctgtgcacattgataatggctttatgagaaaacgagaaagccagtctgttgaagaggccctcaaaaagcttggaattcaggtcaaagtgataaatgctgctcattctttctacaatggaacaacaaccctaccaatatcagatgaagatagaaccccacggaaaagaattagcaaaacgttaaatatgaccacaagtcctgaagagaaaagaaaaatcattggggatacttttgttaagattgccaatgaagtaattggagaaatgaacttgaaaccagaggaggttttccttgcccaaggtactttacggcctgatctaattgaaagtgcatcccttgttgcaagtggcaaagctgaactcatcaaaacccatcacaatgacacagagctcatcagaaagttgagagaggagggaaaagtaatagaacctctgaaagattttcataaagatgaagtgagaattttgggcagagaacttggacttccagaagagttagtttccaggcatccatttccaggtcctggcctggcaatcagagtaatatgtgctgaagaaccttatatttgtaaggactttcctgaaaccaacaatattttgaaaatagtagctgatttttctgcaagtgttaaaaagccacataccctattacagagagtcaaagcctgcacaacagaagaggatcaggagaagctgatgcaaattaccagtctgcattcactgaatgccttcttgctgccaattaaaactgtaggtgtgcagggtgactgtcgttcctacagttacgtgtgtggaatctccagtaaagatgaacctgactgggaatcacttatttttctggctaggcttatacctcgcatgtgtcacaacgttaacagagttgtttatatatttggcccaccagttaaagaacctcctacagatgttactcccactttcttgacaacaggggtgctcagtactttacgccaagctgattttgaggcccataacattctcagggagtctgggtatgctgggaaaatcagccagatgccggtgattttgacaccattacattttgatcgggacccacttcaaaagcagccttcatgccagagatctgtggttattcgaacctttattactagtgacttcatgactggtatacctgcaacacctggcaatgagatccctgtagaggtggtattaaagatggtcactgagattaagaagattcctggtatttctcgaattatgtatgacttaacatcaaagcccccaggaactactgagtgggagtaataaacttcttgttctattaaagtaccgtgtgcagtttaaattgattagaaatcattcccattattgacatgcagtactgtgaaaagagttactggagcagctacatcacatctgagttctccacagcaaaaatctacggcttaagagctgagttggggataaccaaaagggactgaagagtttgtacgggtaaataatcaaagcaccattgcctacactcagacagattgatactgcttttgcctttgcctcacttattctttatgtataaattcactgttgatgtctctgtgaatatgtatgaaggtgggtgaatttgggggtaattatgggcttctgtctccttaccagtttctaagaactgttagaaacgcccattatttaccagtgttacttactacttatatatactttttggagaatcagttttcttataagtaatcttatttctccaaagggtgaaaaagagatgaacatatcagataaaggtataggtgggctattccagccacttttgaaggacactgagggtataaaatgtaagctaccataagatggaaaagcaccaggaatttgttgatgtacttttgaattttatttcacagccttgggaggaagaaactatgagtggtctcagatgtctatgaatggtct

SEQ ID NO: 1809 - DNA, 3248 bp, Homo sapiens
gttgagtagaagtgcagactgatgctttaagactcagggagaggtctttcccttatctccaccccagcaagcaccccagagaccttggagatttgtcttgtttctagacacgtgtactccaatgttgtgcggaggaggccttaaatattcaacatgtacttcccttcttggttaagtcagctgtacaggggtttatccagacccatcagaaggaccacccaaccgatctggggttctctctacagaagtctgttgcagagttcacagaggagaattccagaattcagtagctttgttgtccggaccaacacatgtggagagttgcgttcgtctcacttaggccaagaagtcaccttgtgtggatggattcagtaccgaaggcaaaacacattcttggtcctaagagatttcgatgggcttgttcaagttatcattccccaggatgagtcggcagcctctgtgaagaagattttatgtgaagcccctgtggaatctgtggtgcaagtgtctggtacagtcatttcccgtcctgcaggacaagagaatccaaaaatgccaacaggtgagattgaaatcaaagttaaaacagctgagcttctgaatgcctgcaagaagctgccctttgaaattaagaacttcgtgaagaaaacagaggctcttcggttgcagtatcgctacttagacttgcgtagtttccaaatgcagtataacctgcgactgaggtcccagatggtcatgaraatgcgggaatatctctgtaatctgcatgggtttgtggatatagaaacccccacattgtttaagaggaccccagggggkgccaaagagtttttagtaccatccagggaacctggaaagttttattctctccctcagagtcctcaacagtttaagcaacttctgatggttggcggtttagacagatattttcaggttgcccgatgttatcgagatgaaggttcaagaccagacagacagcctgagtttactcagattgacatagagatgtcatttgtagaccagactgggatccagagtttaattgagggtttgctccagtattcctggcccaatgacaaagatcctgtggttgttccttttcctactatgacttttgctgaggtgctggccacctatggaactgataaacctgacactcgctttggaatgaagattatagatatcagtgatgtgtttagaaacacagagattggatttcttcaagatgcacttagtaagccccatggaactgtgaaagccatatgtatccctgaaggagcaaaatacttaaaaaggaaagacattgaatccattagaaactttgcagctgaccattttaatcaggaaatcttacctgtattccttaacgccaatagaaactggaattctccagttgctaatttcataatggagtcacaaagactggaattaatcagactaatggagacccaagaggaagatgtggtcctactaactgctggagagcacaataaagcatgctctttgttaggaaaattacgactggaatgtgctgaccttctagaaacaagaggagtggtgctccgtgaccccactctgttctctttcctttgggtggtagatttcccactcttcctgcccaaggaggaaaatcccagagagctggaatcggcccaccacccatttactgctccccaccccagtgacatacatctcctgtacactgagcccaaaaaggcccgtagccaacactatgacttggttttaaatggcaatgaaataggaggtggttcaattcgaattcacaatgcagagctgcagcgttatatcctggcaaccttactaaaggaggatgtgaaaatgctctcccatctgctccaggctttagattatggggcaccccctcatggaggaattgccttagggttagacagactgatatgccttgtcactggatctccaagcatcagagatgtcatagccttcccaaagtccttccggggacatgacctcatgagcaataccccagattctgtccctcctgaggaactgaagccctatcatatccgagtctccaagccaacagactccaaagcagaaagagctcattgaatcatgcataccatgcagaaagttgagcttttaggttttgtcctctttgcttccccaaggctaaagtcagatctagagttctgccacaggtctaacaatcaagtctttagatggaaggaatccaggcaacattcttcaccacaacgaagaaacagataaaagatacccaattttgacttgatttcatgcatcatttggattttttttggttaggactttttttgaagttcctttttacttaggtgtgaaagatggttctttgttgaaataatatagtggtttagtgttttcaaatcatgtttctcatacccagatagtagattattcacttaggacagaggtaatcaaattatgtgtgaaatgtaggaaaatgcttgcccctgtaaactagtgagttgatggagcatttgcttcatcatcctcatcaagagaatcatataaattaagctttataatgacatttcaaccatcaacataatatagtgaggagtagcataatattttttaataatgcagaaaacatcactgaaatgagagtcacaaatttttcttcagtgtttcagcctgagtaagttacataaacctcgcttagcctcccttcctgctaatgtgtaaaatacatacttgccctggctacctcaccgggctgttattgctggaatcagaggagataacatatatggaagataaagtgaataaaagtactttgaaaaactawaaagcattccacaaatatgagatgatggtattatccatccataaataggtagatatatctctattttatagtttcagattaaacaaaactgatatcaatagtaaaagtcattttacttatcaattttctgtttttttttttagttttaaagatattattggccgggagtggtggctcacacctgtaatcccagcactttgggagattgaggtgggtggatcacttgaggtcaggagttcaacaccagcctggccaacatagtgaaaccgtctctactaaaaacacaaaaattagccaggcatggtggcgcatgcctgtaatcgcagccactcgggaggctgaggcatgaggtttgcttgaacctgggagatggaggttgcagtgagccaagatggtgccattacactccagcctgggtgacagagcaagactccatctc

SEQ ID NO: 1810 - DNA, 3137 bp, Homo sapiens
gttgagtagaagtgcagactgatgctttaagactcagggagaggtctttcccttatctccaccccagcaagcaccccagagaccttggagatttgtcttgtttctagacacgtgtactccaatgttgtgcggaggaggccttaaatattcaacatgtacttcccttcttggttaagtcagctgtacaggggtttatccagacccatcagaaggaccacccaaccgatctggggttctctctacagaagtctgttgcagagttcacagaggagaattccagaattcagtagctttgttgtccggaccaacacatgtggagagttgcgttcgtctcacttaggccaagaagtcaccttgtgtggatggattcagtaccgaaggcaaaacacattcttggtcctaagagatttcgatgggcttgttcaagttatcattccccaggatgagtcggcagcctctgtgaagaagattttatgtgaagcccctgtggaatctgtggtgcaagtgtctggtacagtcatttcccgtcctgcaggacaagagaatccaaaaatgccaacaggtgagattgaaatcaaagttaaaacagctgagcttctgaatgcctgcaagaagctgccctttgaaattaagaacttcgtgaagaaaacagaggctcttcggttgcagtatcgctacttagacttgcgtagtttccaaatgcagtataacctgcgactgaggtcccagatggtcatgaraatgcgggaatatctctgtaatctgcatgggtttgtggatatagaaacccccacattgtttaagaggaccccagggggkgccaaagagtttttagtaccatccagggaacctggaaagttttattctctccctcagagtcctcaacagtttaagcaacttctgatggttggcggtttagacagatattttcaggttgcccgatgttatcgagatgaaggttcaagaccagacagacagcctgagtttactcagattgacatagagatgtcatttgtagaccagactgggatccagagtttaattgagggtttgctccagtattcctggcccaatgacaaagatcctgtggttgttccttttcctactatgacttttgctgaggtgctggccacctatggaactgataaacctgacactcgctttggaatgaagattatagatatcagtgatgtgtttagaaacacagagattggatttcttcaagatgcacttagtaagccccatggaactgtgaaagccatatgtatccctgaaggagcaaaatacttaaaaaggaaagacattgaatccattagaaactttgcagctgaccattttaatcaggaaatcttacctgtattccttaacgccaatagaaactggaattctccagttgctaatttcataatggagtcacaaagactggaattaatcagactaatggagacccaagaggaagatgtggtcctactaactgctggagagcacaataaagcatgctctttgttaggaaaattacgactggaatgtgctgaccttctagaaacaagaggagtggtgctccgtgaccccactctgttctctttcctttgggtggtagatttcccactcttcctgcccaaggaggaaaatcccagagagctggaatcggcccaccacccatttactgctccccaccccagtgacatacatctcctgtacactgagcccaaaaaggaggatgtgaaaatgctctcccatctgctccaggctttagattatggggcaccccctcatggaggaattgccttagggttagacagactgatatgccttgtcactggatctccaagcatcagagatgtcatagccttcccaaagtccttccggggacatgacctcatgagcaataccccagattctgtccctcctgaggaactgaagccctatcatatccgagtctccaagccaacagactccaaagcagaaagagctcattgaatcatgcataccatgcagaaagttgagcttttaggttttgtcctctttgcttccccaaggctaaagtcagatctagagttctgccacaggtctaacaatcaagtctttagatggaaggaatccaggcaacattcttcaccacaacgaagaaacagataaaagatacccaattttgacttgatttcatgcatcatttggattttttttggttaggactttttttgaagttcctttttacttaggtgtgaaagatggttctttgttgaaataatatagtggtttagtgttttcaaatcatgtttctcatacccagatagtagattattcacttaggacagaggtaatcaaattatgtgtgaaatgtaggaaaatgcttgcccctgtaaactagtgagttgatggagcatttgcttcatcatcctcatcaagagaatcatataaattaagctttataatgacatttcaaccatcaacataatatagtgaggagtagcataatattttttaataatgcagaaaacatcactgaaatgagagtcacaaatttttcttcagtgtttcagcctgagtaagttacataaacctcgcttagcctcccttcctgctaatgtgtaaaatacatacttgccctggctacctcaccgggctgttattgctggaatcagaggagataacatatatggaagataaagtgaataaaagtactttgaaaaactawaaagcattccacaaatatgagatgatggtattatccatccataaataggtagatatatctctattttatagtttcagattaaacaaaactgatatcaatagtaaaagtcattttacttatcaattttctgtttttttttttagttttaaagatattattggccgggagtggtggctcacacctgtaatcccagcactttgggagattgaggtgggtggatcacttgaggtcaggagttcaacaccagcctggccaacatagtgaaaccgtctctactaaaaacacaaaaattagccaggcatggtggcgcatgcctgtaatcgcagccactcgggaggctgaggcatgaggtttgcttgaacctgggagatggaggttgcagtgagccaagatggtgccattacactccagcctgggtgacagagcaagactccatctc

SEQ ID NO: 1811 - DNA, 3750 bp, Homo sapiens
tctctcaaatttccgcccgtagtaggcatggcggcggcacctcaccactgattcgttgaattccttcccggtaatcttgggcactagcgggcggagttgaagggcgcttggaccccagcggcgatctgtgtttgggttcgcgctctgggagaattttggctttgctcgccttcctctttcagaagactcgaaatcggccagcaggtctgcgagatttgaaacgcgactgttactccttgttttccggttctggccgcgggagcctctcgagaagcgtggaaagaggagaagggcgtataccttgtgaccgcctctggttgtcttgggctcgcgcctggcgccgctacgtggagtcgctctctcgtcgtcacttttggctgccgacttgttgagtagaagtgcagactgatgctttaagactcagggagaggtctttcccttatctccaccccagcaagcaccccagagaccttggagatttgtcttgtttctagacacgtgtactccaatgttgtgcggaggaggccttaaatattcgagaagagagtgggaactcctggaattttaagggatttctgtgtatttccaaaactgacttttaactaccggcagcgtgggatttcgtgattgtttttcgccatcgtgtggctccaacatgtacttcccttcttggttaagtcagctgtacaggggtttatccagacccatcagaaggaccacccaaccgatctggggttctctctacagaagtctgttgcagagttcacagaggagaattccagaattcagtagctttgttgtccggaccaacacatgtggagagttgcgttcgtctcacttaggccaagaagtcaccttgtgtggatggattcagtaccgaaggcaaaacacattcttggtcctaagagatttcgatgggcttgttcaagttatcattccccaggatgagtcggcagcctctgtgaagaagattttatgtgaagcccctgtggaatctgtggtgcaagtgtctggtacagtcatttcccgtcctgcaggacaagagaatccaaaaatgccaacaggtgagattgaaatcaaagttaaaacagctgagcttctgaatgcctgcaagaagctgccctttgaaattaagaacttcgtgaagaaaacagaggctcttcggttgcagtatcgctacttagacttgcgtagtttccaaatgcagtataacctgcgactgaggtcccagatggtcatgaraatgcgggaatatctctgtaatctgcatgggtttgtggatatagaaacccccacattgtttaagaggaccccagggggkgccaaagagtttttagtaccatccagggaacctggaaagttttattctctccctcagagtcctcaacagtttaagcaacttctgatggttggcggtttagacagatattttcaggttgcccgatgttatcgagatgaaggttcaagaccagacagacagcctgagtttactcagattgacatagagatgtcatttgtagaccagactgggatccagagtttaattgagggtttgctccagtattcctggcccaatgacaaagatcctgtggttgttccttttcctactatgacttttgctgaggtgctggccacctatggaactgataaacctgacactcgctttggaatgaagattatagatatcagtgatgtgtttagaaacacagagattggatttcttcaagatgcacttagtaagccccatggaactgtgaaagccatatgtatccctgaaggagcaaaatacttaaaaaggaaagacattgaatccattagaaactttgcagctgaccattttaatcaggaaatcttacctgtattccttaacgccaatagaaactggaattctccagttgctaatttcataatggagtcacaaagactggaattaatcagactaatggagacccaagaggaagatgtggtcctactaactgctggagagcacaataaagcatgctctttgttaggaaaattacgactggaatgtgctgaccttctagaaacaagaggagtggtgctccgtgaccccactctgttctctttcctttgggtggtagatttcccactcttcctgcccaaggaggaaaatcccagagagctggaatcggcccaccacccatttactgctccccaccccagtgacatacatctcctgtacactgagcccaaaaaggcccgtagccaacactatgacttggttttaaatggcaatgaaataggaggtggttcaattcgaattcacaatgcagagctgcagcgttatatcctggcaaccttactaaaggaggatgtgaaaatgctctcccatctgctccaggctttagattatggggcaccccctcatggaggaattgccttagggttagacagactgatatgccttgtcactggatctccaagcatcagagatgtcatagccttcccaaagtccttccggggacatgacctcatgagcaataccccagattctgtccctcctgaggaactgaagccctatcatatccgagtctccaagccaacagactccaaagcagaaagagctcattgaatcatgcataccatgcagaaagttgagcttttaggttttgtcctctttgcttccccaaggctaaagtcagatctagagttctgccacaggtctaacaatcaagtctttagatggaaggaatccaggcaacattcttcaccacaacgaagaaacagataaaagatacccaattttgacttgatttcatgcatcatttggattttttttggttaggactttttttgaagttcctttttacttaggtgtgaaagatggttctttgttgaaataatatagtggtttagtgttttcaaatcatgtttctcatacccagatagtagattattcacttaggacagaggtaatcaaattatgtgtgaaatgtaggaaaatgcttgcccctgtaaactagtgagttgatggagcatttgcttcatcatcctcatcaagagaatcatataaattaagctttataatgacatttcaaccatcaacataatatagtgaggagtagcataatattttttaataatgcagaaaacatcactgaaatgagagtcacaaatttttcttcagtgtttcagcctgagtaagttacataaacctcgcttagcctcccttcctgctaatgtgtaaaatacatacttgccctggctacctcaccgggctgttattgctggaatcagaggagataacatatatggaagataaagtgaataaaagtactttgaaaaactawaaagcattccacaaatatgagatgatggtattatccatccataaataggtagatatatctctattttatagtttcagattaaacaaaactgatatcaatagtaaaagtcattttacttatcaattttctgtttttttttttagttttaaagatattattggccgggagtggtggctcacacctgtaatcccagcactttgggagattgaggtgggtggatcacttgaggtcaggagttcaacaccagcctggccaacatagtgaaaccgtctctactaaaaacacaaaaattagccaggcatggtggcgcatgcctgtaatcgcagccactcgggaggctgaggcatgaggtttgcttgaacctgggagatggaggttgcagtgagccaagatggtgccattacactccagcctgggtgacagagcaagactccatctc

SEQ ID NO: 1812 - DNA, 2699 bp, Homo sapiens
aaaatgccaacaggtgagattgaaatcaaagttaaaacagctgagcttctgaatgcctgcaagaagctgccctttgaaattaagaacttcgtgaagaaaacagaggctcttcggttgcagtatcgctacttagacttgcgtagtttccaaatgcagtataacctgcgactgaggtcccagatggtcatgaraatgcgggaatatctctgtaatctgcatgggtttgtggatatagaaacccccacattgtttaagaggaccccagggggkgccaaagagtttttagtaccatccagggaacctggaaagttttattctctccctcagagtcctcaacagtttaagcaacttctgatggttggcggtttagacagatattttcaggttgcccgatgttatcgagatgaaggttcaagaccagacagacagcctgagtttactcagattgacatagagatgtcatttgtagaccagactgggatccagagtttaattgagggtttgctccagtattcctggcccaatgacaaagatcctgtggttgttccttttcctactatgacttttgctgaggtgctggccacctatggaactgataaacctgacactcgctttggaatgaagattatagatatcagtgatgtgtttagaaacacagagattggatttcttcaagatgcacttagtaagccccatggaactgtgaaagccatatgtatccctgaaggagcaaaatacttaaaaaggaaagacattgaatccattagaaactttgcagctgaccattttaatcaggaaatcttacctgtattccttaacgccaatagaaactggaattctccagttgctaatttcataatggagtcacaaagactggaattaatcagactaatggagacccaagaggaagatgtggtcctactaactgctggagagcacaataaagcatgctctttgttaggaaaattacgactggaatgtgctgaccttctagaaacaagaggagtggtgctccgtgaccccactctgttctctttcctttgggtggtagatttcccactcttcctgcccaaggaggaaaatcccagagagctggaatcggcccaccacccatttactgctccccaccccagtgacatacatctcctgtacactgagcccaaaaaggcccgtagccaacactatgacttggttttaaatggcaatgaaataggaggtggttcaattcgaattcacaatgcagagctgcagcgttatatcctggcaaccttactaaaggaggatgtgaaaatgctctcccatctgctccaggctttagattatggggcaccccctcatggaggaattgccttagggttagacagactgatatgccttgtcactggatctccaagcatcagagatgtcatagccttcccaaagtccttccggggacatgacctcatgagcaataccccagattctgtccctcctgaggaactgaagccctatcatatccgagtctccaagccaacagactccaaagcagaaagagctcattgaatcatgcataccatgcagaaagttgagcttttaggttttgtcctctttgcttccccaaggctaaagtcagatctagagttctgccacaggtctaacaatcaagtctttagatggaaggaatccaggcaacattcttcaccacaacgaagaaacagataaaagatacccaattttgacttgatttcatgcatcatttggattttttttggttaggactttttttgaagttcctttttacttaggtgtgaaagatggttctttgttgaaataatatagtggtttagtgttttcaaatcatgtttctcatacccagatagtagattattcacttaggacagaggtaatcaaattatgtgtgaaatgtaggaaaatgcttgcccctgtaaactagtgagttgatggagcatttgcttcatcatcctcatcaagagaatcatataaattaagctttataatgacatttcaaccatcaacataatatagtgaggagtagcataatattttttaataatgcagaaaacatcactgaaatgagagtcacaaatttttcttcagtgtttcagcctgagtaagttacataaacctcgcttagcctcccttcctgctaatgtgtaaaatacatacttgccctggctacctcaccgggctgttattgctggaatcagaggagataacatatatggaagataaagtgaataaaagtactttgaaaaactawaaagcattccacaaatatgagatgatggtattatccatccataaataggtagatatatctctattttatagtttcagattaaacaaaactgatatcaatagtaaaagtcattttacttatcaattttctgtttttttttttagttttaaagatattattggccgggagtggtggctcacacctgtaatcccagcactttgggagattgaggtgggtggatcacttgaggtcaggagttcaacaccagcctggccaacatagtgaaaccgtctctactaaaaacacaaaaattagccaggcatggtggcgcatgcctgtaatcgcagccactcgggaggctgaggcatgaggtttgcttgaacctgggagatggaggttgcagtgagccaagatggtgccattacactccagcctgggtgacagagcaagactccatctc

SEQ ID NO: 1813 - DNA, 2163 bp, Homo sapiens
ccggctgtgtgagaggtcagcagaggggcggtctgcggggacaacaatggcggggttctgggtcgggacagcaccgctggtcgctgccggacggcgtgggcggtggccgccgcagcagctgatgctgagcgcggcgctgcggaccctgaagcatgttctgtactattcaagacagtgcttaatggtgtcccgtaatcttggttcagtgggatatgatcctaatgaaaaaacttttgataaaattcttgttgctaatagaggagaaattgcatgtygggttattagaacttgcaagaagatgggcattaagacagttgccatccacagtgatgttgatgctagttctgttcatgtgaaaatggcggatgaggctgtctgtgttggcccagctcccaccagtaaaagctacctcaacatggatgccatcatggaagccattaagaaaaccagggcccaarctgtacatccaggttatggattcctttcagaaaacaaagaatttgccagatgtttggcagcagaagatgtcgttttcattggacctgacacacatgctattcaagccatgggcgacaagattgaaagcaaattattagctaagaaagcagaggttaatacaatccctggctttgatggagtagtcaaggatgcagaagaagctgtcagaattgcragggaaattggctaccctgtcatgatcaaggcctcagcaggtggtggtgggaaaggcatgcgcattgcttgggatgatgaagagaccagggatggttttagattgtcatctcaagaagctgcttctagttttggcgatgatagactactaatagaaaaatttattgataatcctcgtcatatagaaatccaggttctaggtgataaacatgggaatgctttatggcttaatgaaagagagtgctcaattcagagaagaaatcagaaggtggtggaggaagcaccaagcatttttttggatgcggagactcgaagagcgatgggagaacaagctgtagctcttgccagagcagtaaaatattcctctgctgggaccgtggagttccttgtggactctaagaagaatttttatttcttggaaatgaatacaagactccaggtggaagttgatgggtcgaaactaaatgtgaccagcacgtggaacctggcttcgcccttattgtctgtcagcgttgatggcactcagaggactgtccagtgtctttctcgagaagcaggtggaaacatgagcattcagtttcttggtacagtgtacaaggtgaatatcttaaccagacttgccgcagaattgaacaaatttatgctggaaaaagtgactgaggacacaagcagtgttctgcgttccccgatgcccrgagtggtggtggccgtctctgtcaagcctggagacgcggtagcagaaggtcaagaaatttgtgtgattgaagccatgaaaatgcagaatagtatgacagctgggaaaactggcacggtgaaatctgtgcactgtcaagctggagacacagttggagaaggggatctgctcgtggagctggaatgaaggatttataacctttcagtcatcacccaatttaattagccatttgcatgatgctttcacacacaattgattcaagcattatacaggaacacccctgtgcagctacgtttacgtygtcatttattccacagagtcaagaccaatattctgccaaaaaatcaccaatggaaattttcattratataaatacttgtacatatgatttgtacttctgctgtgagattccctagtgtcaaaattaaatcaataaaactgagcatttgtctaaatattagtttgccctttctttgaatgaagacaatgtacacataggcgacaggctctgccagtagactaccagcatttctttgtgatccttttaagagattgatataaatgtcagtcagttctctgccttgctttattaaattagcacttgccattttttcatctgattgccttactacttctagaagtgaggccctcactcctggtgctgattttcaaaacttcctaaggaccagagactgcaaatgcagattttggcaatccctttcctgctgtgtctctatgtgggtgtactgttggtggctgactcccctggaggtcaccctgaagcttcctggttggcc

SEQ ID NO: 1814 - DNA, 2844 bp, Homo sapiens
ccggctgtgtgagaggtcagcagaggggcggtctgcggggacaacaatggcggggttctgggtcgggacagcaccgctggtcgctgccggacggcgtgggcggtggccgccgcagcagctgatgctgagcgcggcgctgcggaccctgaagcatgttctgtactattcaagacagtgcttaatggtgtcccgtaatcttggttcagtgggatatgatcctaatgaaaaaacttttgataaaattcttgttgctaatagaggagaaattgcatgtygggttattagaacttgcaagaagatgggcattaagacagttgccatccacagtgatgttgatgctagttctgttcatgtgaaaatggcggatgaggctgtctgtgttggcccagctcccaccagtaaaagctacctcaacatggatgccatcatggaagccattaagaaaaccagggcccaarctgtacatccaggttatggattcctttcagaaaacaaagaatttgccagatgtttggcagcagaagatgtcgttttcattggacctgacacacatgctattcaagccatgggcgacaagattgaaagcaaattattagctaagaaagcagaggttaatacaatccctggctttgatggagtagtcaaggatgcagaagaagctgtcagaattgcragggaaattggctaccctgtcatgatcaaggcctcagcaggtggtggtgggaaaggcatgcgcattgcttgggatgatgaagagaccagggatggttttagattgtcatctcaagaagctgcttctagttttggcgatgatagactactaatagaaaaatttattgataatcctcgtcatatagaaatccaggttctaggtgataaacatgggaatgctttatggcttaatgaaagagagtgctcaattcagagaagaaatcagaaggtggtggaggaagcaccaagcatttttttggatgcggagactcgaagagcgatgggagaacaagctgtagctcttgccagagcagtaaaatattcctctgctgggaccgtggagttccttgtggactctaagaagaatttttatttcttggaaatgaatacaagactccaggttgagcatcctgtcacagaatgcattactggcctggrcctagtccaggaaawgatccgtgttgctaaggkctaccctctcaggcacaaacaagctgatattcgcatcaacggctgggcagttgaatgtcrggtttatgctgaggacccctacaagtcttttggtttaccatctattgggagattgtctcagtaccaagaacygttacatctacctggtgtccgagtggacagtggcatccaaccaggaagtgatattagcatttattatgatcctatgatttcaaaactaatcacatatggctctgatagaactgaggcactgaagagaatggcagatgcactggataactatgttrttcgaggtgttacacataatattgcattacttcgagaggtgataatcaactcacgctttgtaaaaggagacatcagcactaaatttctctccgatgtgtatcctgatggcttcaaagracacatgctaaccaagagtgagaagaaccagttattggcaatagcatcatcattgtttgtggcattccagttaagagcacaacattttcaagaaaattcaagaatgcctgttattaaaccagacatagccaactgggagctctsagtaaaattgcatgataaagttcataccgtagtagcatcaaacaatgggtcagtgttctcggtggaagttgatgggtcgaaactaaatgtgaccagcacgtggaacctggcttcgcccttattgtctgtcagcgttgatggcactcagaggactgtccagtgtctttctcgagaagcaggtggaaacatgagcattcagtttcttggtacagtgtacaaggtgaatatcttaaccagacttgccgcagaattgaacaaatttatgctggaaaaagtgactgaggacacaagcagtgttctgcgttccccgatgcccrgagtggtggtggccgtctctgtcaagcctggagacgcggtagcagaaggtcaagaaatttgtgtgattgaagccatgaaaatgcagaatagtatgacagctgggaaaactggcacggtgaaatctgtgcactgtcaagctggagacacagttggagaaggggatctgctcgtggagctggaatgaaggatttataacctttcagtcatcacccaatttaattagccatttgcatgatgctttcacacacaattgattcaagcattatacaggaacacccctgtgcagctacgtttacgtygtcatttattccacagagtcaagaccaatattctgccaaaaaatcaccaatggaaattttcattratataaatacttgtacatatgatttgtacttctgctgtgagattccctagtgtcaaaattaaatcaataaaactgagcatttgtctaaatattagtttgccctttctttgaatgaagacaatgtacacataggcgacaggctctgccagtagactaccagcatttctttgtgatccttttaagagattgatataaatgtcagtcagttctctgccttgctttattaaattagcacttgccattttttcatctgattgccttactacttctagaagtgaggccctcactcctggtgctgattttcaaaacttcctaaggaccagagactgcaaatgcagattttggcaatccctttcctgctgtgtctctatgtgggtgtactgttggtggctgactcccctggaggtcaccctgaagcttcctggttggcc

SEQ ID NO: 1815 - DNA, 2943 bp, Homo sapiens
cagaggggcggtctgcggggacaacaatggcggggttctgggtcgggacagcaccgctggtcgctgccggacggcgtgggcggtggccgccgcagcagctgatgctgagcgcggcgctgcggaccctgaagtcatttaattttagacgttgaagacactttagagacgacctgccccatcctactctttaaagaggagggaaccgagccccaggtgggcagtatgagagctggagcttatcgacatggaacatgttctgtactattcaagacagtgcttaatggtgtcccgtaatcttggttcagtgggatatgatcctaatgaaaaaacttttgataaaattcttgttgctaatagaggagaaattgcatgtygggttattagaacttgcaagaagatgggcattaagacagttgccatccacagtgatgttgatgctagttctgttcatgtgaaaatggcggatgaggctgtctgtgttggcccagctcccaccagtaaaagctacctcaacatggatgccatcatggaagccattaagaaaaccagggcccaarctgtacatccaggttatggattcctttcagaaaacaaagaatttgccagatgtttggcagcagaagatgtcgttttcattggacctgacacacatgctattcaagccatgggcgacaagattgaaagcaaattattagctaagaaagcagaggttaatacaatccctggctttgatggagtagtcaaggatgcagaagaagctgtcagaattgcragggaaattggctaccctgtcatgatcaaggcctcagcaggtggtggtgggaaaggcatgcgcattgcttgggatgatgaagagaccagggatggttttagattgtcatctcaagaagctgcttctagttttggcgatgatagactactaatagaaaaatttattgataatcctcgtcatatagaaatccaggttctaggtgataaacatgggaatgctttatggcttaatgaaagagagtgctcaattcagagaagaaatcagaaggtggtggaggaagcaccaagcatttttttggatgcggagactcgaagagcgatgggagaacaagctgtagctcttgccagagcagtaaaatattcctctgctgggaccgtggagttccttgtggactctaagaagaatttttatttcttggaaatgaatacaagactccaggttgagcatcctgtcacagaatgcattactggcctggrcctagtccaggaaawgatccgtgttgctaaggkctaccctctcaggcacaaacaagctgatattcgcatcaacggctgggcagttgaatgtcrggtttatgctgaggacccctacaagtcttttggtttaccatctattgggagattgtctcagtaccaagaacygttacatctacctggtgtccgagtggacagtggcatccaaccaggaagtgatattagcatttattatgatcctatgatttcaaaactaatcacatatggctctgatagaactgaggcactgaagagaatggcagatgcactggataactatgttrttcgaggtgttacacataatattgcattacttcgagaggtgataatcaactcacgctttgtaaaaggagacatcagcactaaatttctctccgatgtgtatcctgatggcttcaaagracacatgctaaccaagagtgagaagaaccagttattggcaatagcatcatcattgtttgtggcattccagttaagagcacaacattttcaagaaaattcaagaatgcctgttattaaaccagacatagccaactgggagctctsagtaaaattgcatgataaagttcataccgtagtagcatcaaacaatgggtcagtgttctcggtggaagttgatgggtcgaaactaaatgtgaccagcacgtggaacctggcttcgcccttattgtctgtcagcgttgatggcactcagaggactgtccagtgtctttctcgagaagcaggtggaaacatgagcattcagtttcttggtacagtgtacaaggtgaatatcttaaccagacttgccgcagaattgaacaaatttatgctggaaaaagtgactgaggacacaagcagtgttctgcgttccccgatgcccrgagtggtggtggccgtctctgtcaagcctggagacgcggtagcagaaggtcaagaaatttgtgtgattgaagccatgaaaatgcagaatagtatgacagctgggaaaactggcacggtgaaatctgtgcactgtcaagctggagacacagttggagaaggggatctgctcgtggagctggaatgaaggatttataacctttcagtcatcacccaatttaattagccatttgcatgatgctttcacacacaattgattcaagcattatacaggaacacccctgtgcagctacgtttacgtygtcatttattccacagagtcaagaccaatattctgccaaaaaatcaccaatggaaattttcattratataaatacttgtacatatgatttgtacttctgctgtgagattccctagtgtcaaaattaaatcaataaaactgagcatttgtctaaatattagtttgccctttctttgaatgaagacaatgtacacataggcgacaggctctgccagtagactaccagcatttctttgtgatccttttaagagattgatataaatgtcagtcagttctctgccttgctttattaaattagcacttgccattttttcatctgattgccttactacttctagaagtgaggccctcactcctggtgctgattttcaaaacttcctaaggaccagagactgcaaatgcagattttggcaatccctttcctgctgtgtctctatgtgggtgtactgttggtggctgactcccctggaggtcaccctgaagcttcctggttggcc

SEQ ID NO: 1816 - DNA, 1774 bp, Homo sapiens
ccgccggccctagtctgcctgttttcgactcgcgctccggctgctgtcacttggctctctggctggagcttgaggacgcaaggagggtttgtcactggcagactcgagactgtaggcactgccatggcccctgtgctcagtaaggactcggcggacatcgagagtatcctggctttaaatcctcgaacacaaactcatgcaactctgygttccacttcggccaagaaattagacaagaaacattggaaaagaaatcctgataagaactgctttaattgtgagaagctggagaataattttgatgacatcaagcacacgactcttggtgagcgaggagctctccgagaagcaatgagatgcctgaaatgtgcagatgccccgtgtcagaagagctgtccaactaatcttgatattaaatcattcatcacaagtattgcaaacaagaactattatggagctgctaagatgatattttctgacaacccacttggtctgacttgtggaatggtatgtccaacctctgatctttgtgtaggtggatgcaatttatatgccactgaagagggacccattaatattggtggattgcagcaatttgctactgagactttgatcctggctttctctttaatgaatcatttgtaaagactttgattcttcagacactcttgggctctctgacgtctcctatttggagtcaacaagcaggttaattcccatgtatcatttaaatgatcagcttatatgaagggtatagtaagattttataatctttggagactagttggctagaaggtcaaattaagtgcccgtcaacctagatttttagttaatgacttactgatctggttttgtcagcataaacacaatgtgttctttcattttgggacccttcccataatattcctcaagcttaagtctcactttgctcttagtaataaatcagggttattcccttcctgctttctgacaggttaattctaaagaagagctcctgggaataagaaaataraaacaattcgaggttgtggattgttgcaataaattctgggatttaatttcttttcttaccaaattcaaaattgcattaggcttacctgaccactacgaagtatgatctttactacctgtgaaaatccttagttgatggagaagattcacttgaattcctcctcacttttctttggggacccattgcctcttcattaaaccagggcaagctttcacagatgcagtaagtgaaaggtcacatagtatgtatatcaactaacacagcattttaaaacaaaatgaattaaaatgatatcattagtaattgatctggtcatgagaggtgtgtgtgtttgtgtgtgtgtgtgtgtgtgtgtgagagagagagagagaaagagagagagagacagggaaatacattattcctctggaaactctcacatggttttaattcttttctctgggaacactgtccctctgggaactcttacttggttctaccactcattcccagagcagagtctatttaagacagagacatgtgccttcagaacagaatttattagaaactyactaaaatttgagagtggtcacacttaggtcttgccataagtatcacctaatgaagagttatgcatagattaggactgcagtagatgcattttaagtgaatcaaggaatttagaataggaatgtatctgcttatttcattccaattatagtttgtataattgtaatttcaatatcaaattataaattaaaaatgtcctcgtgggaactactg

SEQ ID NO: 1817 - DNA, 4434 bp, Homo sapiens
  misc_feature (1)...(4434): n = A,T,C or G
ccgccggccctagtctgcctgttttcgactcgcgctccggctgctgtcacttggctctctggctggagcttgaggacgcaaggagggtttgtcactggcagactcgagactgtaggcactgccatggcccctgtgctcagtaaggactcggcggacatcgagagtatcctggctttaaatcctcgaacacaaactcatgcaactctgygttccacttcggccaagaaattagacaagaaacattggaaaagaaatcctgataagaactgctttaattgtgagaagctggagaataattttgatgacatcaagcacacgactcttggtgagcgaggagctctccgagaagcaatgagatgcctgaaatgtgcagatgccccgtgtcagaagagctgtccaactaatcttgatattaaatcattcatcacaagtattgcaaacaagaactattatggagctgctaagatgatattttctgacaacccacttggtctgacttgtggaatggtatgtccaacctctgatctttgtgtaggtggatgcaatttatatgccactgaagagggacccattaatattggtggattgcagcaatttgctactgaggtattcaaagcartgagtatcccacagatcagaaatccttcgctgcctcccccagaaaaaatgtctgaagcctattctgcaaagattgctctttttggtgctgggcctgcaagtatamgttgtgcttcctttttggctcgattggggtactctgacatcactatatttgaaaaacaagaatatgttggtggtttaagtacttctgaaattcctcagttcyggctgccgtatgatgtagtgaattttgagattgagctaatgaaggaccttggtgtaaagataatttgcggtaaaagcctttcagtgaatgaaatgactcttagcactttgaaagaaaaaggctacaaagctgctttcattggaataggtttgccagaacccaataaagatgccatcttccaaggcctgacgcaggaccaggggttttatacatccaaagactttttgccacttgtagccaaaggcagtaaagcaggaatgtgcgcctgtcactctccattgccatcgatacggggagtcgtgattgtacttggagctggagacactgcctttgactgtgcaacatctgctctacgttgtggagctcgccgtgtgttcatcgtcttcagaaaaggctttgttaatataagagctgtccctgaggagatggaacttgctaaggaagaaaagtgtgaatttctgccattcctgtccccacggaaggttatagtaaaaggtgggagaattgttgctatrcagtttgttcggacagarcaagatgaaactggaaaatggaatgaagatgaagatcagatggtccatctgaaagccgatgtggtcatcagtgcctttggttcagttctgagtgatcctaaagtaaaagaagccttgagccctataaaatttaayagatggggtctcccagaagtagatccagaaactatgcaaactagtgaagcatgggtatttgcaggtggtgatgtcgttggtttggctaacactacagtggaatcggtgaatgatggaaagcaagcttcttggtacattcacaaatacgtacagtcacaatatggagcttccgtttctgccaagcctgaactacccctcttttacactcctattgatctggtggacattartgtagaaatggccggattgaagtttntaaatccttttggtcttgctagcgcaactccagccaccagcacatcaatgaktcgaagagcttttgaagctggatggggttttgccctcaccaaaactttctctcttgataaggacattgtgacaaatgtttcccccagaatcatccggggaaccacctctggccccatgtatggccctggacaaagctcctttctgaatattgagctcatcagtgagaaaacggctgcatattggtgtcaaagtgtcactgaactaaaggctgacttyccagacaacattgtgattgctagcattatgtgcagttacaataaaaatgactggacggaacttgccaagaagtctgaggattctggagcagatgccctggagttaaatttatcatgtccacatggcatgggagaaagaggaatgggcctggcctgtgggcaggatccagagctggtgcggaacatctgccgctgggttaggcaagctgttcagattcctttttttgccaagctgaccccaaatgtcactgatattgtgagcatcgcaagagctgcaaaggaaggtggtgccaatggcrktacagccaccaacactgtctcaggtctgatgggattaaaatctgatggcacaccttggccagcagtggggattgcaaagcgaactacatatggaggagtgtctgggacagcaatcagacctattgctttgagagctgtgacctccattgctcgtgctctgcctggatttcccattttggctactggtggaattgactctgctgaaagtggtcttcagtttctccatagtggtgcttccgtcctccaggtatgcagtgccattcagaatcaggatttcactgtgatcgaagactactgcactggcctcaaagccctgctttatctgaaaagcattgaagaactacaagactgggatggacagagtccagctactgtgagtcaccagaragggaaaccagttccacgtatagctgaactcatggacaagaaactgccaagttttggaccttatctggaacagcrcaagaaaatcatagcagaaaacaagattagactgaaagaacaaaatgtagctttttcaccacttaagagaaactgttttatccccaaaaggcctattcctaccatcaaggatgtaataggaaaagcactgcagtaccttggaacatttggtgaattgagcaacgtagagcaagttgtggctatgattgwtgaagaaatgtgtatcaactgtggtaaatgctacatgacctgtaatgattctggctaccaggctatacagtttgwtccagaaacccacctgcccaccataaccgacacttgtacaggctgtactctgtgtctcagtktttgccctattgtcgactgcatcaaaatggtttccaggacaacaccttatgaaccaaagagaggcgtacccttatctgtgaatccggtgtgttaaggtgatttgtgaaacagttgctgtgaactttcatgtcacctacatatgctgatcttttaaaatcatgatccttgtgttcagctctttccaaattaaaacaaatatacattttctaaataaaaatatgtaatttcaaaatacatttgtaagtgtaaaaaatgtctcatgtcaatgaccattcaattagtggtcataaaatagaataattcttttctgaggatagtagttaaataactgtgtggcagttaattggatgttcactgccagttgtcttatgtgaaaaattaacttttttgtggcaattagtgtgacagtttccaaattgccctatgctgtgctccatatttgatttctaattgtaagtgaaattaagcattttgaaacaaagtactctttaacatacaagaaaatgtatccaaggaaacattttatcawtaaaaattacctttaattttaatgctgtttmtaagaaaatgtagttagctccataaagtacaaatgaagaaagtcaaaaaattatttgctatggcaggataagaaagcctaaaattgagtttgtrgaactttattaartaaaatccccttcgctgaaattgcttatttttggtgttggatagaggatagggagaatatttactaactaaataccattcactactcatgcgtgagatgggtgtacaaactcatcctcttttaatggcatttctctttaaactatgttcctaacaaaatgagatgataggatagatcctggttaccactcttttrctgtgcacataygggctctgactggttttaatagtcaccttcatgattatagcaactaatgtttgaacaaagctcaaagtatgcaatgcttcattattcaagaatgaaaaatataatgttgataatatatattaagtgtgccaaatcagtttgactactctctgttttagtgtttatgtttaaaagaaatatattttttgttattattagataatatttttgtatttctctattttcataatcagtaaatagtgtcatataaactcatttatctcctcttcatggcatcttcaatatgaatctataagtagtaaatcagaaagtaacaatctatggcttatttctatgacaaattcaagagctagaaaaataaaatgtttcattatgcacttttagaaatgcatatttgccacaaaacctgtattactgaataatatcaaataaaatatcataaagcattttaaa

SEQ ID NO: 1818 - DNA, 2064 bp, Homo sapiens
tggcacatgtggctggaaatgcaagaagagggaaacgtgtggcttggagtttcaagaagagtgactgtctcagtgccgagtgcctcagcagcttctccacatgctcttcagtccccaaagttggagaatcccatcaaggagagtagccctgtaaggaattcgaatttccagcatttttcacctctgacagagcccagacaccatgaacgcaagtgaattccgaaggagagggaaggagatggtggattacrtggccaactacatggaaggcattgagggacgccaggtctaccctgacgtggagcccgggtacctgcggccgctgatccctgccgctgcccctcaggagccagacacgtttgaggacatcatcaacgacgttgagaagataatcatgcctggggtgacrcactggcacagcccctacttcttcgcytacttccccactgccagctcgtacccggccatgcttgcggacatgctgtgcggggccattggctgcatcggcttctcctgggcggcaagcccagcatgcacagagctggagactgtgatgatggactggctcgggaagatgctggaactaccaaaggcatttttgaatgagaaagctggagaagggggaggagtgatccagggaagtgccagtgaagccaccctggtggccctgctggccgctcggaccaaagtgatccatcggctgcaggcagcgtccccagagctcacacaggccgctatcatggagaagctggtggcttactcatccgatcaggcacactcctcagtggaaagagctgggttaattggtggagtgaaattaaaagccatccyctcagatggcaacttcgccrtgcgtgcgtctgccctgcaggaagccctggagagagacaaagcggctggcctgattcctttctttatggttgccaccctggggaccacaacatgctgctcctttgacaatctcttagaagtcggtcctatctgcaacaaggaagacatatggctgcacgttgatgcagcctacgcaggcagtgcattcatctgccctgagttccggcaccttctgaatggagtggagtttgcagattcattcaactttaatccccacaaatggctattggtgaattttgactgttctgccatgtgggtgaaaaagagaacagacttaacgggagcctttagactggaccccacttacctgaagcacagccatcaggattcagggcttatcactgactaccggcattggcagataccactgggcagaagatttcgctctttgaaaatgtggtttgtatttaggatgtatggagtcaaaggactgcaggcttatatccgcaagcatgtccagctgtcccatgagtttgagtcactggtgcgccaggatccccgctttgaaatctgtgtggaagtcattctggggcttgtctgctttcggctaaagggttccaacaaagtgaatgaagctcttctgcaaagaataaacagtgccaaaaaaatccacttggttccatgtcacctcagggacaagtttgtcctgcgctttgccatctgttctcgcacggtggaatctgcccatgtgcagcrggcctgggaacacatcaaagagctggcggccgacgtgctgcgagcagagagggagtaggagtgaagccagctgcaggaatcaaaaattgaagagagatatatctgaaaactggaataagaagcaaataaatatcatcctgccttcatggaactcagctgtctgtggcttcccatgtctttctccaaagttatccagagggttgtgattttgtctgcttagtatctcatcaacaaagaaatattatttgctaattaaaaagttaatcttcatggccatagcttttattcattagctgtgatttttgttgattaaaacattatagattttcatgttcttgcagtcatcagaagtggtaggaaagcctcactgatatattttccagggcaatcaatgttcacgcaacttgaaattatatctgtggtcttcaaattgtcttttgtcatgtggctaaatgcctaataaacaattcaagtgaa

SEQ ID NO: 1819 - DNA, 2230 bp, Homo sapiens
gcaatccagtgtgtaggtccagggcgacaagcgctgctcccrtggctggggtaagtccctccagcattcagccttgctccctgtgcttatctggatgcggtgtaggatgaagatgaccctatagaactctaccctggaagtcctggcaaagtggatatgtgacatttttkaaaccagggacatgttggtgctgcttaatatttaaatcataattttcagactcttaaaaattactaaataagtttgaagagacacagccatctgcctacagtgccacccctgagcttcacgccaccctggtctccaggaaaggggagagtctcaggaatattgaatgcagttttcacctctgacagagcccagacaccatgaacgcaagtgaattccgaaggagagggaaggagatggtggattacrtggccaactacatggaaggcattgagggacgccaggtctaccctgacgtggagcccgggtacctgcggccgctgatccctgccgctgcccctcaggagccagacacgtttgaggacatcatcaacgacgttgagaagataatcatgcctggggtgacrcactggcacagcccctacttcttcgcytacttccccactgccagctcgtacccggccatgcttgcggacatgctgtgcggggccattggctgcatcggcttctcctgggcggcaagcccagcatgcacagagctggagactgtgatgatggactggctcgggaagatgctggaactaccaaaggcatttttgaatgagaaagctggagaagggggaggagtgatccagggaagtgccagtgaagccaccctggtggccctgctggccgctcggaccaaagtgatccatcggctgcaggcagcgtccccagagctcacacaggccgctatcatggagaagctggtggcttactcatccgatcaggcacactcctcagtggaaagagctgggttaattggtggagtgaaattaaaagccatccyctcagatggcaacttcgccrtgcgtgcgtctgccctgcaggaagccctggagagagacaaagcggctggcctgattcctttctttatggttgccaccctggggaccacaacatgctgctcctttgacaatctcttagaagtcggtcctatctgcaacaaggaagacatatggctgcacgttgatgcagcctacgcaggcagtgcattcatctgccctgagttccggcaccttctgaatggagtggagtttgcagattcattcaactttaatccccacaaatggctattggtgaattttgactgttctgccatgtgggtgaaaaagagaacagacttaacgggagcctttagactggaccccacttacctgaagcacagccatcaggattcagggcttatcactgactaccggcattggcagataccactgggcagaagatttcgctctttgaaaatgtggtttgtatttaggatgtatggagtcaaaggactgcaggcttatatccgcaagcatgtccagctgtcccatgagtttgagtcactggtgcgccaggatccccgctttgaaatctgtgtggaagtcattctggggcttgtctgctttcggctaaagggttccaacaaagtgaatgaagctcttctgcaaagaataaacagtgccaaaaaaatccacttggttccatgtcacctcagggacaagtttgtcctgcgctttgccatctgttctcgcacggtggaatctgcccatgtgcagcrggcctgggaacacatcaaagagctggcggccgacgtgctgcgagcagagagggagtaggagtgaagccagctgcaggaatcaaaaattgaagagagatatatctgaaaactggaataagaagcaaataaatatcatcctgccttcatggaactcagctgtctgtggcttcccatgtctttctccaaagttatccagagggttgtgattttgtctgcttagtatctcatcaacaaagaaatattatttgctaattaaaaagttaatcttcatggccatagcttttattcattagctgtgatttttgttgattaaaacattatagattttcatgttcttgcagtcatcagaagtggtaggaaagcctcactgatatattttccagggcaatcaatgttcacgcaacttgaaattatatctgtggtcttcaaattgtcttttgtcatgtggctaaatgcctaataaacaattcaagtgaa

SEQ ID NO: 1820 - DNA, 1931 bp, Homo sapiens
ggagagagagaggacagagagcaagtcactcccggctgcctttttcacctctgacagagcccagacaccatgaacgcaagtgaattccgaaggagagggaaggagatggtggattacrtggccaactacatggaaggcattgagggacgccaggtctaccctgacgtggagcccgggtacctgcggccgctgatccctgccgctgcccctcaggagccagacacgtttgaggacatcatcaacgacgttgagaagataatcatgcctggggtgacrcactggcacagcccctacttcttcgcytacttccccactgccagctcgtacccggccatgcttgcggacatgctgtgcggggccattggctgcatcggcttctcctgggcggcaagcccagcatgcacagagctggagactgtgatgatggactggctcgggaagatgctggaactaccaaaggcatttttgaatgagaaagctggagaagggggaggagtgatccagggaagtgccagtgaagccaccctggtggccctgctggccgctcggaccaaagtgatccatcggctgcaggcagcgtccccagagctcacacaggccgctatcatggagaagctggtggcttactcatccgatcaggcacactcctcagtggaaagagctgggttaattggtggagtgaaattaaaagccatccyctcagatggcaacttcgccrtgcgtgcgtctgccctgcaggaagccctggagagagacaaagcggctggcctgattcctttctttatggttgccaccctggggaccacaacatgctgctcctttgacaatctcttagaagtcggtcctatctgcaacaaggaagacatatggctgcacgttgatgcagcctacgcaggcagtgcattcatctgccctgagttccggcaccttctgaatggagtggagtttgcagattcattcaactttaatccccacaaatggctattggtgaattttgactgttctgccatgtgggtgaaaaagagaacagacttaacgggagcctttagactggaccccacttacctgaagcacagccatcaggattcagggcttatcactgactaccggcattggcagataccactgggcagaagatttcgctctttgaaaatgtggtttgtatttaggatgtatggagtcaaaggactgcaggcttatatccgcaagcatgtccagctgtcccatgagtttgagtcactggtgcgccaggatccccgctttgaaatctgtgtggaagtcattctggggcttgtctgctttcggctaaagggttccaacaaagtgaatgaagctcttctgcaaagaataaacagtgccaaaaaaatccacttggttccatgtcacctcagggacaagtttgtcctgcgctttgccatctgttctcgcacggtggaatctgcccatgtgcagcrggcctgggaacacatcaaagagctggcggccgacgtgctgcgagcagagagggagtaggagtgaagccagctgcaggaatcaaaaattgaagagagatatatctgaaaactggaataagaagcaaataaatatcatcctgccttcatggaactcagctgtctgtggcttcccatgtctttctccaaagttatccagagggttgtgattttgtctgcttagtatctcatcaacaaagaaatattatttgctaattaaaaagttaatcttcatggccatagcttttattcattagctgtgatttttgttgattaaaacattatagattttcatgttcttgcagtcatcagaagtggtaggaaagcctcactgatatattttccagggcaatcaatgttcacgcaacttgaaattatatctgtggtcttcaaattgtcttttgtcatgtggctaaatgcctaataaacaattcaagtgaa

SEQ ID NO: 1821 - DNA, 2758 bp, Homo sapiens
ggcctgggcggggcgagcggtgtcagcggcggagccggatgcgggcggcatcgcggcggtcgcggccttggggatgggcggagccccagccgctagtgctggtggccgccgctgctgccccagctggagcccgagccgccgcctctgcgtccgcgcgtcgctgcttcccagggcggcggtatgctggggaaaggagtagtcggcggtggcggcggcaccaaggcccccaagccctccttcgtgtcgtacgtacgccctgaggaaattcacacaaacgaaaaggaagtaacagagaaggaagtaactcttcacttgttgccaggtgaacagctgctttgtgaagccagcacagtactgaagtatgtccaggaagattcctgtcagcatggggtctatgggaggcttgtctgcacagacttcaagattgccttcttgggtgatgatgaatctgcattggataatgatgaaactcaatttaagaataaggttataggagaaaatgacattacactccactgtgttgatcagatttatggagtgtttgatgagaaaaagaaaactctctttggacaactgaagaaataccctgagaagctcatcatccactgcaaagaccttcgagtgttccagttttgtctgaggtacacaaaggaagaggaagtcaaaaggattgtcagtggcataattcatcatacccaggctcctaaactgcttaaacgattatttctgttttcctatgcgactgctgcacaaaacaatacagtcactgatcccaagaaccataccgtaatgtttgacacacttaaggactggtgttgggaactggaacggaccaaaggcaacatgaagtacaaagcagtgagtgtcaacgaaggctataaagtctgtgagagattgccagcatactttgttgtccccacccctcttcctgaagagaatgtgcagcgctttcagggtcatggcataccaatatggtgttggtcctgccacaatggaagtgcccttttgaaaatgtcagcactgcccaaagaacaggatgacggcattttacaaatccaaaagagcttcttagatggaatttacaagaccatccacaggccaccctatgaaattgttaaaacggaagacctgtcaagcaacttcctgtccctgcaggaaatccagactgcatactctaaatttaaacagctatttctgatagataacagtactgaattttgggacacagatataaaatggttttctctgttggaaagtagcagctggcttgacataatcagacgttgcctgaaaaaagcaatagagattacagaatgtatggaagcacaaaacatgaatgttcttcttttagaggagaatgcatccgacctctgctgtctcatttcctctctggtgcaactgatgatggacccccactgcagaaccagaattggtttccagagcctcatccaaaaggagtgggtcatgggtggccactgtttcttggatcgctgcaaccatctccgccagaacgacaaagaggagcatcaacgacaactttctttgccacttacacaatctaagtcatctcccaaaagaggatttttcagggaagaaacagatcatttaattaaaaaccttctgggcaagagaattagcaaacttattaattcttctgatgagctccaagacaactttcgagagttctatgacagctggcatagcaagtccactgactaccatggtttgttgttaccgcatatcgaggggcccgaaatcaaagtctgggcccagcgctacctacgttggattccagaagcccaaatcctaggtggtggccaagtggccactctgagcaaactcttggaaatgatggaggaagtccagagtttacaagagaagatcgacgagagacaccacagccagcaggccccccaggctgaggccccctgcctgctgaggaactctgcccgcctctcgtctttgtttcctttcgctctgctccagcgacattcctctaagcccgtcttacccaccagtggctggaaagctttgggagatgaagacgatttggccaaacgagaagatgagttcgtggacctaggggatgtgtgacctgtttgttgagtgattgtgaaagaggaatgtgggagattgggacagctgatccctggatttgtgtcacgctacagctcatgctggctgggtccttagcccggcactccgttagaataaacctgggccttcgggaaaagaggtggctctcattatttttcatgattctaaaagactatgcaattaaaaccgcatctgtagtattaytaattggaaggaattattacttgacccgtaatagggttgtggccgttttctgatgcctaagtattatacagagcccacaatggccagtttactaccagaaagggcttcagtaagatattcttggacttgatactttcttcagatcctctttgtgccaagataatttatccagtcattgggaatagtaagtttctgtgtaacccatctcaattatagaagcaagttcagctttatgtatttgtatggggagttgaagattcagatagaggtattaagatgtgtggcatttacttaaaccatcacatttttttctttctacgcccccttgcctgtaaaacacctgggaagttccactggtgtcatccatcctgatgcttcagaccaccctcccttcttcacagaccgtgtcactttgcctgtgggtgggggctagccagccaccaccctcttttctgtg

SEQ ID NO: 1822 - DNA, 3088 bp, Homo sapiens
ggcctgggcggggcgagcggtgtcagcggcggagccggatgcgggcggcatcgcggcggtcgcggccttggggatgggcggagccccagccgctagtgctggtggccgccgctgctgccccagctggagcccgagccgccgcctctgcgtccgcgcgtcgctgcttcccagggcggcggtatgctggggaaaggagtagtcggcggtggcggcggcaccaaggcccccaagccctccttcgtgtcgtacgtacgccctgaggaaattcacacaaacgaaaaggaagtaacagagaaggaagtaactcttcacttgttgccaggtgaacagctgctttgtgaagccagcacagtactgaagtatgtccaggaagattcctgtcagcatggggtctatgggaggcttgtctgcacagacttcaagattgccttcttgggtgatgatgaatctgcattggataatgatgaaactcaatttaagaataaggttataggagaaaatgacattacactccactgtgttgatcagatttatggagtgtttgatgagaaaaagaaaactctctttggacaactgaagaaataccctgagaagctcatcatccactgcaaagaccttcgagtgttccagttttgtctgaggtacacaaaggaagaggaagtcaaaaggattgtcagtggcataattcatcatacccaggctcctaaactgcttaaacgattatttctgttttcctatgcgactgctgcacaaaacaatacagtcactgatcccaagaaccataccgtaatgtttgacacacttaaggactggtgttgggaactggaacggaccaaaggcaacatgaagtacaaagcagtgagtgtcaacgaaggctataaagtctgtgagagattgccagcatactttgttgtccccacccctcttcctgaagagaatgtgcagcgctttcagggtcatggcataccaatatggtgttggtcctgccacaatggaagtgcccttttgaaaatgtcagcactgcccaaagaacaggatgacggcattttacaaatccaaaagagcttcttagatggaatttacaagaccatccacaggccaccctatgaaattgttaaaacggaagacctgtcaagcaacttcctgtccctgcaggaaatccagactgcatactctaaatttaaacagctatttctgatagataacagtactgaattttgggacacagatataaaatggttttctctgttggaaagtagcagctggcttgacataatcagacgttgcctgaaaaaagcaatagagattacagaatgtatggaagcacaaaacatgaatgttcttcttttagaggagaatgcatccgacctctgctgtctcatttcctctctggtgcaactgatgatggacccccactgcagaaccagaattggtttccagagcctcatccaaaaggagtgggtcatgggtggccactgtttcttggatcgctgcaaccatctccgccagaacgacaaagaggaggttcctgtgttcctgcttttcctagattgtgtctggcagctggtgcaccagcatcccccggcatttgaattcacagagacttacctgactgttttgtcagatagcctgtatatacctatttttagcaccttcttcttcaattcacctcatcaaaaagatactaacatgggtagagaaggccaggatacacaaagcaagcctttgaatctgctcaccgtgtgggattggtcggtgcagtttgaacccaaagcccagacattgctcaaaaaccctctttatgtggaaaagccaaaactggacaaaggccaacggaaaggaatgcgcttcaaacatcaacgacaactttctttgccacttacacaatctaagtcatctcccaaaagaggatttttcagggaagaaacagatcatttaattaaaaaccttctgggcaagagaattagcaaacttattaattcttctgatgagctccaagacaactttcgagagttctatgacagctggcatagcaagtccactgactaccatggtttgttgttaccgcatatcgaggggcccgaaatcaaagtctgggcccagcgctacctacgttggattccagaagcccaaatcctaggtggtggccaagtggccactctgagcaaactcttggaaatgatggaggaagtccagagtttacaagagaagatcgacgagagacaccacagccagcaggccccccaggctgaggccccctgcctgctgaggaactctgcccgcctctcgtctttgtttcctttcgctctgctccagcgacattcctctaagcccgtcttacccaccagtggctggaaagctttgggagatgaagacgatttggccaaacgagaagatgagttcgtggacctaggggatgtgtgacctgtttgttgagtgattgtgaaagaggaatgtgggagattgggacagctgatccctggatttgtgtcacgctacagctcatgctggctgggtccttagcccggcactccgttagaataaacctgggccttcgggaaaagaggtggctctcattatttttcatgattctaaaagactatgcaattaaaaccgcatctgtagtattaytaattggaaggaattattacttgacccgtaatagggttgtggccgttttctgatgcctaagtattatacagagcccacaatggccagtttactaccagaaagggcttcagtaagatattcttggacttgatactttcttcagatcctctttgtgccaagataatttatccagtcattgggaatagtaagtttctgtgtaacccatctcaattatagaagcaagttcagctttatgtatttgtatggggagttgaagattcagatagaggtattaagatgtgtggcatttacttaaaccatcacatttttttctttctacgcccccttgcctgtaaaacacctgggaagttccactggtgtcatccatcctgatgcttcagaccaccctcccttcttcacagaccgtgtcactttgcctgtgggtgggggctagccagccaccaccctcttttctgtg

SEQ ID NO: 1823 - DNA, 2936 bp, Homo sapiens
ggaatggcactcagggcaaaggcagaggtgtgcgtggcagcgccctggctgtccctgcaaagggcacgggcactgggcactagagccrctcrggcccctaggacggtgctgccrtttgaagccatgccccagcatccaggcaacaggtggctgaggctgctgcagatctggagggagcagggttatgagcacctgcacctggagatgcaccagaccttccaggagctggggcccattttcaggtacaayttgggaggaccacgcatggtgtgtgtgatgctgccggaggatgtggagaagctgcaacaggtggacagcctgcatccctgcaggatgatcctggagccctgggtggcctacagacaacatcgtgggcacaaatgtggcgtgttcttgttgaatgggcctgaatggcgcttcaaccgattgcggctgaacccagawgtgctgtcgcccaasgccgtgcagaggttcctcccgatggtggatgcagtggccagggacttctcccaggccctgargaagaaggtgctgcagaacgcccgggggagcctgaccctggacgtccagcccagcatcttccactacaccatagaagccagcaacttagctctttttggagagcggctgggcctggttggccacagccccagttctgccagcctgaacttcctccatgccctggaggtcatgttcaaatccaccgtccagctcatgttcatgcccaggagcctgtctcgctggatcagccccaaggtgtggaagkagcactttgaggcctgggactgcatcttccagtacggtgacaactgtatccagaaaatctaycaggaactggccttcarccgccctcaacactacacaggcatcgtggcrgagctcctgttgaaggcrgaactgtcactagaagccatcaaggccaactctatggaactcactgcagggagcgtggacacgacagcgtttcccttgctgatgacgctctttgagctggctcggaaccccgacgtgcagcagaycctgcgccaggagagcctggccgccgcagccagcatcagtgaacatccccagaaggcaaccaccgagctgcccttgctgcgggcggccctcaaggagaccttgmggctctaccctgtgggtctgtttttggwgcgagtggtgagctcagacttrgtgcttcagaactaccacatcccagctgggacattggwacaggttttcctctactcgctgggtcgcaatgccgccttgttcccgaggcctgagcggtataatccccagcgctggctagacatcaggggctccrgcaggaacttccaccacgtgccctttggctttggcatgcgccagtgcctygggcggcgcctggcagaggcagagatgcygctgctgctgcaccacgtgctgaagcacttcctggtggagacactaactcaagaggacataaagatggtctacagcktcatattgaggcctggcacgtcccccctcctcactttcagagcgattaactagtcttgcatctgcacccagggtcccagcctggccaccagcttccctctgcctgaccccaggccacctgtcttctctcccacrtgcacagcttcctgagtcacccctctgtccagccagctcctgcacaaatggaactccccagggcctccaggactggggcttgccaggcttgtcaaatagcaaggccagggcacagctggagacgatcttgctggcagggcctggccttgtccccagccccacctggccccttctccagcaagcagtgccctctggacagcttgactctactcccagcgctggctccaggctcctcatgaggccatgcaagggtgctgtgattttgtcccttgccttcctgcctagtctcacatgtccctgtccctctcgccctggccagggcctctgtgcagacagtgtcagagtcattaagcgggatcccagcatctcagagtccagtcaagttccctcctgcagcctgaccccaggcagctcgagcatgccctgagctctctgaaagttgtcaccctgkaataygatcctgcagggtagactaaaaaggcccctgtggtcacttatcctgacacattttcaagtgatacaactgagtctcgaggggcgtgtgttccccagctgatcatgtcagcctcatgccccaggcctcrtctttcatggaccaggycttgttcaagcagcgagtgttgggtcctctgcttcctgwgctgtcccctggrgaaggtcccraggatgctgtcaggagatggaagagtcatgtggggtgggaacctggggtgtggttccagaaatgtttttggcaacaggagagacaggattgggccaacaaggactcagatgagttttattgactcattcctctggttgatacggagccatgtcatgtgccacgacctggggtgggcacagggaggctgcagttccctacgtgaacctgccttgggcctcatctgctcctagcccagcagagagagttgacccctcctgaactggccactccccagtgctcctgtgcagggataggaagtgccccagggtgagaacgtgcccagccacatcatctttatctcctgggattttcattagggcaaagatctcagcagccagctcctggtagctgatgaggatcagagcgtttgttcccccatgaaaggggaaatacytaggtaatcattccaggtgtgttcagtagttccaggactcagggactcaggccagtcaccctgtgaccgcaggttgctttcccaccctgggcaatgcagtgcagcatgggaaaggaataagggggcaacaaggtgcacagacctcagagatggcttccttgtttatggggctctcacagatacccatccaactcctctagtcagcactagatcatgggatcctaaaataaaccttggaaaaat

SEQ ID NO: 1824 - DNA, 4013 bp, Homo sapiens
tgggcaggccgtggtcccagttgagaagctgtgcccccttgggtgttttggaggttcagggtgggtgctgaaaagccctgagggagagcagaaggctcgggggcctgtctagggcatggcatcccacgtgggtgtcagcacggccgcagaagaaccacttctctggcccacccatgcctgctaggccatgcttcttcagaagtggccacaactctcctgacgtctccagagccggtcattccacccagggggacttcagctgccactggacacttcaattgtacgctgcgaccagttgccaggaaggagagggctggcaagagagccgcggcagccgtggcagggtgtaggggayggtggacggccagggccccccccyctctctctttctctctctctctcttgcttggtttctgtaatgaggaagttctccgcagctcagtttcctttccctcactgagcgcctgaaacaggaagtcagtcagttaagctggtggcagcagccgaggccaccaagaggcaacgggcggcaggttgcagtggaggggcctccgctcccctcggtggtgtgtgggtcctgggggtgcctgccggcccrgccgaggaggcccacgcccaccatggtcccctgctggaaccatggcaacatcacccgctccaaggcggaggagctgctttccaggacaggcaaggacgggagcttcctcgtgcgtgccagcgagtccatctcccgggcatacgcgctctgcgtgctgtatcggaattgcgtttacacttacagaattctgcccaatgaagatgataaattcactgttcaggcatccgaaggcgtctccatgaggttcttcaccaagctggaccagctcatcgagttttacaagaaggaaaacatggggctggtgacccatctgcaataccctgtgccgctggaggaagaggacacaggcgacgaccctgaggaggacacagggcttccagaagagcatcttaaggccatccaagattatttaagcactcagctcgcccaggactctgaatttgtgaagacagggtccagcagtcttcctcacctgaagaaactgaccacactgctctgcaaggagctctatggagaagtcatccggaccctcccatccctggagtctctgcagaggttatttgaccagcagctctccccgggcctccgtccacgtcctcaggttcctggtgaggccaatcccatcaacatggtgtccaagctcagccaactgacaagcctgttgtcrtccattgaagacaaggtcaaggccttgctgcacgagggtcctgagtctccgcaccggccctcccttatccctccagtcacctttgaggtgaaggcagagtctctggggattcctcagaaaatgcagctcaaagtcgacgttgagtctgggaaactgatcattaagaagtccaaggatggttctgaggacaagttctacagccacaagaaaatcctgcagctsattaagtcacagaaatttctgaataagttggtgatcttggtggaaacrgagaaggagaagatcctgcggaaggaatatgtttttgctgactccaaaaagagagaaggcttctgccagctcctgcagcagatgaagaacaagcactcagagcagccggagcccgacatgatcaccatcttcatcggcacctggaacatgggtaacgccccccctcccaagaagatcacgtcctggtttctctccaaggggcagggaaagacgcgggacgactctgcggactacatcccccatgacatttacgtgatcggcacccaagaggaccccctgagtgagaaggagtggctggagatcctcaaacactccctgcaagaaatcaccagtgtgacttttaaaacagtcgccatccacacgctctggaacatccgcatcgtggtgctggccaagcctgagcacgagaaccggatcagccacatctgtactgacaacgtgaagacaggcattgcaaacacactggggaacaagggagccgtgggggtgtcgttcatgttcaatggaacctccttagggttcgtcaacagccacttgacttcaggaagtgaaaagaaactcaggcgaaaccaaaactatatgaacattctccggttcctggccctgggcgacaagaagctgagtccctttaacatcactcaccgcttcacgcacctcttctggtttggggatcttaactaccgtgtggatctgcctacctgggaggcagaaaccatcatccagaaaatcaagcagcagcagtacgcagacctcctgtcccacgaccagctgctcacagagaggagggagcagaaggtcttcctacacttcgaggaggaagaaatcacgtttgccccaacctaccgttttgagagactgactcgggacaaatacgcctacaccaagcagaaagcgacagggatgaagtacaacttgccttcctggtgtgaccgagtcctctggaagtcttatcccctggtgcacgtggtgtgtcagtcttatggcagtaccagcgacatcatgacgagtgaccacagccctgtctttgccacatttgaggcaggagtcacttcccagtttgtctccaagaacggtcccgggactgttgacagccaaggacagattgagtttctcaggtgctatgccacattgaagaccaagtcccagaccaaattctacctggagttccactcgagctgcttggagagttttgtcaagagtcaggaaggagaaaatgaagaaggaagtgagggggagctggtggtgaagtttggtgagactcttccaaagctgaagcccattatctctgaccctgagtacctgctagaccagcacatcctcatcagcatcaagtcctctgacagcgacgaatcctatggcgagggctgcattgcccttcggttagaggccacagaaacgcagctgcccatctacacgcctctcacccaccatggggagttgacaggccacttccagggggagatcaagctgcagacctctcagggcaagacgagggagaagctctatgactttgtgaagacggagcgtgatgaatccagtgggccaaagaccctgaagagcctcaccagccacgaccccatgaagcagtgggaagtcactagcagggcccctccgtgcagtggctccagcatcactgaaatcatcaaccccaactacatgggagtggggccctttgggccaccaatgcccctgcacgtgaagcagaccttgtcccctgaccagcagcccacagcctggagctacgaccagccgcccarggactccccgctggggccctgcaggggagaaagtcctccgacacctcccggccagccgcccatatcacccaagaagtttttaccctcaacagcaaaccggggtctccctcccaggacacaggagtcaaggcccagtgacctggggaagaacgcaggggacacgctgcctcaggaggacctgccgctgacgaagcccgagatgtttgagaaccccctgtatgggtccctgagttccttccctaagcctgctcccaggaaggaccaggaatcccccaaaatgccgcggaaggaacccccgccctgcccggaacccggcatcttgtcgcccagcatcgtgctcaccaaagcccaggaggctgatcgcggcgaggggcccggcaagcaggtgcccgcgccccggctgcgctccttcacrtgctcatcctctgccgagggcagggcggccggcggggacaagagccaagggaagcccaagaccccggtcagctcccaggccccggtgccggccaagaggcccatcaagccttccagatcggaaatcaaccagcagacccygcccaccccgacgccgcggccgccgctgccagtcaagagcccggcggtgctgcacctccagcactccaagggccgcgactaccgcgacaacaccgagctcccgyatcacggcaagcaccggccggaggaggggccaccagggcctctaggcaggactgccatgcag

SEQ ID NO: 1825 - DNA, 2099 bp, Homo sapiens
tgggcaggccgtggtcccagttgagaagctgtgcccccttgggtgttttggaggttcagggtgggtgctgaaaagccctgagggagagcagaaggctcgggggcctgtctagggcatggcatcccacgtgggtgtcagcacggccgcagaagaaccacttctctggcccacccatgcctgctaggccatgcttcttcagaagtggccacaactctcctgacgtctccagagccggtcattccacccagggggacttcagctgccactggacacttcaattgtacgctgcgaccagttgccaggaaggagagggctggcaagagagccgcggcagccgtggcagggtgtaggggayggtggacggccagggccccccccyctctctctttctctctctctctcttgcttggtttctgtaatgaggaagttctccgcagctcagtttcctttccctcactgagcgcctgaaacaggaagtcagtcagttaagctggtggcagcagccgaggccaccaagaggcaacgggcggcaggttgcagtggaggggcctccgctcccctcggtggtgtgtgggtcctgggggtgcctgccggcccrgccgaggaggcccacgcccaccatggtcccctgctggaaccatggcaacatcacccgctccaaggcggaggagctgctttccaggacaggcaaggacgggagcttcctcgtgcgtgccagcgagtccatctcccgggcatacgcgctctgcgtgctgtatcggaattgcgtttacacttacagaattctgcccaatgaagatgataaattcactgttcaggtgagtcctttataaacctagaaatctgaacctgacttcagccgatactggcagagaaagggtgtaaacgatgaggaaggaagtgcacgcgcaggtagccggacgtgaaggcctggctgagcctggcttcctcccaggtgtccatggggtggcttagctggtaaactggggccctccaagtgaccctgctctgtgacatgayggagttgcatgccacaggctatttgtggtccataggtgtgaagaggaaacgaaggtgaagcagactgtccagagatgaagggaaaggaggggctgtggcttggccgactgttgtcttcagtctctcaaaggagagagaggaagtggctcaggagggaragaagggaggtgaacttacaggagaacagaccgtacgggcaaatcatctgagtccaggagttttagaccagcctgggcaacatggcaaaattccgcctctacaaaaaatacaaaaaatttagccaaacgtggtgatgcatgcctatagtcccaggtacttgggggggctgaggtgtgaggatcgctggagcctgtgaggttgaggctgccatgagctgtgatcatgccactgcgctccagcctggacaacagagtgagactctgtcttgaaaaaaaaaaaaaaaaagaacaatgtaataacatttttcctcaaactctcacccactttgtttagcatgtattgacgattcttgcctgaatcagtcattactatgatgattgccaaatggtgactgtttttgttgtcgcttcgacggttattaattggcattccactgtggggaggagccgtcccttctcctttatttatgtcagtacagactcatgaatttctattttattcgatggattataattatttttattattcattttgatgtttgaattgtgctggatgcacctttcaactgttccttcagttggctcctggctcctgtatctgtttgacaaatcgccattattttagcattttcttgctttctggggcaacaggtgttgcaggtacttgttagatcttcttggcctcgattcaaaggctgctagaatcagccatttctcaaggagcactggctatctttcatggaggatgacatttagcagccaagatctgagcagcaggtgttctcattgctgttggagtgttgtgggctctcgcagcagacagagtgaggaaatagtgtgtgcacatacactcattcatgcacctgtatttatctatatatctttttttwaaaaaataccgmatctcactctgttgcctag

SEQ ID NO: 1826 - DNA, 4191 bp, Homo sapiens
cctcatctctggctagagcccgtgctgccatggaagactctttccggtgcccactaatccttgatgttcaccttgtcccctgcccccagagaagtcatccggaccctcccatccctggagtctctgcagaggttatttgaccagcagctctccccgggcctccgtccacgtcctcaggttcctggtgaggccaatcccatcaacatggtgtccaagctcagccaactgacaagcctgttgtcrtccattgaagacaaggtcaaggccttgctgcacgagggtcctgagtctccgcaccggccctcccttatccctccagtcacctttgaggtgaaggcagagtctctggggattcctcagaaaatgcagctcaaagtcgacgttgagtctgggaaactgatcattaagaagtccaaggatggttctgaggacaagttctacagccacaagaaaatcctgcagctsattaagtcacagaaatttctgaataagttggtgatcttggtggaaacrgagaaggagaagatcctgcggaaggaatatgtttttgctgactccaaaaagagagaaggcttctgccagctcctgcagcagatgaagaacaagcactcagagcagccggagcccgacatgatcaccatcttcatcggcacctggaacatgggtaacgccccccctcccaagaagatcacgtcctggtttctctccaaggggcagggaaagacgcgggacgactctgcggactacatcccccatgacatttacgtgatcggcacccaagaggaccccctgagtgagaaggagtggctggagatcctcaaacactccctgcaagaaatcaccagtgtgacttttaaaacagtcgccatccacacgctctggaacatccgcatcgtggtgctggccaagcctgagcacgagaaccggatcagccacatctgtactgacaacgtgaagacaggcattgcaaacacactggggaacaagggagccgtgggggtgtcgttcatgttcaatggaacctccttagggttcgtcaacagccacttgacttcaggaagtgaaaagaaactcaggcgaaaccaaaactatatgaacattctccggttcctggccctgggcgacaagaagctgagtccctttaacatcactcaccgcttcacgcacctcttctggtttggggatcttaactaccgtgtggatctgcctacctgggaggcagaaaccatcatccagaaaatcaagcagcagcagtacgcagacctcctgtcccacgaccagctgctcacagagaggagggagcagaaggtcttcctacacttcgaggaggaagaaatcacgtttgccccaacctaccgttttgagagactgactcgggacaaatacgcctacaccaagcagaaagcgacagggatgaagtacaacttgccttcctggtgtgaccgagtcctctggaagtcttatcccctggtgcacgtggtgtgtcagtcttatggcagtaccagcgacatcatgacgagtgaccacagccctgtctttgccacatttgaggcaggagtcacttcccagtttgtctccaagaacggtcccgggactgttgacagccaaggacagattgagtttctcaggtgctatgccacattgaagaccaagtcccagaccaaattctacctggagttccactcgagctgcttggagagttttgtcaagagtcaggaaggagaaaatgaagaaggaagtgagggggagctggtggtgaagtttggtgagactcttccaaagctgaagcccattatctctgaccctgagtacctgctagaccagcacatcctcatcagcatcaagtcctctgacagcgacgaatcctatggcgagggctgcattgcccttcggttagaggccacagaaacgcagctgcccatctacacgcctctcacccaccatggggagttgacaggccacttccagggggagatcaagctgcagacctctcagggcaagacgagggagaagctctatgactttgtgaagacggagcgtgatgaatccagtgggccaaagaccctgaagagcctcaccagccacgaccccatgaagcagtgggaagtcactagcagggcccctccgtgcagtggctccagcatcactgaaatcatcaaccccaactacatgggagtggggccctttgggccaccaatgcccctgcacgtgaagcagaccttgtcccctgaccagcagcccacagcctggagctacgaccagccgcccarggactccccgctggggccctgcaggggagaaagtcctccgacacctcccggccagccgcccatatcacccaagaagtttttaccctcaacagcaaaccggggtctccctcccaggacacaggagtcaaggcccagtgacctggggaagaacgcaggggacacgctgcctcaggaggacctgccgctgacgaagcccgagatgtttgagaaccccctgtatgggtccctgagttccttccctaagcctgctcccaggaaggaccaggaatcccccaaaatgccgcggaaggaacccccgccctgcccggaacccggcatcttgtcgcccagcatcgtgctcaccaaagcccaggaggctgatcgcggcgaggggcccggcaagcaggtgcccgcgccccggctgcgctccttcacrtgctcatcctctgccgagggcagggcggccggcggggacaagagccaagggaagcccaagaccccggtcagctcccaggccccggtgccggccaagaggcccatcaagccttccagatcggaaatcaaccagcagacccygcccaccccgacgccgcggccgccgctgccagtcaagagcccggcggtgctgcacctccagcactccaagggccgcgactaccgcgacaacaccgagctcccgyatcacggcaagcaccggccggaggaggggccaccagggcctctaggcaggactgccatgcagtgaagccytcagtgagctgccactgagtcgggagcccagaggaacsgcgtgaagccactggaccctctcccgggacctcctgctggctcctcctgcccagcttcctatgcaaggctttgtgttttcaggaaagggcctagcttctgtgtggcccacagagttcactgcctgtgagacttagcaccaagtgctgaggctggaagaaaaacgcacaccagacrggcaacaaacagtctgggtccccagctygctcttggtacttgggaccccagtgcctygttgagggcgccattctgaagaaaggaactgcagcgccgatttgagggtggagatatagataataataatattaataataataatggccacatggatcgaacactcatgrtgtgccaagtgctgtgctaagtgctttacgaacattcgtcatatcaggatgacctcgagagctgaggctctagccacctaaaaccacgtgcccaaacccaccagtttaaaacggtgtgtgttcggaggggtgaaagcattaagaagcccagtgccctcctggagtgagacaagggctcggccttaaggagctgaagagtctgggtagcttgtttagggtacaagaagcctgttctgtccagcttcagtgacacaagctgctttagctaaagtcccgcgggttccggcatggctaggctgagagcagggatctacctggcttctcagttctttggttggaaggagcaggaaatcagctcctattctccagtggagagatctggcctcagcttgggctagagatgccaaggcctgtgccaggttccctgtgccctcctcgaggtgggcagccatcaccagccacagttaagccaagccccccaacatgtattccatcgtgctggtagaagagtctttgctgttgctcccgaaagccgtgctctccagcctggctgccagggagggtgggcctcttggttccaggctcttgaaatagtgcagccttttcttcctatctctgtggctttcagctctgcttccttggttattaggagaatagatgggtgatgtctttccttatgttgctttttcaacatagcagaattaatgtagggagctaaatccagtggtgtgtgtgaatgcagaagggaatgcaccccacattcccatgatggaagtctgcgtaaccaataaattgtgcctttctcactcagc

SEQ ID NO: 1827 - DNA, 5213 bp, Homo sapiens
tgggcaggccgtggtcccagttgagaagctgtgcccccttgggtgttttggaggttcagggtgggtgctgaaaagccctgagggagagcagaaggctcgggggcctgtctagggcatggcatcccacgtgggtgtcagcacggccgcagaagaaccacttctctggcccacccatgcctgctaggccatgcttcttcagaagtggccacaactctcctgacgtctccagagccggtcattccacccagggggacttcagctgccactggacacttcaattgtacgctgcgaccagttgccaggaaggagagggctggcaagagagccgcggcagccgtggcagggtgtaggggayggtggacggccagggccccccccyctctctctttctctctctctctcttgcttggtttctgtaatgaggaagttctccgcagctcagtttcctttccctcactgagcgcctgaaacaggaagtcagtcagttaagctggtggcagcagccgaggccaccaagaggcaacgggcggcaggttgcagtggaggggcctccgctcccctcggtggtgtgtgggtcctgggggtgcctgccggcccrgccgaggaggcccacgcccaccatggtcccctgctggaaccatggcaacatcacccgctccaaggcggaggagctgctttccaggacaggcaaggacgggagcttcctcgtgcgtgccagcgagtccatctcccgggcatacgcgctctgcgtgctgtatcggaattgcgtttacacttacagaattctgcccaatgaagatgataaattcactgttcaggcatccgaaggcgtctccatgaggttcttcaccaagctggaccagctcatcgagttttacaagaaggaaaacatggggctggtgacccatctgcaataccctgtgccgctggaggaagaggacacaggcgacgaccctgaggaggacacagggcttccagaagagcatcttaaggccatccaagattatttaagcactcagctcgcccaggactctgaatttgtgaagacagggtccagcagtcttcctcacctgaagaaactgaccacactgctctgcaaggagctctatggagaagtcatccggaccctcccatccctggagtctctgcagaggttatttgaccagcagctctccccgggcctccgtccacgtcctcaggttcctggtgaggccaatcccatcaacatggtgtccaagctcagccaactgacaagcctgttgtcrtccattgaagacaaggtcaaggccttgctgcacgagggtcctgagtctccgcaccggccctcccttatccctccagtcacctttgaggtgaaggcagagtctctggggattcctcagaaaatgcagctcaaagtcgacgttgagtctgggaaactgatcattaagaagtccaaggatggttctgaggacaagttctacagccacaagaaaatcctgcagctsattaagtcacagaaatttctgaataagttggtgatcttggtggaaacrgagaaggagaagatcctgcggaaggaatatgtttttgctgactccaaaaagagagaaggcttctgccagctcctgcagcagatgaagaacaagcactcagagcagccggagcccgacatgatcaccatcttcatcggcacctggaacatgggtaacgccccccctcccaagaagatcacgtcctggtttctctccaaggggcagggaaagacgcgggacgactctgcggactacatcccccatgacatttacgtgatcggcacccaagaggaccccctgagtgagaaggagtggctggagatcctcaaacactccctgcaagaaatcaccagtgtgacttttaaaacagtcgccatccacacgctctggaacatccgcatcgtggtgctggccaagcctgagcacgagaaccggatcagccacatctgtactgacaacgtgaagacaggcattgcaaacacactggggaacaagggagccgtgggggtgtcgttcatgttcaatggaacctccttagggttcgtcaacagccacttgacttcaggaagtgaaaagaaactcaggcgaaaccaaaactatatgaacattctccggttcctggccctgggcgacaagaagctgagtccctttaacatcactcaccgcttcacgcacctcttctggtttggggatcttaactaccgtgtggatctgcctacctgggaggcagaaaccatcatccagaaaatcaagcagcagcagtacgcagacctcctgtcccacgaccagctgctcacagagaggagggagcagaaggtcttcctacacttcgaggaggaagaaatcacgtttgccccaacctaccgttttgagagactgactcgggacaaatacgcctacaccaagcagaaagcgacagggatgaagtacaacttgccttcctggtgtgaccgagtcctctggaagtcttatcccctggtgcacgtggtgtgtcagtcttatggcagtaccagcgacatcatgacgagtgaccacagccctgtctttgccacatttgaggcaggagtcacttcccagtttgtctccaagaacggtcccgggactgttgacagccaaggacagattgagtttctcaggtgctatgccacattgaagaccaagtcccagaccaaattctacctggagttccactcgagctgcttggagagttttgtcaagagtcaggaaggagaaaatgaagaaggaagtgagggggagctggtggtgaagtttggtgagactcttccaaagctgaagcccattatctctgaccctgagtacctgctagaccagcacatcctcatcagcatcaagtcctctgacagcgacgaatcctatggcgagggctgcattgcccttcggttagaggccacagaaacgcagctgcccatctacacgcctctcacccaccatggggagttgacaggccacttccagggggagatcaagctgcagacctctcagggcaagacgagggagaagctctatgactttgtgaagacggagcgtgatgaatccagtgggccaaagaccctgaagagcctcaccagccacgaccccatgaagcagtgggaagtcactagcagggcccctccgtgcagtggctccagcatcactgaaatcatcaaccccaactacatgggagtggggccctttgggccaccaatgcccctgcacgtgaagcagaccttgtcccctgaccagcagcccacagcctggagctacgaccagccgcccarggactccccgctggggccctgcaggggagaaagtcctccgacacctcccggccagccgcccatatcacccaagaagtttttaccctcaacagcaaaccggggtctccctcccaggacacaggagtcaaggcccagtgacctggggaagaacgcaggggacacgctgcctcaggaggacctgccgctgacgaagcccgagatgtttgagaaccccctgtatgggtccctgagttccttccctaagcctgctcccaggaaggaccaggaatcccccaaaatgccgcggaaggaacccccgccctgcccggaacccggcatcttgtcgcccagcatcgtgctcaccaaagcccaggaggctgatcgcggcgaggggcccggcaagcaggtgcccgcgccccggctgcgctccttcacrtgctcatcctctgccgagggcagggcggccggcggggacaagagccaagggaagcccaagaccccggtcagctcccaggccccggtgccggccaagaggcccatcaagccttccagatcggaaatcaaccagcagacccygcccaccccgacgccgcggccgccgctgccagtcaagagcccggcggtgctgcacctccagcactccaagggccgcgactaccgcgacaacaccgagctcccgyatcacggcaagcaccggccggaggaggggccaccagggcctctaggcaggactgccatgcagtgaagccytcagtgagctgccactgagtcgggagcccagaggaacsgcgtgaagccactggaccctctcccgggacctcctgctggctcctcctgcccagcttcctatgcaaggctttgtgttttcaggaaagggcctagcttctgtgtggcccacagagttcactgcctgtgagacttagcaccaagtgctgaggctggaagaaaaacgcacaccagacrggcaacaaacagtctgggtccccagctygctcttggtacttgggaccccagtgcctygttgagggcgccattctgaagaaaggaactgcagcgccgatttgagggtggagatatagataataataatattaataataataatggccacatggatcgaacactcatgrtgtgccaagtgctgtgctaagtgctttacgaacattcgtcatatcaggatgacctcgagagctgaggctctagccacctaaaaccacgtgcccaaacccaccagtttaaaacggtgtgtgttcggaggggtgaaagcattaagaagcccagtgccctcctggagtgagacaagggctcggccttaaggagctgaagagtctgggtagcttgtttagggtacaagaagcctgttctgtccagcttcagtgacacaagctgctttagctaaagtcccgcgggttccggcatggctaggctgagagcagggatctacctggcttctcagttctttggttggaaggagcaggaaatcagctcctattctccagtggagagatctggcctcagcttgggctagagatgccaaggcctgtgccaggttccctgtgccctcctcgaggtgggcagccatcaccagccacagttaagccaagccccccaacatgtattccatcgtgctggtagaagagtctttgctgttgctcccgaaagccgtgctctccagcctggctgccagggagggtgggcctcttggttccaggctcttgaaatagtgcagccttttcttcctatctctgtggctttcagctctgcttccttggttattaggagaatagatgggtgatgtctttccttatgttgctttttcaacatagcagaattaatgtagggagctaaatccagtggtgtgtgtgaatgcagaagggaatgcaccccacattcccatgatggaagtctgcgtaaccaataaattgtgcctttctcactcagc

SEQ ID NO: 1828 - DNA, 6723 bp, Homo sapiens
ggtgctgcggctcagctgataattgaaggaacccggagccgccgccgccgcgccgctggggggggtggggggagctagtggaagttactgccgcgccaccgagtccggaccggagactttggggcctaactagtgaatggtagtgtctagaaagggtatgtcccttcaagagagaggtgccaatgtccaaccggcctaataacaatccaggggggtcactgcgacgttcacagaggaacactgccggggcccaaccacaagacgactcaataggaggaagaagctgcagttcatcatctgctgtgatagttccacaaccagaggatccagacagagccaatacttcagaaagacaaaaaacggggcaggtgcctaagaaagacaattctcgaggagtgaagcgcagtgctagtccagactacaacaggaccaattctcctagctctgcaaaaaaaccaaaagcacttcagcatactgaatctccctcagaaacaaataagccacatagtaagtcaaagaagagacatttagaccaggagcaacaactgaaatctgcacaatcaccatcaacaagcaaggctcataccaggaagagtggggccactggcggttcacggagtcagaaaagaaaaaggacagagagttcttgtgtaaagagtggctccgggtctgaatcaactggtgcagaagagagatctgcgaaacctaccaagctggcttcaaaatcagccacctcagccaaagctgggtgtagcaccatcactgattcttcttctgctgcctctacttcctcstcgtcttctgctgtagcctcggcctcctccactgtaccaccaggtgccagagtgaaacaaggaaaagatcagaacaaggccaggcgttcccgttcagcgtccagtcccagccccagaagaagtagcagggaaaaggaacagagtaaaactggtggctcttcaaaatttgattgggctgctcgtttcagccctaaagttagccttcctaaaacaaaactgtctcttccagggtcttctaagtcagagacatcaaaacctggaccttctggattacaggccaaattagcaagkttaagaaaatctacgaagaaacgcagtgagtctccacctgctgagctccccagtttgaggcggagcacacgccaaaagaccacgggctcctgtgctagtaccagtcggcgaggctctggcctgggcaaaagaggagcagctgaagctcgtcgacaggagaaaatggcagaccctgaaagcaaccaggaggcagtaaattcttcagctgctcggacagatgaagctccccaaggagctgcaggggctgttggcatgaccacctctggggagagtgaatcagatgattccgagatgggacgtttgcaagctttgttagaggcaaggggtcttccccctcacctatttggtcctcttggtcctcggatgtcacagcttttccatagaacaattggaagtggagctagttctaaggcccagcagctactacaaggwttgcaagccagtgatgaaagtcaacagcttcaggcagttattgagatgtgtcagttactggtcatgggaaatgaggagacactgggagggtttcctgtcaagagtgttgttccagctttgattacgttacttcagatggagcacaattttgatattatgaaccatgcttgtcgagccttaacatacatgatggaagcacttcctcgatcttctgctgttgtagtagatgctattcctgtctttttagaaaagctgcaagttattcagtgtattgatgtggcagagcaggccttgactgccttggagatgttgtcacggagacatagtaaagccattctacaggcgggtggtttggcagactgcttgctgtacctagaattcttcagcataaatgcccaaagaaatgcattagcaattgcagctaattgctgccagagtatcacgccagatgaatttcattttgtggcagattcactcccattgctaacccaaaggctaacacatcaggataaaaagtcagtagaaagcacttgcctttgttttgcacgcctagtggacaacttccagcatgaggagaatttactccagcaggttgcttccaaagatctgcttacaaatgttcaacagctgttggtagtgactccacccattttaagttctgggatgtttataatggtggttcgcatgttttctctgatgtgttccaactgtccaactttagctgttcaacttatgaaacaaaacattgcagaaacgcttcactttctcctgtgtggtgcctccaatggaagttgtcaggaacagattgatcttgttccacgaagccctcaagagttgtatgaactgacatctctgatttgtgaacttatgccatgtttaccaaaagaaggcatttttgcagttgataccatgttgaagaagggaaatgcacagaacacagatggtgcgatatggcagtggcgtgatgatcggggcctctggcatccatataacaggattgacagccggatcattgagcaaatcaatgaggacacgggaacagcacgtgccattcagagaaaacctaacccgttagccaatagtaacactagtggatattcagagtcaaagaaggatgatgctcgagcacagcttatgaaagaggatccggaactggctaagtcttttattaagacrttatttggtgttctttatgaagtgtatagttcctcagcaggacctgcggtcagacataagtgccttagagcaattcttaggataatttattttgcggatgctgaacttctgaaggatgttctgaaaaatcatgctgtttcaagtcacattgcttccatgctgtcaagccaagacctgaagatagtagtgggagcacttcagatggcagaaattttaatgcagaagttacctgatatttttagtgtttacttcagaagagaaggtgtaatgcatcaagtaaaacacttagcagaatcagagtctttgttgacaagtccaccaaaggcatgtacgaatggatcgggatccatgggatccacaacttcagtcagcagtgggacagccacagctgccactcatgctgcagctgacttgggatcacccagcttgcagcacagcagggatgattctttagatctcagccctcaaggtcgattaagtgatgttctaaagagaaaacgactgccaaaacgagggccaagaaggccaaagtactcacctccaagagatgatgacaaagtagacaatcaagctaaaagccccaccactactcagtcacctaaatcttctttcctggcaagcttgaatccaaaaacatggggaaggttaagtacacagtccaacagcaacaacattgagccagcacggactgcgggaggtagtggccttgccagggctgcctcaaaggataccatctccaataatagagaaaaaattaaaggttggattaaggagcaggcacataaatttgtagaacgttatttcagttctgagaatatggatggaagcaaccctgcattgaatgtccttcagagactttgtgctgcaaccgaacaactcaacctccaggtggatggtggagctgagtgccttgtagaaatccgtagcatagtctcagagtcagatgtttcatcatttgaaatccaacatagtggatttgtgaagcagctgttgctttatttgacatctaaaagtgaaaaggatgctgtgagcagagagatcagattaaagcgatttcttcatgtatttttttcttctccacttcctggagaagagcccattggaagagtggaaccagtgggtaatgcacctttgttggcattagttcacaagatgaacaactgcctcagccagatggaacaatttccagtcaaagtacatgatttccctagtggaaatgggacaggaggcagcttttctctcaacagaggatcacaggctttaaaatttttcaacacacatcaattaaaatgccagttacaaaggcatccagactgtgcaaatgtgaagcagtggaagggtggacctgtcaagattgaccctctggctttggtacaagccatcgagagataccttgtagttagagggtatggaagagtaagagaagatgatgaagacagcgatgacgatggatcagatgaggaaatagatgagtctctggctgctcagttcctaaattcaggaaatgtaagacacaggctgcagttttatattggagaacatttgctkccgtataacatgactgtgtatcaggcagtacggcagtttagtatacaggctgaagatgaaagagaatccacagatgatgagagcaatcctctaggcagagctggtatttggacaaagactcatacaatatggcagtataaacctgtgagagaggatgaagaaagtaataaagattgtgttggtggtaaaagaggaagagcccaaacagctccaacgaaaacttcccctagaaatgcaaaaaagcatgatgagttatggcacgatggagtgtgcccatcagtatcaaatcctttagaagtttacctcattcccacaccacctgaaaatataacatttgaagacccgtcattagatgtgatccttcttttaagagttttacatgctatcagtcgatactggtattacttgtatgataatgcaatgtgcaaggaaattattccaactagtgaatttattaacagtaagttaacagcaaaagcaaataggcaacttcaagatcctttagtaatcatgacaggaaacatcccaacatggcttactgagctaggaaaaacctgcccatttttctttccttttgatacccggcaaatgcttttttatgtaactgcatttgatcgggaccgagcaatgcaaagattacttgataccaacccagaaatcaaccagtctgattctcaagatagcagagttgcacctagattggatagaaaaaaacgtactgtgaaccgagaggagctgctgaaacaggcggagtctgtgatgcaggacctcggcagctcacgggccatgttagaaatccagtatgaaaatgaggttggtacaggtcttgggcctacactggagttttatgcgcttgtatctcaggaactacagagagctgacttgggtctttggagaggtgaagaagtaactcttagcaatccaaaagggagccaagaagggaccaagtatattcaaaacctccagggcctgtttgcgcttccctttggtaggacagcaaagccagctcatatcgcaaaggttaagatgaagtttcgcttcttaggaaaattaatggccaaggctatcatggatttcagattggtggaccttccccttggcttacccttttataaatggatgctacggcaagaaacttcactgacatcacacgatttgtttgacatcgacccagttgtagccagatcagtttatcacctagaagacattgtcagacagaagaaaagacttgaacaagataaatcccagaccaaagagagtctacagtatgcattagaaaccttgactatgaatggctgctcagttgaagatctaggactggatttcactctgccagggtttcccaatatcgaactgaagaaaggagggaaggatataccagtcactatccacaatttagaggagtatctaagactggttatattctgggcactaaatgaaggcgtttctaggcaatttgattcgttcagagatggatttgaatcagtcttcccactcagtcatcttcagtacttctacccggaggaactggatcagctcctttgtggcagtaaagcagacacttgggatgcaaagacactgatggaatgctgtaggcctgatcatggttatactcatgacagtcgggctgtgaagtttttgtttgagattctcagtagttttgataatgagyagcagaggttatttctccagtttgtgactggtagcccaagattgcctgttggaggattccggagtttgaatccacctttgacaattgtccgaaagacgtttgaatcaacagaaaacccagatgacttcttgccctctgtaatgacttgtgtgaactatcttaagttgccggactattcaagcattgagataatgcgtgaaaaactgttgatagcagcaagagaagggcagcagtcgttccatctttcctgatyatagcaagaaatrcagtgtctgcctgttacagcaaaagamacaaatcatgatttcttttctaatgttatcacctgagtcaaggaaacatgttacgccttcttgttgtaggaaaaacggcttgcagattataaagagacatttggttgatattcattaatggccccatggacttaaagtgatcaggccctaaaacgttgttgtgatgaggtttctttagcaagttcttgtttaaattatcatttatttgatgagtgaagtttttaacatgctttgctgtgtgaaatttaaaaaagggatgtttttccaggctggaacaataaatgtggctgtgcagtttaattctgggctgtgtgtatccatctagctaagtctgcagttttctttcctccaaagacaactcttgtacataagtacagaaatttaagctcacatgtatttgacaaatatagtttagtagactagctctatgtgcttttcactttcctctgattttctctccctgattcattattatctgtgcagctcacagttttttttttgtatacaactcacagtt

SEQ ID NO: 1829 - DNA, 6145 bp, Homo sapiens
ggtgctgcggctcagctgataattgaaggaacccggagccgccgccgccgcgccgctggggggggtggggggagctagtggaagttactgccgcgccaccgagtccggaccggagactttggggcctaactagtgaatggtagtgtctagaaagggtatgtcccttcaagagagaggtgccaatgtccaaccggcctaataacaatccaggggggtcactgcgacgttcacagaggaacactgccggggcccaaccacaagacgactcaataggaggaagaagctgcagttcatcatctgctgtgatagttccacaaccagaggatccagacagagccaatacttcagaaagacaaaaaacggggcaggtgcctaagaaagacaattctcgaggagtgaagcgcagtgctagtccagactacaacaggaccaattctcctagctctgcaaaaaaaccaaaagcacttcagcatactgaatctccctcagaaacaaataagccacatagtaagtcaaagaagagacatttagaccaggagcaacaactgaaatctgcacaatcaccatcaacaagcaaggctcataccaggaagagtggggccactggcggttcacggagtcagaaaagaaaaaggacagagagttcttgtgtaaagagtggctccgggtctgaatcaactggtgcagaagagagatctgcgaaacctaccaagctggcttcaaaatcagccacctcagccaaagctgggtgtagcaccatcactgattcttcttctgctgcctctacttcctcstcgtcttctgctgtagcctcggcctcctccactgtaccaccaggtgccagagtgaaacaaggaaaagatcagaacaaggccaggcgttcccgttcagcgtccagtcccagccccagaagaagtagcagggaaaaggaacagaggtcttctaagtcagagacatcaaaacctggaccttctggattacaggccaaattagcaagkttaagaaaatctacgaagaaacgcagtgagtctccacctgctgagctccccagtttgaggcggagcacacgccaaaagaccacgggctcctgtgctagtaccagtcggcgaggctctggcctgggcaaaagaggagcagctgaagctcgtcgacaggagaaaatggcagaccctgaaagcaaccaggaggcagtaaattcttcagctgctcggacagatgaagctccccaaggagctgcaggggctgttggcatgaccacctctggggagagtgaatcagatgattccgagatgggacgtttgcaagctttgttagaggcaaggggtcttccccctcacctatttggtcctcttggtcctcggatgtcacagcttttccatagaacaattggaagtggagctagttctaaggcccagcagctactacaaggwttgcaagccagtgatgaaagtcaacagcttcaggcagttattgagatgtgtcagttactggtcatgggaaatgaggagacactgggagggtttcctgtcaagagtgttgttccagctttgattacgttacttcagatggagcacaattttgatattatgaaccatgcttgtcgagccttaacatacatgatggaagcacttcctcgatcttctgctgttgtagtagatgctattcctgtctttttagaaaagctgcaagttattcagtgtattgatgtggcagagcaggccttgactgccttggagatgttgtcacggagacatagtaaagccattctacaggcgggtggtttggcagactgcttgctgtacctagaattcttcagcataaatgcccaaagaaatgcattagcaattgcagctaattgctgccagagtatcacgccagatgaatttcattttgtggcagattcactcccattgctaacccaaaggctaacacatcaggataaaaagtcagtagaaagcacttgcctttgttttgcacgcctagtggacaacttccagcatgaggagaatttactccagcaggttgcttccaaagatctgcttacaaatgttcaacagctgttggtagtgactccacccattttaagttctgggatgtttataatggtggttcgcatgttttctctgatgtgttccaactgtccaactttagctgttcaacttatgaaacaaaacattgcagaaacgcttcactttctcctgtgtggtgcctccaatggaagttgtcaggaacagattgatcttgttccacgaagccctcaagagttgtatgaactgacatctctgatttgtgaacttatgccatgtttaccaaaagaaggcatttttgcagttgataccatgttgaagaagggaaatgcacagaacacagatggtgcgatatggcagtggcgtgatgatcggggcctctggcatccatataacaggattgacagccggatcattgaggcagcccatcaggtcggtgaggatgagataagcttgtccactctgggacgagtttatactattgattttaattctatgcagcaaatcaatgaggacacgggaacagcacgtgccattcagagaaaacctaacccgttagccaatagtaacactagtggatattcagagtcaaagaaggatgatgctcgagcacagcttatgaaagaggatccggaactggctaagtcttttattaagacrttatttggtgttctttatgaagtgtatagttcctcagcaggacctgcggtcagacataagtgccttagagcaattcttaggataatttattttgcggatgctgaacttctgaaggatgttctgaaaaatcatgctgtttcaagtcacattgcttccatgctgtcaagccaagacctgaagatagtagtgggagcacttcagatggcagaaattttaatgcagaagttacctgatatttttagtgtttacttcagaagagaaggtgtaatgcatcaagtaaaacacttagcagaatcagagtctttgttgacaagtccaccaaaggcatgtacgaatggatcgggatccatgggatccacaacttcagtcagcagtgggacagccacagctgccactcatgctgcagctgacttgggatcacccagcttgcagcacagcagggatgattctttagatctcagccctcaaggtcgattaagtgatgttctaaagagaaaacgactgccaaaacgagggccaagaagagcccattggaagagtggaaccagtgggtaatgcacctttgttggcattagttcacaagatgaacaactgcctcagccagatggaacaatttccagtcaaagtacatgatttccctagtggaaatgggacaggaggcagcttttctctcaacagaggatcacaggctttaaaatttttcaacacacatcaattaaaatgccagttacaaaggcatccagactgtgcaaatgtgaagcagtggaagggtggacctgtcaagattgaccctctggctttggtacaagccatcgagagataccttgtagttagagggtatggaagagtaagagaagatgatgaagacagcgatgacgatggatcagatgaggaaatagatgagtctctggctgctcagttcctaaattcaggaaatgtaagacacaggctgcagttttatattggagaacatttgctkccgtataacatgactgtgtatcaggcagtacggcagtttagtatacaggctgaagatgaaagagaatccacagatgatgagagcaatcctctaggcagagctggtatttggacaaagactcatacaatatggtataaacctgtgagagaggatgaagaaagtaataaagattgtgttggtggtaaaagaggaagagcccaaacagctccaacgaaaacttcccctagaaatgcaaaaaagcatgatgagttatggcacgatggagtgtgcccatcagtatcaaatcctttagaagtttacctcattcccacaccacctgaaaatataacatttgaagacccgtcattagatgtgatccttcttttaagagttttacatgctatcagtcgatactggtattacttgtatgataatgcaatgtgcaaggaaattattccaactagtgaatttattaacagtaagttaacagcaaaagcaaataggcaacttcaagatcctttagtaatcatgacaggaaacatcccaacatggcttactgagctaggaaaaacctgcccatttttctttccttttgatacccggcaaatgcttttttatgtaactgcatttgatcgggaccgagcaatgcaaagattacttgataccaacccagaaatcaaccagtctgattctcaagatagcagagttgcacctagattggatagaaaaaaacgtactgtgaaccgagaggagctgctgaaacaggcggagtctgtgatgcaggacctcggcagctcacgggccatgttagaaatccagtatgaaaatgaggttggtacaggtcttgggcctacactggagttttatgcgcttgtatctcaggaactacagagagctgacttgggtctttggagaggtgaagaagtaactcttagcaatccaaaagggagccaagaagggaccaagtatattcaaaacctccagggcctgtttgcgcttccctttggtaggacagcaaagccagctcatatcgcaaaggttaagatgaagtttcgcttcttaggaaaattaatggccaaggctatcatggatttcagattggtggaccttccccttggcttacccttttataaatggatgctacggcaagaaacttcactgacatcacacgatttgtttgacatcgacccagttgtagccagatcagtttatcacctagaagacattgtcagacagaagaaaagacttgaacaagataaatcccagaccaaagagagtctacagtatgcattagaaaccttgactatgaatggctgctcagttgaagatctaggactggatttcactctgccagggtttcccaatatcgaactgaagaaaggagggaaggatataccagtcactatccacaatttagaggagtatctaagactggttatattctgggcactaaatgaaggcgtttctaggcaatttgattcgttcagagatggatttgaatcagtcttcccactcagtcatcttcagtacttctacccggaggaactggatcagctcctttgtggcagtaaagcagacacttgggatgcaaagacactgatggaatgctgtaggcctgatcatggttatactcatgacagtcgggctgtgaagtttttgtttgagattctcagtagttttgataatgagyagcagaggttatttctccagtttgtgactggtagcccaagattgcctgttggaggattccggagtttgaatccacctttgacaattgtccgaaagacgtttgaatcaacagaaaacccagatgacttcttgccctctgtaatgacttgtgtgaactatcttaagttgccggactattcaagcattgagataatgcgtgaaaaactgttgatagcagcaagagaagggcagcagtcgttccatctttcctgatyatagcaagaaatrcagtgtctgcctgttacagcaaaagamacaaatcatgatttcttttctaatgttatcacctgagtcaaggaaacatgttacgccttcttgttgtaggaaaaacggcttgcagattataaagagacatttggttgatattcattaatggccccatggacttaaagtgatcaggccctaaaacgttgttgtgatgaggtttctttagcaagttcttgtttaaattatcatttatttgatgagtgaagtttttaacatgctttgctgtgtgaaatttaaaaaagggatgtttttccaggctggaacaataaatgtggctgtgcagtttaattctgggctgtgtgtatccatctagctaagtctgcagttttctttcctccaaagacaactcttgtacataagtacagaaatttaagctcacatgtatttgacaaatatagtttagtagactagctctatgtgcttttcactttcctctgattttctctccctgattcattattatctgtgcagctcacagttttttttttgtatacaactcacagtt

SEQ ID NO: 1830 - DNA, 6720 bp, Homo sapiens
ggtgctgcggctcagctgataattgaaggaacccggagccgccgccgccgcgccgctggggggggtggggggagctagtggaagttactgccgcgccaccgagtccggaccggagactttggggcctaactagtgaatggtagtgtctagaaagggtatgtcccttcaagagagaggtgccaatgtccaaccggcctaataacaatccaggggggtcactgcgacgttcacagaggaacactgccggggcccaaccacaagacgactcaataggaggaagaagctgcagttcatcatctgctgtgatagttccacaaccagaggatccagacagagccaatacttcagaaagacaaaaaacggggcaggtgcctaagaaagacaattctcgaggagtgaagcgcagtgctagtccagactacaacaggaccaattctcctagctctgcaaaaaaaccaaaagcacttcagcatactgaatctccctcagaaacaaataagccacatagtaagtcaaagaagagacatttagaccaggagcaacaactgaaatctgcacaatcaccatcaacaagcaaggctcataccaggaagagtggggccactggcggttcacggagtcagaaaagaaaaaggacagagagttcttgtgtaaagagtggctccgggtctgaatcaactggtgcagaagagagatctgcgaaacctaccaagctggcttcaaaatcagccacctcagccaaagctgggtgtagcaccatcactgattcttcttctgctgcctctacttcctcstcgtcttctgctgtagcctcggcctcctccactgtaccaccaggtgccagagtgaaacaaggaaaagatcagaacaaggccaggcgttcccgttcagcgtccagtcccagccccagaagaagtagcagggaaaaggaacagagtaaaactggtggctcttcaaaatttgattgggctgctcgtttcagccctaaagttagccttcctaaaacaaaactgtctcttccagggtcttctaagtcagagacatcaaaacctggaccttctggattacaggccaaattagcaagkttaagaaaatctacgaagaaacgcagtgagtctccacctgctgagctccccagtttgaggcggagcacacgccaaaagaccacgggctcctgtgctagtaccagtcggcgaggctctggcctgggcaaaagaggagcagctgaagctcgtcgacaggagaaaatggcagaccctgaaagcaaccaggaggcagtaaattcttcagctgctcggacagatgaagctccccaaggagctgcaggggctgttggcatgaccacctctggggagagtgaatcagatgattccgagatgggacgtttgcaagctttgttagaggcaaggggtcttccccctcacctatttggtcctcttggtcctcggatgtcacagcttttccatagaacaattggaagtggagctagttctaaggcccagcagctactacaaggwttgcaagccagtgatgaaagtcaacagcttcaggcagttattgagatgtgtcagttactggtcatgggaaatgaggagacactgggagggtttcctgtcaagagtgttgttccagctttgattacgttacttcagatggagcacaattttgatattatgaaccatgcttgtcgagccttaacatacatgatggaagcacttcctcgatcttctgctgttgtagtagatgctattcctgtctttttagaaaagctgcaagttattcagtgtattgatgtggcagagcaggccttgactgccttggagatgttgtcacggagacatagtaaagccattctacaggcgggtggtttggcagactgcttgctgtacctagaattcttcagcataaatgcccaaagaaatgcattagcaattgcagctaattgctgccagagtatcacgccagatgaatttcattttgtggcagattcactcccattgctaacccaaaggctaacacatcaggataaaaagtcagtagaaagcacttgcctttgttttgcacgcctagtggacaacttccagcatgaggagaatttactccagcaggttgcttccaaagatctgcttacaaatgttcaacagctgttggtagtgactccacccattttaagttctgggatgtttataatggtggttcgcatgttttctctgatgtgttccaactgtccaactttagctgttcaacttatgaaacaaaacattgcagaaacgcttcactttctcctgtgtggtgcctccaatggaagttgtcaggaacagattgatcttgttccacgaagccctcaagagttgtatgaactgacatctctgatttgtgaacttatgccatgtttaccaaaagaaggcatttttgcagttgataccatgttgaagaagggaaatgcacagaacacagatggtgcgatatggcagtggcgtgatgatcggggcctctggcatccatataacaggattgacagccggatcattgagcaaatcaatgaggacacgggaacagcacgtgccattcagagaaaacctaacccgttagccaatagtaacactagtggatattcagagtcaaagaaggatgatgctcgagcacagcttatgaaagaggatccggaactggctaagtcttttattaagacrttatttggtgttctttatgaagtgtatagttcctcagcaggacctgcggtcagacataagtgccttagagcaattcttaggataatttattttgcggatgctgaacttctgaaggatgttctgaaaaatcatgctgtttcaagtcacattgcttccatgctgtcaagccaagacctgaagatagtagtgggagcacttcagatggcagaaattttaatgcagaagttacctgatatttttagtgtttacttcagaagagaaggtgtaatgcatcaagtaaaacacttagcagaatcagagtctttgttgacaagtccaccaaaggcatgtacgaatggatcgggatccatgggatccacaacttcagtcagcagtgggacagccacagctgccactcatgctgcagctgacttgggatcacccagcttgcagcacagcagggatgattctttagatctcagccctcaaggtcgattaagtgatgttctaaagagaaaacgactgccaaaacgagggccaagaaggccaaagtactcacctccaagagatgatgacaaagtagacaatcaagctaaaagccccaccactactcagtcacctaaatcttctttcctggcaagcttgaatccaaaaacatggggaaggttaagtacacagtccaacagcaacaacattgagccagcacggactgcgggaggtagtggccttgccagggctgcctcaaaggataccatctccaataatagagaaaaaattaaaggttggattaaggagcaggcacataaatttgtagaacgttatttcagttctgagaatatggatggaagcaaccctgcattgaatgtccttcagagactttgtgctgcaaccgaacaactcaacctccaggtggatggtggagctgagtgccttgtagaaatccgtagcatagtctcagagtcagatgtttcatcatttgaaatccaacatagtggatttgtgaagcagctgttgctttatttgacatctaaaagtgaaaaggatgctgtgagcagagagatcagattaaagcgatttcttcatgtatttttttcttctccacttcctggagaagagcccattggaagagtggaaccagtgggtaatgcacctttgttggcattagttcacaagatgaacaactgcctcagccagatggaacaatttccagtcaaagtacatgatttccctagtggaaatgggacaggaggcagcttttctctcaacagaggatcacaggctttaaaatttttcaacacacatcaattaaaatgccagttacaaaggcatccagactgtgcaaatgtgaagcagtggaagggtggacctgtcaagattgaccctctggctttggtacaagccatcgagagataccttgtagttagagggtatggaagagtaagagaagatgatgaagacagcgatgacgatggatcagatgaggaaatagatgagtctctggctgctcagttcctaaattcaggaaatgtaagacacaggctgcagttttatattggagaacatttgctkccgtataacatgactgtgtatcaggcagtacggcagtttagtatacaggctgaagatgaaagagaatccacagatgatgagagcaatcctctaggcagagctggtatttggacaaagactcatacaatatggtataaacctgtgagagaggatgaagaaagtaataaagattgtgttggtggtaaaagaggaagagcccaaacagctccaacgaaaacttcccctagaaatgcaaaaaagcatgatgagttatggcacgatggagtgtgcccatcagtatcaaatcctttagaagtttacctcattcccacaccacctgaaaatataacatttgaagacccgtcattagatgtgatccttcttttaagagttttacatgctatcagtcgatactggtattacttgtatgataatgcaatgtgcaaggaaattattccaactagtgaatttattaacagtaagttaacagcaaaagcaaataggcaacttcaagatcctttagtaatcatgacaggaaacatcccaacatggcttactgagctaggaaaaacctgcccatttttctttccttttgatacccggcaaatgcttttttatgtaactgcatttgatcgggaccgagcaatgcaaagattacttgataccaacccagaaatcaaccagtctgattctcaagatagcagagttgcacctagattggatagaaaaaaacgtactgtgaaccgagaggagctgctgaaacaggcggagtctgtgatgcaggacctcggcagctcacgggccatgttagaaatccagtatgaaaatgaggttggtacaggtcttgggcctacactggagttttatgcgcttgtatctcaggaactacagagagctgacttgggtctttggagaggtgaagaagtaactcttagcaatccaaaagggagccaagaagggaccaagtatattcaaaacctccagggcctgtttgcgcttccctttggtaggacagcaaagccagctcatatcgcaaaggttaagatgaagtttcgcttcttaggaaaattaatggccaaggctatcatggatttcagattggtggaccttccccttggcttacccttttataaatggatgctacggcaagaaacttcactgacatcacacgatttgtttgacatcgacccagttgtagccagatcagtttatcacctagaagacattgtcagacagaagaaaagacttgaacaagataaatcccagaccaaagagagtctacagtatgcattagaaaccttgactatgaatggctgctcagttgaagatctaggactggatttcactctgccagggtttcccaatatcgaactgaagaaaggagggaaggatataccagtcactatccacaatttagaggagtatctaagactggttatattctgggcactaaatgaaggcgtttctaggcaatttgattcgttcagagatggatttgaatcagtcttcccactcagtcatcttcagtacttctacccggaggaactggatcagctcctttgtggcagtaaagcagacacttgggatgcaaagacactgatggaatgctgtaggcctgatcatggttatactcatgacagtcgggctgtgaagtttttgtttgagattctcagtagttttgataatgagyagcagaggttatttctccagtttgtgactggtagcccaagattgcctgttggaggattccggagtttgaatccacctttgacaattgtccgaaagacgtttgaatcaacagaaaacccagatgacttcttgccctctgtaatgacttgtgtgaactatcttaagttgccggactattcaagcattgagataatgcgtgaaaaactgttgatagcagcaagagaagggcagcagtcgttccatctttcctgatyatagcaagaaatrcagtgtctgcctgttacagcaaaagamacaaatcatgatttcttttctaatgttatcacctgagtcaaggaaacatgttacgccttcttgttgtaggaaaaacggcttgcagattataaagagacatttggttgatattcattaatggccccatggacttaaagtgatcaggccctaaaacgttgttgtgatgaggtttctttagcaagttcttgtttaaattatcatttatttgatgagtgaagtttttaacatgctttgctgtgtgaaatttaaaaaagggatgtttttccaggctggaacaataaatgtggctgtgcagtttaattctgggctgtgtgtatccatctagctaagtctgcagttttctttcctccaaagacaactcttgtacataagtacagaaatttaagctcacatgtatttgacaaatatagtttagtagactagctctatgtgcttttcactttcctctgattttctctccctgattcattattatctgtgcagctcacagttttttttttgtatacaactcacagtt

SEQ ID NO: 1831 - DNA, 6618 bp, Homo sapiens
ggtgctgcggctcagctgataattgaaggaacccggagccgccgccgccgcgccgctggggggggtggggggagctagtggaagttactgccgcgccaccgagtccggaccggagactttggggcctaactagtgaatggtagtgtctagaaagggtatgtcccttcaagagagaggtgccaatgtccaaccggcctaataacaatccaggggggtcactgcgacgttcacagaggaacactgccggggcccaaccacaagacgactcaataggaggaagaagctgcagttcatcatctgctgtgatagttccacaaccagaggatccagacagagccaatacttcagaaagacaaaaaacggggcaggtgcctaagaaagacaattctcgaggagtgaagcgcagtgctagtccagactacaacaggaccaattctcctagctctgcaaaaaaaccaaaagcacttcagcatactgaatctccctcagaaacaaataagccacatagtaagtcaaagaagagacatttagaccaggagcaacaactgaaatctgcacaatcaccatcaacaagcaaggctcataccaggaagagtggggccactggcggttcacggagtcagaaaagaaaaaggacagagagttcttgtgtaaagagtggctccgggtctgaatcaactggtgcagaagagagatctgcgaaacctaccaagctggcttcaaaatcagccacctcagccaaagctgggtgtagcaccatcactgattcttcttctgctgcctctacttcctcstcgtcttctgctgtagcctcggcctcctccactgtaccaccaggtgccagagtgaaacaaggaaaagatcagaacaaggccaggcgttcccgttcagcgtccagtcccagccccagaagaagtagcagggaaaaggaacagaggtcttctaagtcagagacatcaaaacctggaccttctggattacaggccaaattagcaagkttaagaaaatctacgaagaaacgcagtgagtctccacctgctgagctccccagtttgaggcggagcacacgccaaaagaccacgggctcctgtgctagtaccagtcggcgaggctctggcctgggcaaaagaggagcagctgaagctcgtcgacaggagaaaatggcagaccctgaaagcaaccaggaggcagtaaattcttcagctgctcggacagatgaagctccccaaggagctgcaggggctgttggcatgaccacctctggggagagtgaatcagatgattccgagatgggacgtttgcaagctttgttagaggcaaggggtcttccccctcacctatttggtcctcttggtcctcggatgtcacagcttttccatagaacaattggaagtggagctagttctaaggcccagcagctactacaaggwttgcaagccagtgatgaaagtcaacagcttcaggcagttattgagatgtgtcagttactggtcatgggaaatgaggagacactgggagggtttcctgtcaagagtgttgttccagctttgattacgttacttcagatggagcacaattttgatattatgaaccatgcttgtcgagccttaacatacatgatggaagcacttcctcgatcttctgctgttgtagtagatgctattcctgtctttttagaaaagctgcaagttattcagtgtattgatgtggcagagcaggccttgactgccttggagatgttgtcacggagacatagtaaagccattctacaggcgggtggtttggcagactgcttgctgtacctagaattcttcagcataaatgcccaaagaaatgcattagcaattgcagctaattgctgccagagtatcacgccagatgaatttcattttgtggcagattcactcccattgctaacccaaaggctaacacatcaggataaaaagtcagtagaaagcacttgcctttgttttgcacgcctagtggacaacttccagcatgaggagaatttactccagcaggttgcttccaaagatctgcttacaaatgttcaacagctgttggtagtgactccacccattttaagttctgggatgtttataatggtggttcgcatgttttctctgatgtgttccaactgtccaactttagctgttcaacttatgaaacaaaacattgcagaaacgcttcactttctcctgtgtggtgcctccaatggaagttgtcaggaacagattgatcttgttccacgaagccctcaagagttgtatgaactgacatctctgatttgtgaacttatgccatgtttaccaaaagaaggcatttttgcagttgataccatgttgaagaagggaaatgcacagaacacagatggtgcgatatggcagtggcgtgatgatcggggcctctggcatccatataacaggattgacagccggatcattgagcaaatcaatgaggacacgggaacagcacgtgccattcagagaaaacctaacccgttagccaatagtaacactagtggatattcagagtcaaagaaggatgatgctcgagcacagcttatgaaagaggatccggaactggctaagtcttttattaagacrttatttggtgttctttatgaagtgtatagttcctcagcaggacctgcggtcagacataagtgccttagagcaattcttaggataatttattttgcggatgctgaacttctgaaggatgttctgaaaaatcatgctgtttcaagtcacattgcttccatgctgtcaagccaagacctgaagatagtagtgggagcacttcagatggcagaaattttaatgcagaagttacctgatatttttagtgtttacttcagaagagaaggtgtaatgcatcaagtaaaacacttagcagaatcagagtctttgttgacaagtccaccaaaggcatgtacgaatggatcgggatccatgggatccacaacttcagtcagcagtgggacagccacagctgccactcatgctgcagctgacttgggatcacccagcttgcagcacagcagggatgattctttagatctcagccctcaaggtcgattaagtgatgttctaaagagaaaacgactgccaaaacgagggccaagaaggccaaagtactcacctccaagagatgatgacaaagtagacaatcaagctaaaagccccaccactactcagtcacctaaatcttctttcctggcaagcttgaatccaaaaacatggggaaggttaagtacacagtccaacagcaacaacattgagccagcacggactgcgggaggtagtggccttgccagggctgcctcaaaggataccatctccaataatagagaaaaaattaaaggttggattaaggagcaggcacataaatttgtagaacgttatttcagttctgagaatatggatggaagcaaccctgcattgaatgtccttcagagactttgtgctgcaaccgaacaactcaacctccaggtggatggtggagctgagtgccttgtagaaatccgtagcatagtctcagagtcagatgtttcatcatttgaaatccaacatagtggatttgtgaagcagctgttgctttatttgacatctaaaagtgaaaaggatgctgtgagcagagagatcagattaaagcgatttcttcatgtatttttttcttctccacttcctggagaagagcccattggaagagtggaaccagtgggtaatgcacctttgttggcattagttcacaagatgaacaactgcctcagccagatggaacaatttccagtcaaagtacatgatttccctagtggaaatgggacaggaggcagaggatcacaggctttaaaatttttcaacacacatcaattaaaatgccagttacaaaggcatccagactgtgcaaatgtgaagcagtggaagggtggacctgtcaagattgaccctctggctttggtacaagccatcgagagataccttgtagttagagggtatggaagagtaagagaagatgatgaagacagcgatgacgatggatcagatgaggaaatagatgagtctctggctgctcagttcctaaattcaggaaatgtaagacacaggctgcagttttatattggagaacatttgctkccgtataacatgactgtgtatcaggcagtacggcagtttagtatacaggctgaagatgaaagagaatccacagatgatgagagcaatcctctaggcagagctggtatttggacaaagactcatacaatatggtataaacctgtgagagaggatgaagaaagtaataaagattgtgttggtggtaaaagaggaagagcccaaacagctccaacgaaaacttcccctagaaatgcaaaaaagcatgatgagttatggcacgatggagtgtgcccatcagtatcaaatcctttagaagtttacctcattcccacaccacctgaaaatataacatttgaagacccgtcattagatgtgatccttcttttaagagttttacatgctatcagtcgatactggtattacttgtatgataatgcaatgtgcaaggaaattattccaactagtgaatttattaacagtaagttaacagcaaaagcaaataggcaacttcaagatcctttagtaatcatgacaggaaacatcccaacatggcttactgagctaggaaaaacctgcccatttttctttccttttgatacccggcaaatgcttttttatgtaactgcatttgatcgggaccgagcaatgcaaagattacttgataccaacccagaaatcaaccagtctgattctcaagatagcagagttgcacctagattggatagaaaaaaacgtactgtgaaccgagaggagctgctgaaacaggcggagtctgtgatgcaggacctcggcagctcacgggccatgttagaaatccagtatgaaaatgaggttggtacaggtcttgggcctacactggagttttatgcgcttgtatctcaggaactacagagagctgacttgggtctttggagaggtgaagaagtaactcttagcaatccaaaagggagccaagaagggaccaagtatattcaaaacctccagggcctgtttgcgcttccctttggtaggacagcaaagccagctcatatcgcaaaggttaagatgaagtttcgcttcttaggaaaattaatggccaaggctatcatggatttcagattggtggaccttccccttggcttacccttttataaatggatgctacggcaagaaacttcactgacatcacacgatttgtttgacatcgacccagttgtagccagatcagtttatcacctagaagacattgtcagacagaagaaaagacttgaacaagataaatcccagaccaaagagagtctacagtatgcattagaaaccttgactatgaatggctgctcagttgaagatctaggactggatttcactctgccagggtttcccaatatcgaactgaagaaaggagggaaggatataccagtcactatccacaatttagaggagtatctaagactggttatattctgggcactaaatgaaggcgtttctaggcaatttgattcgttcagagatggatttgaatcagtcttcccactcagtcatcttcagtacttctacccggaggaactggatcagctcctttgtggcagtaaagcagacacttgggatgcaaagacactgatggaatgctgtaggcctgatcatggttatactcatgacagtcgggctgtgaagtttttgtttgagattctcagtagttttgataatgagyagcagaggttatttctccagtttgtgactggtagcccaagattgcctgttggaggattccggagtttgaatccacctttgacaattgtccgaaagacgtttgaatcaacagaaaacccagatgacttcttgccctctgtaatgacttgtgtgaactatcttaagttgccggactattcaagcattgagataatgcgtgaaaaactgttgatagcagcaagagaagggcagcagtcgttccatctttcctgatyatagcaagaaatrcagtgtctgcctgttacagcaaaagamacaaatcatgatttcttttctaatgttatcacctgagtcaaggaaacatgttacgccttcttgttgtaggaaaaacggcttgcagattataaagagacatttggttgatattcattaatggccccatggacttaaagtgatcaggccctaaaacgttgttgtgatgaggtttctttagcaagttcttgtttaaattatcatttatttgatgagtgaagtttttaacatgctttgctgtgtgaaatttaaaaaagggatgtttttccaggctggaacaataaatgtggctgtgcagtttaattctgggctgtgtgtatccatctagctaagtctgcagttttctttcctccaaagacaactcttgtacataagtacagaaatttaagctcacatgtatttgacaaatatagtttagtagactagctctatgtgcttttcactttcctctgattttctctccctgattcattattatctgtgcagctcacagttttttttttgtatacaactcacagtt

SEQ ID NO: 1832 - DNA, 6968 bp, Homo sapiens
aggtttccctgtacttagagcgtggactgtgaacccccaagcagacgagctgaacttcgtcacccagtccctagagccagcaagacatgggccccagtttccagaccctgacacctctcatttaaccagaagacgtggaggggagccaccacccctgaccatgtagatgccagttccagggagcagcatgggccccactgaatggagactcctgggtctacagccctgagcccctccggcccctggacctcgtcccacaccggaggacacctcttggagctcaccaccactgtcaccagcccgcctcggccacccccaccccccgggacccggagtcggccgcctggtgccacagctgaccagtgagggtgtgctgaggacagccacaagcagccatcacccggcagcctcttgtccagcgctgacccttgggcccagcccgagcaaggaccgcagcaracatgggtgacatgaccaacagcgacttttactccaaaaaccaaagaaatgagtcgagccatgggggcgagttcgggtgcacaatggaggagctccgctccctcatggagctgcggggcactgaggctgtggtcaagatcaaggagacttatggggacaccgaagccatctgccggcgcctcaaaacctcacctgttgaaggtttgccgggcaccgctccagacctggaaaagagaaagcaaatttttgggcaaaactttatacctccaaagaagccaaaaaccttcctgcagctygtgtgggaggcgctgcaggacgtgacgctcatcatcctggagattgccgccatcatctccctggggctgtccttctaccacccgcccggcgagggcaacgaaggatgtgcgacggcccagggtggggcagaggatgaaggagaggcagaggcaggttggatcgagggggccgccattctcctctcagttatctgtgtggtcctggtcacggccttcaatgactggagcaargagaaacagttccggggcctgcagagccgcatcgagcaggaacagaaatttaccgtggtccgggctggccaggtggtscagatccctgtggctgagatcgtggttggggacatagcccaggtcaaatatggtgacctcctccctgccgacggcctcttcatccagggcaatgacctcaagattgatgaaagctccctaactggagagtctgaccaggtgcgcaagtccgtggacaaggaccccatgctgctgtcaggaacccacgtgatggagggctcaggacggatgttggtgactgctgtgggtgtgaactctcagactggcatcatctttaccctcctgggggctggtggtgaagaggaagagaagaaagacaaaaaaggtgtgaagaagggggatggccttcagctaccagcagcagacggtgcrgcagcttcaaatgctgcagatagtgcgaatgccagcctagtcaatggtaaaatgcaggatggcaatgtggacgccagccagagcaaagccaaacarcaggacggggcagccgccatggagatgcagcccctcaagagtgccgagggcggcgacgctgacgacaggaagaaggccagcatgcacaagaaggagaagtccgtgctgcagggcaagctcaccaagctggctgtgcagatcgggaaggcgggcttggtgatgtcagccatcacggtgatcatcctggtgctctacttcactgtggacaccttcgtggtcaacaagaagccgtggctgcctgagtgcacgcccgtctacgtgcagtactttgtcaagttcttcatcattggcgtgacggtgctggtggtcgccgtgccmgaggggctccctctggccgtcaccatctcgttggcctattcggtgaagaaaatgatgaaggacaacaayctggtacgccacctggatgcctgtgagaccatgggcaatgccacagccatctgctcagacaagacaggcacgctgaccaccaatcgcatgacagtggtacaggcctatgtcggygacgtccactataaagagatccccgaccccagctccatcaacaccaagaccatggagctgctgatcaatgccatygccatcaacagcgcctacaccaccaagattctgcccccagagaaggagggcgccctgcctcggcaggtgggcaacaagacggagtgcggcctgctgggcttcgtgctggacctgaagcaggactacgagcccgtgcgcagccagatgccagaggagaagttgtacaaagtgtacaccttcaactccgtgcgcaagtccatgagcactgtcatcaagctgcccgacgagagcttccgcatgtacagcaagggggcttctgagatcrtgctcaagaagtgctgcaaaatcctcaatggggcgggagagcctcgtgtcttccggccccgcgaccgggacgagatggtaaagaaggtgattgagcccatggcttgcgatgggctccgcactatctgcgtggcctaccgcgacttccccagcagcccggagccggactgggacaatgagaatgacatcctcaacgaactcacctgcatctgcgtggtgggcatcgaggacccggtgcggccagaggtcccagaagccatccgcaagtgccagcgggcaggcatcacggtccgcatggtcactggcgacaatatcaacacggctcgggccatcgccatcaagtgtggcatcatccatcctggggaggactttctgtgcctcgagggcaaggagttcaacaggaggatccgcaacgagaagggggagattgagcaggagcgaattgacaagatctggccaaagctgcgggtgctggctcgctcctccccaacggacaagcataccctggttaaaggcatcatcgacagcacacacactgagcagcggcaggtggtggccgtgacgggggacgggaccaacgacgggcctgcactcaagaaggccgacgtgggcttcgccatgggcatcgcaggcactgacgtggccaaggaggcctcagacatcatcctgacagacgacaatttcagcagcatcgtcaaggcagtgatgtggggccgcaacgtctatgacagcatctccaaattcttgcagttccagctcaccgtcaacgtggtggccgtgattgtggccttcacaggcgcctgcatcacgcaggactcccctctgaaggccgtgcagatgctctgggtgaacctcatcatggacacgtttgcctcgctggcactggccactgagccgcccacggagaccctgctgctgaggaagccgtacggccgcaacaagccgctcatctccaggaccatgatgaagaacatcctgggccatgctgtctaccagcttgccctcatcttcaccctgctctttgttggcgagaagatgttccagatcgacagcgggaggaacgcgcccctgcattcrccaccctcagaacattacaccatcatcttcaacaccttcgtcatgatgcarctcttcaacgagatcaacgcccgcaagatccacggcgagcgcaatgtctttgacggcatcttccggaaccccatcttctgcaccatcgtgctgggcacctttgccatccagatagtgatcgtgcagtttggagggaagccattcagctgctctccactgcagctggaccagtggatgtggtgcatattcattgggttaggagagctcgtttggggccaggtcatcgccaccatcccgaccagcagactcaarttcctcaaggaggcaggcaggctcacacagaaggaggagatcccggaggaggagctcaaygaggacgtggaggagatcgaccacgcrgagcgggagctgcggcggggccagatcctgtggttccgaggcctgaatcggatccagacacagatccgcgtcgtgaaggcgttccgtagctctctctatgaaggtttagaaaagcctgaatctcgaacctccatccataacttcatggctcatcctgaattccggatcgaagattcccagccccacatccccctcattgatgacaccgacctggaagaagatgccgcgctcaagcagaactcgagcccgccgtcatccctcaacaagaacaacagcgccatcgacagtgggatcaacctgacgaccgacacaagcaaatcagctacctcttcaagtccagggagccccatccacagcctggagacgtcgctttagctgaggaccctstcgcctgcccgcccgccctcatggaccccgctgccacccgctttccgggcacccatccatccaggcacccaactcacccaagcagcaacgagcaacaatcggaaaccaaatactggagagaaaaccaacgtttccacccacagaccctttctctggctgcgatgctgtttgaactctttttcacttcaaggcaaggggcgggatctccactgggggcttacgggagtgagcggttttcccaaaacaagcccttcctggctcccacccagacatggaccagccatgcacccgcccagccaccacgtcccccgcatgaatgtactgtacactttcaatcctccccttgtttggtttttgggggttggggaggggtttttgtttgtttgtttgttttcttaggcgggaactgcaaacagactcttttctgagactatttatccaatccactggtctgtgagtttttgaaatgcttgcacagcatggtctcagttgtatagattaatttaataactttttgaaattgcagagcttaactcgcctagtagatttgcaccaatggaaccgaagaacttcatagacactcacaaggttatatccatttctttgtatctatatcaacgtatacttttccgagactgtatacgtccatatagataggtagatatatatatatatatataaatatatatacatggatatataaagtttctttgccggcatgttgccttgtttccgcttaaattgctctattttaacttatttatgtcctaaaagaagaatgtaatttgtttacaaacctgtagataacgtctttggctatttgtatggtttaagaacactggtggctgagatgctataaaaacagctcggcccaacagacacttcccctgggttgcatcctggatgttttatgatagccatgctctgatttttgcctgctatttccgttcaataatgtcactaccgtgagaggctcaggcagaagccaaatgctaccgagttgccatcctgaggggtttaacaacatgctccgtagacgaagggagaggaggagagaaggcttcctgggtttgcaacactaacggccatccggcccaaggatgccaggatctgcaaagcactgctcgaagacttttctctcaatgaaactcgcttgagtttactaagagcatttcaaaaataggttctctttggcactgtctgtacagagattgaggtagtgttgaaatattataaatggtattgtgttgatttttttttttatttagtaacttacaggtttgtttccttattaatggcagcatcygagctgttggcatattggatgaggatcagtatggcttgctgcttttatttttatttttgaagaagaatagcctttttctctgcactatttagatccgaatgaaccttatgatgtgtatattgagatgtactcagtgtgattttaaaccaaattgtcttcctgtagtcacaatatatactgtagccttttaacagcaagtcttgctttcccaaacagaaagccattctgaaaycctacagtatcacaggtgagaaaaggtggttattttttccccaagacaacagcactagtaatcccacttaataagagcttatttaattggatgtcagcctcttaactgctaagcactttgtgggtctcagcgtttttcataaaagaacttttgtatttaatacaaagtttgctttgagacttttcagcatatgatcttttttccataaacttgtacagtgcaaaagacattttgaataccatgatcgatgatgtcccatgcttcgaggaaaaccaaacactttccgcctctcttgcaaaatccattcctcatgctgaccctcctcacgatggctgtgtcagcccagccccttcccttctccaggcccagakaactcttccacaaacaagatgagagccactcgggaaaagagccatagtcaactgggagggcctacatctggatggcggtggaaaaacttgagggtttggggttcaaagtcagcccatcccacctggcaaaatcctcctggaaggaggaccttcaagagcgcatcacctgaatgtcgtgaagaagtatctctgaatgtatccaggagaggaactgcataaccaaaggggtgaccagccctcagatgtgcttattggattccagtacaaacgccaccaaagccagcccactgctctcctacaaggaaggaaagatctgcacgtgtaaaacatggggcagccttggaacatggtgttttttggagtttcctttctcacagttttccatctccccacttctttgatcagtcatgtgtccgtgacctcgttccatgacatcaggatagctgtgtttgcacaccatgctscatgttcattyggagccaggaggggttctcagtggagcctggcttagggaacagggagcgatggaagaatgccaacattagcgttggtcttctcttgtcaggaatgaaggatgcttgcacacatgcaccccctcactctcacacttgcacacatacacacacacacacacgaaatggttggtttgtcaaaactcactgtagtacataaagcttgcactctgygtcctatatctagcagcatggggtacgtttggcagttcactccattagggggtaaataatttatgaccattcatctgtttttatgaatttttttatctagacaataattgtaaataaagaactcaccatctctgttcatttaatactatgcaatggttatgctttcaa

SEQ ID NO: 1833 - DNA, 6930 bp, Homo sapiens
cgggcacgctggctgggctcagccgcggcaccagctgccgcaccgcgattacggggctgcccgccgggaaaccgtgcaggattggtggtgattttcatagccaagagccaccacccctgaccatgtagatgccagttccagggagcagcatgggccccactgaatggagactcctgggtctacagccctgagcccctccggcccctggacctcgtcccacaccggaggacacctcttggagctcaccaccactgtcaccagcccgcctcggccacccccaccccccgggacccggagtcggccgcctggtgccacagctgaccagtgagggtgtgctgaggacagccacaagcagccatcacccggcagcctcttgtccagcgctgacccttgggcccagcccgagcaaggaccgcagcaracatgggtgacatgaccaacagcgacttttactccaaaaaccaaagaaatgagtcgagccatgggggcgagttcgggtgcacaatggaggagctccgctccctcatggagctgcggggcactgaggctgtggtcaagatcaaggagacttatggggacaccgaagccatctgccggcgcctcaaaacctcacctgttgaaggtttgccgggcaccgctccagacctggaaaagagaaagcaaatttttgggcaaaactttatacctccaaagaagccaaaaaccttcctgcagctygtgtgggaggcgctgcaggacgtgacgctcatcatcctggagattgccgccatcatctccctggggctgtccttctaccacccgcccggcgagggcaacgaaggatgtgcgacggcccagggtggggcagaggatgaaggagaggcagaggcaggttggatcgagggggccgccattctcctctcagttatctgtgtggtcctggtcacggccttcaatgactggagcaargagaaacagttccggggcctgcagagccgcatcgagcaggaacagaaatttaccgtggtccgggctggccaggtggtscagatccctgtggctgagatcgtggttggggacatagcccaggtcaaatatggtgacctcctccctgccgacggcctcttcatccagggcaatgacctcaagattgatgaaagctccctaactggagagtctgaccaggtgcgcaagtccgtggacaaggaccccatgctgctgtcaggaacccacgtgatggagggctcaggacggatgttggtgactgctgtgggtgtgaactctcagactggcatcatctttaccctcctgggggctggtggtgaagaggaagagaagaaagacaaaaaaggtgtgaagaagggggatggccttcagctaccagcagcagacggtgcrgcagcttcaaatgctgcagatagtgcgaatgccagcctagtcaatggtaaaatgcaggatggcaatgtggacgccagccagagcaaagccaaacarcaggacggggcagccgccatggagatgcagcccctcaagagtgccgagggcggcgacgctgacgacaggaagaaggccagcatgcacaagaaggagaagtccgtgctgcagggcaagctcaccaagctggctgtgcagatcgggaaggcgggcttggtgatgtcagccatcacggtgatcatcctggtgctctacttcactgtggacaccttcgtggtcaacaagaagccgtggctgcctgagtgcacgcccgtctacgtgcagtactttgtcaagttcttcatcattggcgtgacggtgctggtggtcgccgtgccmgaggggctccctctggccgtcaccatctcgttggcctattcggtgaagaaaatgatgaaggacaacaayctggtacgccacctggatgcctgtgagaccatgggcaatgccacagccatctgctcagacaagacaggcacgctgaccaccaatcgcatgacagtggtacaggcctatgtcggygacgtccactataaagagatccccgaccccagctccatcaacaccaagaccatggagctgctgatcaatgccatygccatcaacagcgcctacaccaccaagattctgcccccagagaaggagggcgccctgcctcggcaggtgggcaacaagacggagtgcggcctgctgggcttcgtgctggacctgaagcaggactacgagcccgtgcgcagccagatgccagaggagaagttgtacaaagtgtacaccttcaactccgtgcgcaagtccatgagcactgtcatcaagctgcccgacgagagcttccgcatgtacagcaagggggcttctgagatcrtgctcaagaagtgctgcaaaatcctcaatggggcgggagagcctcgtgtcttccggccccgcgaccgggacgagatggtaaagaaggtgattgagcccatggcttgcgatgggctccgcactatctgcgtggcctaccgcgacttccccagcagcccggagccggactgggacaatgagaatgacatcctcaacgaactcacctgcatctgcgtggtgggcatcgaggacccggtgcggccagaggtcccagaagccatccgcaagtgccagcgggcaggcatcacggtccgcatggtcactggcgacaatatcaacacggctcgggccatcgccatcaagtgtggcatcatccatcctggggaggactttctgtgcctcgagggcaaggagttcaacaggaggatccgcaacgagaagggggagattgagcaggagcgaattgacaagatctggccaaagctgcgggtgctggctcgctcctccccaacggacaagcataccctggttaaaggcatcatcgacagcacacacactgagcagcggcaggtggtggccgtgacgggggacgggaccaacgacgggcctgcactcaagaaggccgacgtgggcttcgccatgggcatcgcaggcactgacgtggccaaggaggcctcagacatcatcctgacagacgacaatttcagcagcatcgtcaaggcagtgatgtggggccgcaacgtctatgacagcatctccaaattcttgcagttccagctcaccgtcaacgtggtggccgtgattgtggccttcacaggcgcctgcatcacgcaggactcccctctgaaggccgtgcagatgctctgggtgaacctcatcatggacacgtttgcctcgctggcactggccactgagccgcccacggagaccctgctgctgaggaagccgtacggccgcaacaagccgctcatctccaggaccatgatgaagaacatcctgggccatgctgtctaccagcttgccctcatcttcaccctgctctttgttggcgagaagatgttccagatcgacagcgggaggaacgcgcccctgcattcrccaccctcagaacattacaccatcatcttcaacaccttcgtcatgatgcarctcttcaacgagatcaacgcccgcaagatccacggcgagcgcaatgtctttgacggcatcttccggaaccccatcttctgcaccatcgtgctgggcacctttgccatccagatagtgatcgtgcagtttggagggaagccattcagctgctctccactgcagctggaccagtggatgtggtgcatattcattgggttaggagagctcgtttggggccaggtcatcgccaccatcccgaccagcagactcaarttcctcaaggaggcaggcaggctcacacagaaggaggagatcccggaggaggagctcaaygaggacgtggaggagatcgaccacgcrgagcgggagctgcggcggggccagatcctgtggttccgaggcctgaatcggatccagacacagatccgcgtcgtgaaggcgttccgtagctctctctatgaaggtttagaaaagcctgaatctcgaacctccatccataacttcatggctcatcctgaattccggatcgaagattcccagccccacatccccctcattgatgacaccgacctggaagaagatgccgcgctcaagcagaactcgagcccgccgtcatccctcaacaagaacaacagcgccatcgacagtgggatcaacctgacgaccgacacaagcaaatcagctacctcttcaagtccagggagccccatccacagcctggagacgtcgctttagctgaggaccctstcgcctgcccgcccgccctcatggaccccgctgccacccgctttccgggcacccatccatccaggcacccaactcacccaagcagcaacgagcaacaatcggaaaccaaatactggagagaaaaccaacgtttccacccacagaccctttctctggctgcgatgctgtttgaactctttttcacttcaaggcaaggggcgggatctccactgggggcttacgggagtgagcggttttcccaaaacaagcccttcctggctcccacccagacatggaccagccatgcacccgcccagccaccacgtcccccgcatgaatgtactgtacactttcaatcctccccttgtttggtttttgggggttggggaggggtttttgtttgtttgtttgttttcttaggcgggaactgcaaacagactcttttctgagactatttatccaatccactggtctgtgagtttttgaaatgcttgcacagcatggtctcagttgtatagattaatttaataactttttgaaattgcagagcttaactcgcctagtagatttgcaccaatggaaccgaagaacttcatagacactcacaaggttatatccatttctttgtatctatatcaacgtatacttttccgagactgtatacgtccatatagataggtagatatatatatatatatataaatatatatacatggatatataaagtttctttgccggcatgttgccttgtttccgcttaaattgctctattttaacttatttatgtcctaaaagaagaatgtaatttgtttacaaacctgtagataacgtctttggctatttgtatggtttaagaacactggtggctgagatgctataaaaacagctcggcccaacagacacttcccctgggttgcatcctggatgttttatgatagccatgctctgatttttgcctgctatttccgttcaataatgtcactaccgtgagaggctcaggcagaagccaaatgctaccgagttgccatcctgaggggtttaacaacatgctccgtagacgaagggagaggaggagagaaggcttcctgggtttgcaacactaacggccatccggcccaaggatgccaggatctgcaaagcactgctcgaagacttttctctcaatgaaactcgcttgagtttactaagagcatttcaaaaataggttctctttggcactgtctgtacagagattgaggtagtgttgaaatattataaatggtattgtgttgatttttttttttatttagtaacttacaggtttgtttccttattaatggcagcatcygagctgttggcatattggatgaggatcagtatggcttgctgcttttatttttatttttgaagaagaatagcctttttctctgcactatttagatccgaatgaaccttatgatgtgtatattgagatgtactcagtgtgattttaaaccaaattgtcttcctgtagtcacaatatatactgtagccttttaacagcaagtcttgctttcccaaacagaaagccattctgaaaycctacagtatcacaggtgagaaaaggtggttattttttccccaagacaacagcactagtaatcccacttaataagagcttatttaattggatgtcagcctcttaactgctaagcactttgtgggtctcagcgtttttcataaaagaacttttgtatttaatacaaagtttgctttgagacttttcagcatatgatcttttttccataaacttgtacagtgcaaaagacattttgaataccatgatcgatgatgtcccatgcttcgaggaaaaccaaacactttccgcctctcttgcaaaatccattcctcatgctgaccctcctcacgatggctgtgtcagcccagccccttcccttctccaggcccagakaactcttccacaaacaagatgagagccactcgggaaaagagccatagtcaactgggagggcctacatctggatggcggtggaaaaacttgagggtttggggttcaaagtcagcccatcccacctggcaaaatcctcctggaaggaggaccttcaagagcgcatcacctgaatgtcgtgaagaagtatctctgaatgtatccaggagaggaactgcataaccaaaggggtgaccagccctcagatgtgcttattggattccagtacaaacgccaccaaagccagcccactgctctcctacaaggaaggaaagatctgcacgtgtaaaacatggggcagccttggaacatggtgttttttggagtttcctttctcacagttttccatctccccacttctttgatcagtcatgtgtccgtgacctcgttccatgacatcaggatagctgtgtttgcacaccatgctscatgttcattyggagccaggaggggttctcagtggagcctggcttagggaacagggagcgatggaagaatgccaacattagcgttggtcttctcttgtcaggaatgaaggatgcttgcacacatgcaccccctcactctcacacttgcacacatacacacacacacacacgaaatggttggtttgtcaaaactcactgtagtacataaagcttgcactctgygtcctatatctagcagcatggggtacgtttggcagttcactccattagggggtaaataatttatgaccattcatctgtttttatgaatttttttatctagacaataattgtaaataaagaactcaccatctctgttcatttaatactatgcaatggttatgctttcaa

SEQ ID NO: 1834 - DNA, 6470 bp, Homo sapiens
cgctggctgggctcagccgcggcaccagctgccgcaccgcgattacggggctgcccgccgggaaaccgtgcaggattggtggtgattttcatagccaaatgggtgacatgaccaacagcgacttttactccaaaaaccaaagaaatgagtcgagccatgggggcgagttcgggtgcacaatggaggagctccgctccctcatggagctgcggggcactgaggctgtggtcaagatcaaggagacttatggggacaccgaagccatctgccggcgcctcaaaacctcacctgttgaaggtttgccgggcaccgctccagacctggaaaagagaaagcaaatttttgggcaaaactttatacctccaaagaagccaaaaaccttcctgcagctcgtgtgggaggcgctgcaggacgtgacgctcatcatcctggagattgccgccatcatctccctggggctgtccttctaccacccgcccggcgagggcaacgaaggatgtgcgacggcccagggtggggcagagratgaaggagaggcagaggcaggttggatcgagggggccgccattctcctctcagttatctgtgtggtcctggtcacgsccttcaatgactggagcaaagagaaacagttccggggcctgcagagccgcatcgagcaggaacagaaatttaccgtggtccgggctggccaggtggtccagatccctgtggctgagatcgtggttggggacatagcccaggtcaaatatggtgacctcctccctgccgacggcctcttcatccagggcaatgacctcaagattgatgaaagctccctaactggagagtctgaccaggtgcgcaagtccgtggacaaggaccccatgctgctgtcaggaacccacgtgatggagggctcaggacggatgttgrtgactgctgtgggtgtgaactctcagactggcatcatctttaccctcctgggggctggtggtgaagaggaagagaagaaagacaaaaaagccaaacaacaggacggggcagccgccatggagatgcagcccctcaagagtgccgagggcggcgacgctgacgacaggaagaaggccagcatgcacaagaaggagaagtccgtgctgcagggcaagctcaccaagctggctgtgcagatcgggaaggcgggcttggtgatgtcagccatcacggtgatcatcctggtgctctacttcactgtggacaccttcgtggtcmacaagaagccgtggctgcctgagtgcacgcccgtctacgtgcagtactttgtcaagttcttcatcattggcgtgacggtgctggtggtcgccgtgcccgaggggctccctctggccgtcaccatctcgttggcctattcggtgaagaaaatgatgaaggacaacaacctggtacgccacctggatgcctgtgagaccatgggcaatgccacagccatctgctcagacaagacaggcacgctgaccaccaatcgcatgacagtggtacaggcctatgtcggcgacgtccactataaagagatccccgaccccagctccatcaacaccaagaccatggagctgctgatcaatgccatcgccatcaacagcgcctacaccaccaagattctgcccccagagaaggagggcgccctgcctcggcaggtgggcaacaagacggagtgcggcctgctgggcttcgtgctggacctgaagcaggactacgagcccgtgcgcagccagatgccagaggagaagttgtacaragtgtacaccttcaactccgtgcgcaagtccatgagcactgtcatcaagctgcccgacgagagcttccgcatgtacagcaagggggcttctgagatcgtgctcaagaagtgctgcaaaatcctcaatggggcgggagagcctcgtgtcttccggccccgcgaccgggacgagatggtaaagaaggtgattgagcccatggcttgcgatgggctccgcactatctgcgtggcctaccgcgacttccccagcagcccggagccggactgggacaatgagaatgacatcctcaacgaactcacctgcatctgcgtggtgggcatcgaggacccggtgcggccagaggtcccagaagccatccgcaagtgccagcgggcaggcatcacggtccgcatggtcactggcgacaatatcaacacggctcgggccatcgccatcaagtgtggcatcatccatcctggggaggactttctgtgcctcgagggcaaggagttcaacaggaggatccgcaacgagaagggggagattgagcaggagcgaattgacaagatctggccaaagctgcgggtgctggctcgctcctccccaacggacaagcataccctggttaaaggcatcatcgacagcacacacactgagcagcggcaggtggtggccgtgacgggggacgggaccaacgacgggcctgcactcaagaaggccgacgtgggcttcgccatgggcatcgcaggcactgacgtggccaaggaggcctcagacatcatcctgacagacgacaatttcagcagcatcgtcaaggcagtgatgtggggccgcaacgtctatgacagcatctccaaattcttgcagttccagctcaccgtcaacgtggtggccgtgattgtggccttcacaggcgcctgcatcacgcaggactcccctctgaaggccgtgcagatgctctgggtgaacctcatcatggacacgtttgcctcgctggcactggccactgagccgcccacggagaccctgctgctgaggaagccgtacggccgcaacaagccgctcatctccaggaccatgatgaagaacatcctgrgccatgctgtctaccagcttgccctcatcttcaccctgctctttgttggcragaagatgttccagatcgacagcgggaggaacgcgcccctgcattcgccaccctcagaacattacaccatcatcttcaacaccttcgtcatgatgcagctcttcaacgagatcaacgcccgcaagatccacggcgagcgcaatgtctttgacggcatcttccggaaccccatcttctgcaccatcgtgctgggcacctttgccatccagatagtgatcgtgcagtttggagggaagccattcagctgctctccactgcagctggaccagtggatgtggtgcatattcattgggttaggagagctcgtttggggccaggtcatcgccaccatcccgaccrgcagactcaagttcctcaaggaggcaggcaggctcacacagaaggaggagatcccggaggaggagctcaacgaggacgtggaggagatcgaccacgcggagcgggagctgcggcggggccagatcctgtggttccgaggcctgaatcggatccagacacagatccgcgtcgtgaaggcgttccgtagctctctctatgaaggtttagaaaagcctgaatctcgaacctccatccataacttcatggctcatcctgaattccggatcgaagattcccagccccacatccccctcattgatgacaccgacctggaagaagatgccgcgctcaagcagaactcgagcccgccgtcatccctcaacaagaacaacagcgccatcgacagtsggatcaacctgacgaccgacacaagcaaatcagctacctcttcaagtccagggagccccatccacagcctggagacgtcgctttagctgaggaccctctcgcctgcccgcccgccctcatggaccccgctgccacccgctttccgggcacccatccatccaggcacccaactcacccaagcagcaacgagcaacaatcggaaaccaaatactggagagaaaaccaacgtttccacccacagaccctttctctggctgcgatgctgtttgaactctttttcacttcaaggcaaggggcgggatctccactgggggcttacgggagtgagcggttttcccaaaacaagcccttcctggctcccacccagacatggaccagccatgcacccgcccagccaccacgtcccccgcatgaatgtactgtacactttcaatcctccccttgtttggtttttgggggttggggaggggtttttgtttgtttgtttgttttcttaggcgggaactgcaaacagactcttttctgagactatttatccaatccactggtctgtgagtttttgaaatgcttgcacagcatggtctcagttgtatagattaatttaataactttttgaaattgcagagcttaactcgcctagtagatttgcaccaatggaaccgaagaacttcatagacactcacaaggttatatccatttctttgtatctatatcaacgtatacttttccgagactgtatacgtccatatagataggtagatatatatatatatatataaatatatatacatggatatataaagtttctttgccggcatgttgccttgtttccgcttaaattgctctattttaacttatttatgtcctaaaagaagaatgtaatttgtttacaaacctgtagataacgtctttggctatttgtatggtttaagaacactggtggctgagatgctataaaaacagctcggcccaacagacacttcccctgggttgcatcctggatgttttatgatagccatgctctgatttttgcctgctatttccgttcaataatgtcactaccgtgagaggctcaggcagaagccaaatgctaccgagttgccatcctgaggggtttaacaacatgctccgtagacgaagggagaggaggagagaaggcttcctgggtttgcaacactaacggccatccggcccaaggatgccaggatctgcaaagcactgctcgaagacttttctctcaatgaaactcgcttgagtttactaagagcatttcaaaaataggttctctttggcactgtctgtacayagattgaggtagtgttgaaatattataaatggtattgtgttgatttttttttttatttagtaacttacaggtttgtttccttattaatggcagcatctgagctgttggcatattggatgaggatcagtatggcttgctgcttttatttttatttttgaagaagaatagcctttttctctgcactatttagatccgaatgaaccttatgatgtgtatattgagatgtactcaytgtgattttaaaccaaattgtcttcctgtagtcacaatatatactgtagccttttaacagcaagtcttgctttcccaaacagaaagccattctgaaaccctacagtatcacaggtgagaaaaggtggttattttttccccaagacaacagcactagtaatcccacttaataagagcttatttaattggatgtcagcctcttaactgctaagcactttgtgggtctcagcgtttttcataaaagaacttttgtatttaatacaaagtttgctttgagacttttcagcatatgatcttttttccataaacttgtacagtgcaaaagacattttgaataccatgatcgatgatgtcccatgcttcgaggaaaakcaaacactttccgcctctcttgcaaaatccattcctcatgctgaccctcctcacgatggctgtgtcagcccagccccttcccttctccaggcccagagaactcttccacaaacaagatgagagccactcgggaaaagagccatagtcaactgggagggcctacatctggatggcggtggaaaaacttgagggtttggggttcaaagtcagcccatcccacctggcaaaatcctcctggaaggaggaccttcaagagcgcatcacctgaatgtcgtgaagaagtatctctgaatgtatccaggagaggaactgcataaccaaaggggtgaccagccctcagatgtgcttattggattccagtacaaacgccaccaaagccagcccactgctctcctacaaggaaggaaagatctgcacgtgtaaaacatggggcagccttggaacatggtgttttttggagtttsctttctcacayttttccatctccccacttctttgatcagtcatgtgtccgtgacctcgttccatgacatcaggatagctgtgtttgcacaccatgctccatgttcattcggagccaggaggggttctcagtggagcctggcttagggaacagggagcgatggaagaatgccaacattagcgttggtcttctcttgtcaggaatgaaggatgcttgcacacaygcaccccctcactctcacacttgcacacatacacacacacacacacgaaatggttggtttgtcaaaactcactgtagtacataaagcttgcactctgcgtcctatatctagcagcatggggtacgtttggcagttcactccattagggggtaaataatttatgaccattcatctgtttttatgaatttttttatctagacaataattgtaaataaagaactcaccatctctgttcatttaatactatgcaatggttatgctttcaa

SEQ ID NO: 1835 - DNA, 7202 bp, Homo sapiens
aggtttccctgtacttagagcgtggactgtgaacccccaagcagacgagctgaacttcgtcacccagtccctagagccagcaagacatgggccccagtttccagaccctgacacctctcatttaaccagaagacgtggaggggagccaccacccctgaccatgtagatgccagttccagggagcagcatgggccccactgaatggagactcctgggtctacagccctgagcccctccggcccctggacctcgtcccacaccggaggacacctcttggagctcaccaccactgtcaccagcccgcctcggccacccccaccccccgggacccggagtcggccgcctggtgccacagctgaccagtgagggtgtgctgaggacagccacaagcagccatcacccggcagcctcttgtccagcgctgacccttgggcccagcccgagcaaggaccgcagcaracatgggtgacatgaccaacagcgacttttactccaaaaaccaaagaaatgagtcgagccatgggggcgagttcgggtgcacaatggaggagctccgctccctcatggagctgcggggcactgaggctgtggtcaagatcaaggagacttatggggacaccgaagccatctgccggcgcctcaaaacctcacctgttgaaggtttgccgggcaccgctccagacctggaaaagagaaagcaaatttttgggcaaaactttatacctccaaagaagccaaaaaccttcctgcagctygtgtgggaggcgctgcaggacgtgacgctcatcatcctggagattgccgccatcatctccctggggctgtccttctaccacccgcccggcgagggcaacgaaggatgtgcgacggcccagggtggggcagaggatgaaggagaggcagaggcaggttggatcgagggggccgccattctcctctcagttatctgtgtggtcctggtcacggccttcaatgactggagcaargagaaacagttccggggcctgcagagccgcatcgagcaggaacagaaatttaccgtggtccgggctggccaggtggtscagatccctgtggctgagatcgtggttggggacatagcccaggtcaaatatggtgacctcctccctgccgacggcctcttcatccagggcaatgacctcaagattgatgaaagctccctaactggagagtctgaccaggtgcgcaagtccgtggacaaggaccccatgctgctgtcaggaacccacgtgatggagggctcaggacggatgttggtgactgctgtgggtgtgaactctcagactggcatcatctttaccctcctgggggctggtggtgaagaggaagagaagaaagacaaaaaaggtgtgaagaagggggatggccttcagctaccagcagcagacggtgcrgcagcttcaaatgctgcagatagtgcgaatgccagcctagtcaatggtaaaatgcaggatggcaatgtggacgccagccagagcaaagccaaacarcaggacggggcagccgccatggagatgcagcccctcaagagtgccgagggcggcgacgctgacgacaggaagaaggccagcatgcacaagaaggagaagtccgtgctgcagggcaagctcaccaagctggctgtgcagatcgggaaggcgggcttggtgatgtcagccatcacggtgatcatcctggtgctctacttcactgtggacaccttcgtggtcaacaagaagccgtggctgcctgagtgcacgcccgtctacgtgcagtactttgtcaagttcttcatcattggcgtgacggtgctggtggtcgccgtgccmgaggggctccctctggccgtcaccatctcgttggcctattcggtgaagaaaatgatgaaggacaacaayctggtacgccacctggatgcctgtgagaccatgggcaatgccacagccatctgctcagacaagacaggcacgctgaccaccaatcgcatgacagtggtacaggcctatgtcggygacgtccactataaagagatccccgaccccagctccatcaacaccaagaccatggagctgctgatcaatgccatygccatcaacagcgcctacaccaccaagattctgcccccagagaaggagggcgccctgcctcggcaggtgggcaacaagacggagtgcggcctgctgggcttcgtgctggacctgaagcaggactacgagcccgtgcgcagccagatgccagaggagaagttgtacaaagtgtacaccttcaactccgtgcgcaagtccatgagcactgtcatcaagctgcccgacgagagcttccgcatgtacagcaagggggcttctgagatcrtgctcaagaagtgctgcaaaatcctcaatggggcgggagagcctcgtgtcttccggccccgcgaccgggacgagatggtaaagaaggtgattgagcccatggcttgcgatgggctccgcactatctgcgtggcctaccgcgacttccccagcagcccggagccggactgggacaatgagaatgacatcctcaacgaactcacctgcatctgcgtggtgggcatcgaggacccggtgcggccagaggtcccagaagccatccgcaagtgccagcgggcaggcatcacggtccgcatggtcactggcgacaatatcaacacggctcgggccatcgccatcaagtgtggcatcatccatcctggggaggactttctgtgcctcgagggcaaggagttcaacaggaggatccgcaacgagaagggggagattgagcaggagcgaattgacaagatctggccaaagctgcgggtgctggctcgctcctccccaacggacaagcataccctggttaaaggcatcatcgacagcacacacactgagcagcggcaggtggtggccgtgacgggggacgggaccaacgacgggcctgcactcaagaaggccgacgtgggcttcgccatgggcatcgcaggcactgacgtggccaaggaggcctcagacatcatcctgacagacgacaatttcagcagcatcgtcaaggcagtgatgtggggccgcaacgtctatgacagcatctccaaattcttgcagttccagctcaccgtcaacgtggtggccgtgattgtggccttcacaggcgcctgcatcacgcaggactcccctctgaaggccgtgcagatgctctgggtgaacctcatcatggacacgtttgcctcgctggcactggccactgagccgcccacggagaccctgctgctgaggaagccgtacggccgcaacaagccgctcatctccaggaccatgatgaagaacatcctgggccatgctgtctaccagcttgccctcatcttcaccctgctctttgttggcgagaagatgttccagatcgacagcgggaggaacgcgcccctgcattcrccaccctcagaacattacaccatcatcttcaacaccttcgtcatgatgcarctcttcaacgagatcaacgcccgcaagatccacggcgagcgcaatgtctttgacggcatcttccggaaccccatcttctgcaccatcgtgctgggcacctttgccatccagatagtgatcgtgcagtttggagggaagccattcagctgctctccactgcagctggaccagtggatgtggtgcatattcattgggttaggagagctcgtttggggccaggtcatcgccaccatcccgaccagcagactcaarttcctcaaggaggcaggcaggctcacacagaaggaggagatcccggaggaggagctcaaygaggacgtggaggagatcgaccacgcrgagcgggagctgcggcggggccagatcctgtggttccgaggcctgaatcggatccagacacagattgaagtagtcaatactttcaagagcggggcctcctttcagggggccctgcggagacagtcctcggtcaccagccagagccaggatgtagccaatctctctagccctagtcgcgtgtcgttgtccaatgctctttcctctccgaccagccttcctcctgctgcagccgggcgtgaagggctagagaaccctggacacagagttcagcaagagagagtgaaattaaaagaggttatccgcgtcgtgaaggcgttccgtagctctctctatgaaggtttagaaaagcctgaatctcgaacctccatccataacttcatggctcatcctgaattccggatcgaagattcccagccccacatccccctcattgatgacaccgacctggaagaagatgccgcgctcaagcagaactcgagcccgccgtcatccctcaacaagaacaacagcgccatcgacagtgggatcaacctgacgaccgacacaagcaaatcagctacctcttcaagtccagggagccccatccacagcctggagacgtcgctttagctgaggaccctstcgcctgcccgcccgccctcatggaccccgctgccacccgctttccgggcacccatccatccaggcacccaactcacccaagcagcaacgagcaacaatcggaaaccaaatactggagagaaaaccaacgtttccacccacagaccctttctctggctgcgatgctgtttgaactctttttcacttcaaggcaaggggcgggatctccactgggggcttacgggagtgagcggttttcccaaaacaagcccttcctggctcccacccagacatggaccagccatgcacccgcccagccaccacgtcccccgcatgaatgtactgtacactttcaatcctccccttgtttggtttttgggggttggggaggggtttttgtttgtttgtttgttttcttaggcgggaactgcaaacagactcttttctgagactatttatccaatccactggtctgtgagtttttgaaatgcttgcacagcatggtctcagttgtatagattaatttaataactttttgaaattgcagagcttaactcgcctagtagatttgcaccaatggaaccgaagaacttcatagacactcacaaggttatatccatttctttgtatctatatcaacgtatacttttccgagactgtatacgtccatatagataggtagatatatatatatatatataaatatatatacatggatatataaagtttctttgccggcatgttgccttgtttccgcttaaattgctctattttaacttatttatgtcctaaaagaagaatgtaatttgtttacaaacctgtagataacgtctttggctatttgtatggtttaagaacactggtggctgagatgctataaaaacagctcggcccaacagacacttcccctgggttgcatcctggatgttttatgatagccatgctctgatttttgcctgctatttccgttcaataatgtcactaccgtgagaggctcaggcagaagccaaatgctaccgagttgccatcctgaggggtttaacaacatgctccgtagacgaagggagaggaggagagaaggcttcctgggtttgcaacactaacggccatccggcccaaggatgccaggatctgcaaagcactgctcgaagacttttctctcaatgaaactcgcttgagtttactaagagcatttcaaaaataggttctctttggcactgtctgtacagagattgaggtagtgttgaaatattataaatggtattgtgttgatttttttttttatttagtaacttacaggtttgtttccttattaatggcagcatcygagctgttggcatattggatgaggatcagtatggcttgctgcttttatttttatttttgaagaagaatagcctttttctctgcactatttagatccgaatgaaccttatgatgtgtatattgagatgtactcagtgtgattttaaaccaaattgtcttcctgtagtcacaatatatactgtagccttttaacagcaagtcttgctttcccaaacagaaagccattctgaaaycctacagtatcacaggtgagaaaaggtggttattttttccccaagacaacagcactagtaatcccacttaataagagcttatttaattggatgtcagcctcttaactgctaagcactttgtgggtctcagcgtttttcataaaagaacttttgtatttaatacaaagtttgctttgagacttttcagcatatgatcttttttccataaacttgtacagtgcaaaagacattttgaataccatgatcgatgatgtcccatgcttcgaggaaaaccaaacactttccgcctctcttgcaaaatccattcctcatgctgaccctcctcacgatggctgtgtcagcccagccccttcccttctccaggcccagakaactcttccacaaacaagatgagagccactcgggaaaagagccatagtcaactgggagggcctacatctggatggcggtggaaaaacttgagggtttggggttcaaagtcagcccatcccacctggcaaaatcctcctggaaggaggaccttcaagagcgcatcacctgaatgtcgtgaagaagtatctctgaatgtatccaggagaggaactgcataaccaaaggggtgaccagccctcagatgtgcttattggattccagtacaaacgccaccaaagccagcccactgctctcctacaaggaaggaaagatctgcacgtgtaaaacatggggcagccttggaacatggtgttttttggagtttcctttctcacagttttccatctccccacttctttgatcagtcatgtgtccgtgacctcgttccatgacatcaggatagctgtgtttgcacaccatgctscatgttcattyggagccaggaggggttctcagtggagcctggcttagggaacagggagcgatggaagaatgccaacattagcgttggtcttctcttgtcaggaatgaaggatgcttgcacacatgcaccccctcactctcacacttgcacacatacacacacacacacacgaaatggttggtttgtcaaaactcactgtagtacataaagcttgcactctgygtcctatatctagcagcatggggtacgtttggcagttcactccattagggggtaaataatttatgaccattcatctgtttttatgaatttttttatctagacaataattgtaaataaagaactcaccatctctgttcatttaatactatgcaatggttatgctttcaa

SEQ ID NO: 1836 - DNA, 6833 bp, Homo sapiens
aggtttccctgtacttagagcgtggactgtgaacccccaagcagacgagctgaacttcgtcacccagtccctagagccagcaagacatgggccccagtttccagaccctgacacctctcatttaaccagaagacgtggaggggagccaccacccctgaccatgtagatgccagttccagggagcagcatgggccccactgaatggagactcctgggtctacagccctgagcccctccggcccctggacctcgtcccacaccggaggacacctcttggagctcaccaccactgtcaccagcccgcctcggccacccccaccccccgggacccggagtcggccgcctggtgccacagctgaccagtgagggtgtgctgaggacagccacaagcagccatcacccggcagcctcttgtccagcgctgacccttgggcccagcccgagcaaggaccgcagcaracatgggtgacatgaccaacagcgacttttactccaaaaaccaaagaaatgagtcgagccatgggggcgagttcgggtgcacaatggaggagctccgctccctcatggagctgcggggcactgaggctgtggtcaagatcaaggagacttatggggacaccgaagccatctgccggcgcctcaaaacctcacctgttgaaggtttgccgggcaccgctccagacctggaaaagagaaagcaaatttttgggcaaaactttatacctccaaagaagccaaaaaccttcctgcagctygtgtgggaggcgctgcaggacgtgacgctcatcatcctggagattgccgccatcatctccctggggctgtccttctaccacccgcccggcgagggcaacgaaggatgtgcgacggcccagggtggggcagaggatgaaggagaggcagaggcaggttggatcgagggggccgccattctcctctcagttatctgtgtggtcctggtcacggccttcaatgactggagcaargagaaacagttccggggcctgcagagccgcatcgagcaggaacagaaatttaccgtggtccgggctggccaggtggtscagatccctgtggctgagatcgtggttggggacatagcccaggtcaaatatggtgacctcctccctgccgacggcctcttcatccagggcaatgacctcaagattgatgaaagctccctaactggagagtctgaccaggtgcgcaagtccgtggacaaggaccccatgctgctgtcaggaacccacgtgatggagggctcaggacggatgttggtgactgctgtgggtgtgaactctcagactggcatcatctttaccctcctgggggctggtggtgaagaggaagagaagaaagacaaaaaagccaaacarcaggacggggcagccgccatggagatgcagcccctcaagagtgccgagggcggcgacgctgacgacaggaagaaggccagcatgcacaagaaggagaagtccgtgctgcagggcaagctcaccaagctggctgtgcagatcgggaaggcgggcttggtgatgtcagccatcacggtgatcatcctggtgctctacttcactgtggacaccttcgtggtcaacaagaagccgtggctgcctgagtgcacgcccgtctacgtgcagtactttgtcaagttcttcatcattggcgtgacggtgctggtggtcgccgtgccmgaggggctccctctggccgtcaccatctcgttggcctattcggtgaagaaaatgatgaaggacaacaayctggtacgccacctggatgcctgtgagaccatgggcaatgccacagccatctgctcagacaagacaggcacgctgaccaccaatcgcatgacagtggtacaggcctatgtcggygacgtccactataaagagatccccgaccccagctccatcaacaccaagaccatggagctgctgatcaatgccatygccatcaacagcgcctacaccaccaagattctgcccccagagaaggagggcgccctgcctcggcaggtgggcaacaagacggagtgcggcctgctgggcttcgtgctggacctgaagcaggactacgagcccgtgcgcagccagatgccagaggagaagttgtacaaagtgtacaccttcaactccgtgcgcaagtccatgagcactgtcatcaagctgcccgacgagagcttccgcatgtacagcaagggggcttctgagatcrtgctcaagaagtgctgcaaaatcctcaatggggcgggagagcctcgtgtcttccggccccgcgaccgggacgagatggtaaagaaggtgattgagcccatggcttgcgatgggctccgcactatctgcgtggcctaccgcgacttccccagcagcccggagccggactgggacaatgagaatgacatcctcaacgaactcacctgcatctgcgtggtgggcatcgaggacccggtgcggccagaggtcccagaagccatccgcaagtgccagcgggcaggcatcacggtccgcatggtcactggcgacaatatcaacacggctcgggccatcgccatcaagtgtggcatcatccatcctggggaggactttctgtgcctcgagggcaaggagttcaacaggaggatccgcaacgagaagggggagattgagcaggagcgaattgacaagatctggccaaagctgcgggtgctggctcgctcctccccaacggacaagcataccctggttaaaggcatcatcgacagcacacacactgagcagcggcaggtggtggccgtgacgggggacgggaccaacgacgggcctgcactcaagaaggccgacgtgggcttcgccatgggcatcgcaggcactgacgtggccaaggaggcctcagacatcatcctgacagacgacaatttcagcagcatcgtcaaggcagtgatgtggggccgcaacgtctatgacagcatctccaaattcttgcagttccagctcaccgtcaacgtggtggccgtgattgtggccttcacaggcgcctgcatcacgcaggactcccctctgaaggccgtgcagatgctctgggtgaacctcatcatggacacgtttgcctcgctggcactggccactgagccgcccacggagaccctgctgctgaggaagccgtacggccgcaacaagccgctcatctccaggaccatgatgaagaacatcctgggccatgctgtctaccagcttgccctcatcttcaccctgctctttgttggcgagaagatgttccagatcgacagcgggaggaacgcgcccctgcattcrccaccctcagaacattacaccatcatcttcaacaccttcgtcatgatgcarctcttcaacgagatcaacgcccgcaagatccacggcgagcgcaatgtctttgacggcatcttccggaaccccatcttctgcaccatcgtgctgggcacctttgccatccagatagtgatcgtgcagtttggagggaagccattcagctgctctccactgcagctggaccagtggatgtggtgcatattcattgggttaggagagctcgtttggggccaggtcatcgccaccatcccgaccagcagactcaarttcctcaaggaggcaggcaggctcacacagaaggaggagatcccggaggaggagctcaaygaggacgtggaggagatcgaccacgcrgagcgggagctgcggcggggccagatcctgtggttccgaggcctgaatcggatccagacacagatccgcgtcgtgaaggcgttccgtagctctctctatgaaggtttagaaaagcctgaatctcgaacctccatccataacttcatggctcatcctgaattccggatcgaagattcccagccccacatccccctcattgatgacaccgacctggaagaagatgccgcgctcaagcagaactcgagcccgccgtcatccctcaacaagaacaacagcgccatcgacagtgggatcaacctgacgaccgacacaagcaaatcagctacctcttcaagtccagggagccccatccacagcctggagacgtcgctttagctgaggaccctstcgcctgcccgcccgccctcatggaccccgctgccacccgctttccgggcacccatccatccaggcacccaactcacccaagcagcaacgagcaacaatcggaaaccaaatactggagagaaaaccaacgtttccacccacagaccctttctctggctgcgatgctgtttgaactctttttcacttcaaggcaaggggcgggatctccactgggggcttacgggagtgagcggttttcccaaaacaagcccttcctggctcccacccagacatggaccagccatgcacccgcccagccaccacgtcccccgcatgaatgtactgtacactttcaatcctccccttgtttggtttttgggggttggggaggggtttttgtttgtttgtttgttttcttaggcgggaactgcaaacagactcttttctgagactatttatccaatccactggtctgtgagtttttgaaatgcttgcacagcatggtctcagttgtatagattaatttaataactttttgaaattgcagagcttaactcgcctagtagatttgcaccaatggaaccgaagaacttcatagacactcacaaggttatatccatttctttgtatctatatcaacgtatacttttccgagactgtatacgtccatatagataggtagatatatatatatatatataaatatatatacatggatatataaagtttctttgccggcatgttgccttgtttccgcttaaattgctctattttaacttatttatgtcctaaaagaagaatgtaatttgtttacaaacctgtagataacgtctttggctatttgtatggtttaagaacactggtggctgagatgctataaaaacagctcggcccaacagacacttcccctgggttgcatcctggatgttttatgatagccatgctctgatttttgcctgctatttccgttcaataatgtcactaccgtgagaggctcaggcagaagccaaatgctaccgagttgccatcctgaggggtttaacaacatgctccgtagacgaagggagaggaggagagaaggcttcctgggtttgcaacactaacggccatccggcccaaggatgccaggatctgcaaagcactgctcgaagacttttctctcaatgaaactcgcttgagtttactaagagcatttcaaaaataggttctctttggcactgtctgtacagagattgaggtagtgttgaaatattataaatggtattgtgttgatttttttttttatttagtaacttacaggtttgtttccttattaatggcagcatcygagctgttggcatattggatgaggatcagtatggcttgctgcttttatttttatttttgaagaagaatagcctttttctctgcactatttagatccgaatgaaccttatgatgtgtatattgagatgtactcagtgtgattttaaaccaaattgtcttcctgtagtcacaatatatactgtagccttttaacagcaagtcttgctttcccaaacagaaagccattctgaaaycctacagtatcacaggtgagaaaaggtggttattttttccccaagacaacagcactagtaatcccacttaataagagcttatttaattggatgtcagcctcttaactgctaagcactttgtgggtctcagcgtttttcataaaagaacttttgtatttaatacaaagtttgctttgagacttttcagcatatgatcttttttccataaacttgtacagtgcaaaagacattttgaataccatgatcgatgatgtcccatgcttcgaggaaaaccaaacactttccgcctctcttgcaaaatccattcctcatgctgaccctcctcacgatggctgtgtcagcccagccccttcccttctccaggcccagakaactcttccacaaacaagatgagagccactcgggaaaagagccatagtcaactgggagggcctacatctggatggcggtggaaaaacttgagggtttggggttcaaagtcagcccatcccacctggcaaaatcctcctggaaggaggaccttcaagagcgcatcacctgaatgtcgtgaagaagtatctctgaatgtatccaggagaggaactgcataaccaaaggggtgaccagccctcagatgtgcttattggattccagtacaaacgccaccaaagccagcccactgctctcctacaaggaaggaaagatctgcacgtgtaaaacatggggcagccttggaacatggtgttttttggagtttcctttctcacagttttccatctccccacttctttgatcagtcatgtgtccgtgacctcgttccatgacatcaggatagctgtgtttgcacaccatgctscatgttcattyggagccaggaggggttctcagtggagcctggcttagggaacagggagcgatggaagaatgccaacattagcgttggtcttctcttgtcaggaatgaaggatgcttgcacacatgcaccccctcactctcacacttgcacacatacacacacacacacacgaaatggttggtttgtcaaaactcactgtagtacataaagcttgcactctgygtcctatatctagcagcatggggtacgtttggcagttcactccattagggggtaaataatttatgaccattcatctgtttttatgaatttttttatctagacaataattgtaaataaagaactcaccatctctgttcatttaatactatgcaatggttatgctttcaa

SEQ ID NO: 1837 - DNA, 6929 bp, Homo sapiens
cgggcacgctggctgggctcagccgcggcaccagctgccgcaccgcgattacggggctgcccgccgggaaaccgtgcaggattggtggtgattttcatagccaagagccaccacccctgaccatgtagatgccagttccagggagcagcatgggccccactgaatggagactcctgggtctacagccctgagcccctccggcccctggacctcgtcccacaccggaggacacctcttggagctcaccaccactgtcaccagcccgcctcggccacccccaccccccgggacccggagtcggccgcctggtgccacagctgaccagtgagggtgtgctgaggacagccacaagcagccatcacccggcagcctcttgtccagcgctgacccttgggcccagcccgagcaaggaccgcagcaracatgggtgacatgaccaacagcgacttttactccaaaaaccaaagaaatgagtcgagccatgggggcgagttcgggtgcacaatggaggagctccgctccctcatggagctgcggggcactgaggctgtggtcaagatcaaggagacttatggggacaccgaagccatctgccggcgcctcaaaacctcacctgttgaaggtttgccgggcaccgctccagacctggaaaagagaaagcaaatttttgggcaaaactttatacctccaaagaagccaaaaaccttcctgcagctygtgtgggaggcgctgcaggacgtgacgctcatcatcctggagattgccgccatcatctccctggggctgtccttctaccacccgcccggcgagggcaacgaaggatgtgcgacggcccagggtggggcagaggatgaaggagaggcagaggcaggttggatcgagggggccgccattctcctctcagttatctgtgtggtcctggtcacggccttcaatgactggagcaargagaaacagttccggggcctgcagagccgcatcgagcaggaacagaaatttaccgtggtccgggctggccaggtggtscagatccctgtggctgagatcgtggttggggacatagcccaggtcaaatatggtgacctcctccctgccgacggcctcttcatccagggcaatgacctcaagattgatgaaagctccctaactggagagtctgaccaggtgcgcaagtccgtggacaaggaccccatgctgctgtcaggaacccacgtgatggagggctcaggacggatgttggtgactgctgtgggtgtgaactctcagactggcatcatctttaccctcctgggggctggtggtgaagaggaagagaagaaagacaaaaaaggtgtgaagaagggggatggccttcagctaccagcagcagacggtgcrgcagcttcaaatgctgcagatagtgcgaatgccagcctagtcaatggtaaaatgcaggatggcaatgtggacgccagccagagcaaagccaaacarcaggacggggcagccgccatggagatgcagcccctcaagagtgccgagggcggcgacgctgacgacaggaagaaggccagcatgcacaagaaggagaagtccgtgctgcagggcaagctcaccaagctggctgtgcagatcgggaaggcgggcttggtgatgtcagccatcacggtgatcatcctggtgctctacttcactgtggacaccttcgtggtcaacaagaagccgtggctgcctgagtgcacgcccgtctacgtgcagtactttgtcaagttcttcatcattggcgtgacggtgctggtggtcgccgtgccmgaggggctccctctggccgtcaccatctcgttggcctattcggtgaagaaaatgatgaaggacaacaayctggtacgccacctggatgcctgtgagaccatgggcaatgccacagccatctgctcagacaagacaggcacgctgaccaccaatcgcatgacagtggtacaggcctatgtcggygacgtccactataaagagatccccgaccccagctccatcaacaccaagaccatggagctgctgatcaatgccatygccatcaacagcgcctacaccaccaagattctgcccccagagaaggagggcgccctgcctcggcaggtgggcaacaagacggagtgcggcctgctgggcttcgtgctggacctgaagcaggactacgagcccgtgcgcagccagatgccagaggagaagttgtacaaagtgtacaccttcaactccgtgcgcaagtccatgagcactgtcatcaagctgcccgacgagagcttccgcatgtacagcaagggggcttctgagatcrtgctcaagaagtgctgcaaaatcctcaatggggcgggagagcctcgtgtcttccggccccgcgaccgggacgagatggtaaagaaggtgattgagcccatggcttgcgatgggctccgcactatctgcgtggcctaccgcgacttccccagcagcccggagccggactgggacaatgagaatgacatcctcaacgaactcacctgcatctgcgtggtgggcatcgaggacccggtgcggccagaggtcccagaagccatccgcaagtgccagcgggcaggcatcacggtccgcatggtcactggcgacaatatcaacacggctcgggccatcgccatcaagtgtggcatcatccatcctggggaggactttctgtgcctcgagggcaaggagttcaacaggaggatccgcaacgagaagggggagattgagcaggagcgaattgacaagatctggccaaagctgcgggtgctggctcgctcctccccaacggacaagcataccctggttaaaggcatcatcgacagcacacacactgagcagcggcaggtggtggccgtgacgggggacgggaccaacgacgggcctgcactcaagaaggccgacgtgggcttcgccatgggcatcgcaggcactgacgtggccaaggaggcctcagacatcatcctgacagacgacaatttcagcagcatcgtcaaggcagtgatgtggggccgcaacgtctatgacagcatctccaaattcttgcagttccagctcaccgtcaacgtggtggccgtgattgtggccttcacaggcgcctgcatcacgcaggactcccctctgaaggccgtgcagatgctctgggtgaacctcatcatggacacgtttgcctcgctggcactggccactgagccgcccacggagaccctgctgctgaggaagccgtacggccgcaacaagccgctcatctccaggaccatgatgaagaacatcctgggccatgctgtctaccagcttgccctcatcttcaccctgctctttgttggcgagaagatgttccagatcgacagcgggaggaacgcgcccctgcattcrccaccctcagaacattacaccatcatcttcaacaccttcgtcatgatgcarctcttcaacgagatcaacgcccgcaagatccacggcgagcgcaatgtctttgacggcatcttccggaaccccatcttctgcaccatcgtgctgggcacctttgccatccaggtatgatcgtgcagtttggagggaagccattcagctgctctccactgcagctggaccagtggatgtggtgcatattcattgggttaggagagctcgtttggggccaggtcatcgccaccatcccgaccagcagactcaarttcctcaaggaggcaggcaggctcacacagaaggaggagatcccggaggaggagctcaaygaggacgtggaggagatcgaccacgcrgagcgggagctgcggcggggccagatcctgtggttccgaggcctgaatcggatccagacacagatccgcgtcgtgaaggcgttccgtagctctctctatgaaggtttagaaaagcctgaatctcgaacctccatccataacttcatggctcatcctgaattccggatcgaagattcccagccccacatccccctcattgatgacaccgacctggaagaagatgccgcgctcaagcagaactcgagcccgccgtcatccctcaacaagaacaacagcgccatcgacagtgggatcaacctgacgaccgacacaagcaaatcagctacctcttcaagtccagggagccccatccacagcctggagacgtcgctttagctgaggaccctstcgcctgcccgcccgccctcatggaccccgctgccacccgctttccgggcacccatccatccaggcacccaactcacccaagcagcaacgagcaacaatcggaaaccaaatactggagagaaaaccaacgtttccacccacagaccctttctctggctgcgatgctgtttgaactctttttcacttcaaggcaaggggcgggatctccactgggggcttacgggagtgagcggttttcccaaaacaagcccttcctggctcccacccagacatggaccagccatgcacccgcccagccaccacgtcccccgcatgaatgtactgtacactttcaatcctccccttgtttggtttttgggggttggggaggggtttttgtttgtttgtttgttttcttaggcgggaactgcaaacagactcttttctgagactatttatccaatccactggtctgtgagtttttgaaatgcttgcacagcatggtctcagttgtatagattaatttaataactttttgaaattgcagagcttaactcgcctagtagatttgcaccaatggaaccgaagaacttcatagacactcacaaggttatatccatttctttgtatctatatcaacgtatacttttccgagactgtatacgtccatatagataggtagatatatatatatatatataaatatatatacatggatatataaagtttctttgccggcatgttgccttgtttccgcttaaattgctctattttaacttatttatgtcctaaaagaagaatgtaatttgtttacaaacctgtagataacgtctttggctatttgtatggtttaagaacactggtggctgagatgctataaaaacagctcggcccaacagacacttcccctgggttgcatcctggatgttttatgatagccatgctctgatttttgcctgctatttccgttcaataatgtcactaccgtgagaggctcaggcagaagccaaatgctaccgagttgccatcctgaggggtttaacaacatgctccgtagacgaagggagaggaggagagaaggcttcctgggtttgcaacactaacggccatccggcccaaggatgccaggatctgcaaagcactgctcgaagacttttctctcaatgaaactcgcttgagtttactaagagcatttcaaaaataggttctctttggcactgtctgtacagagattgaggtagtgttgaaatattataaatggtattgtgttgatttttttttttatttagtaacttacaggtttgtttccttattaatggcagcatcygagctgttggcatattggatgaggatcagtatggcttgctgcttttatttttatttttgaagaagaatagcctttttctctgcactatttagatccgaatgaaccttatgatgtgtatattgagatgtactcagtgtgattttaaaccaaattgtcttcctgtagtcacaatatatactgtagccttttaacagcaagtcttgctttcccaaacagaaagccattctgaaaycctacagtatcacaggtgagaaaaggtggttattttttccccaagacaacagcactagtaatcccacttaataagagcttatttaattggatgtcagcctcttaactgctaagcactttgtgggtctcagcgtttttcataaaagaacttttgtatttaatacaaagtttgctttgagacttttcagcatatgatcttttttccataaacttgtacagtgcaaaagacattttgaataccatgatcgatgatgtcccatgcttcgaggaaaaccaaacactttccgcctctcttgcaaaatccattcctcatgctgaccctcctcacgatggctgtgtcagcccagccccttcccttctccaggcccagakaactcttccacaaacaagatgagagccactcgggaaaagagccatagtcaactgggagggcctacatctggatggcggtggaaaaacttgagggtttggggttcaaagtcagcccatcccacctggcaaaatcctcctggaaggaggaccttcaagagcgcatcacctgaatgtcgtgaagaagtatctctgaatgtatccaggagaggaactgcataaccaaaggggtgaccagccctcagatgtgcttattggattccagtacaaacgccaccaaagccagcccactgctctcctacaaggaaggaaagatctgcacgtgtaaaacatggggcagccttggaacatggtgttttttggagtttcctttctcacagttttccatctccccacttctttgatcagtcatgtgtccgtgacctcgttccatgacatcaggatagctgtgtttgcacaccatgctscatgttcattyggagccaggaggggttctcagtggagcctggcttagggaacagggagcgatggaagaatgccaacattagcgttggtcttctcttgtcaggaatgaaggatgcttgcacacatgcaccccctcactctcacacttgcacacatacacacacacacacacgaaatggttggtttgtcaaaactcactgtagtacataaagcttgcactctgygtcctatatctagcagcatggggtacgtttggcagttcactccattagggggtaaataatttatgaccattcatctgtttttatgaatttttttatctagacaataattgtaaataaagaactcaccatctctgttcatttaatactatgcaatggttatgctttcaa

SEQ ID NO: 1838 - DNA, 720 bp, Homo sapiens
atgtttgatggagaagtcccacactggtaccacttctcctgcttgcrgaaggtgggccactccatgcggcaccctgacgttgaggtggatggattctctgagctttggtgggatgaycagcagaaagtcaagaagacagctgacgctggaggagtgacgggcaaaggccagaatggaattggtagcaaggcagagaagacgctgggctgctttgtcaagaacagggaggagctgggtttccagcctgagtacagtgcgagtcagctcaagggcttcagcctcctcgctgcagaggataaagaaaccctgaagaagcagctcccaggagtcaagagtgaaggaaagagagaaggcgatgaggtggatggagtggatgaagtggccaagaagaaatctaaaaaagaaaaagacgaggatggtaagcttgaaaaggccctaaaggcccagaacgacctgatctggaacatcaaggacgagctaatgaaagtgtgctctattaatgacctgaaggagatgctcatcttcaacaggcagcaggtgccttccggggagtcggcgatcttggaccgagtagctgacagcatgacgttcggtgccctccttccctgtgaggaatgctcaggtcagctggtcttcaagagcgacacttattactgcaccggggacgtcacggcctggaccaagtgtatggtcaagacatggacacccaaccagaaggaa

SEQ ID NO: 1839 - DNA, 3009 bp, Homo sapiens
agctctactgagtggagtacaccaagarcgggcgcacctcttgcaagaaatgcagcgagagcatccccaaggactcgctccggatggccatcatggtgcaatagtccatgtttgatggagaagtcccacactggtaccacttctcctgcttgcrgaaggtgggccactccatgcggcaccctgacgttgaggtggatggattctctgagctttggtgggatgaycagcagaaagtcaagaagacagctgacgctggaggagtgacgggcaaaggccagaatggaattggtagcaaggcagagaagacgctgggtgactttgcagcagagtaggccaagtccagcagaagcaagtgcaagaggtgttatggagaagatagaaaagggccagatgcgcctatccaagaagatgctggaccctgagaagcctcagctaggcatgattgacccctggtaccacccaggctgctttgtcaagaacagggaggagctgggtttccagcctgagtacagtgcgagtcagctcaagggcttcagcctcctcgctgcagaggataaagaaaccctgaagaagcagctcccaggagtcaagagtgaaggaaagagagaaggcgatgaggtggatggagtggatgaagtggccaagaagaaatctaaaaaagaaaaagacgaggatggtaagcttgaaaaggccctaaaggcccagaacgacctgatctggaacatcaaggacgagctaatgaaagtgtgctctattaatgacctgaaggagatgctcatcttcaacaggcagcaggtgccttccggggagtcggcgatcttggaccgagtagctgacagcatgacgttcggtgccctccttccctgtgaggaatgctcaggtcagctggtcttcaagagcgacacttattactgcaccggggacgtcacggcctggaccaagtgtatggtcaagacatggacacccaaccagaaggaataggtgatcccaccgagaaatctcttaactcaagaaatttaaggttaaaaagcaggaccgtatatttcccccagaaaccagtgacccagtggcggccatgcccccaccctccacagcctccgagcctgctgccatgaacgcctctgctccagcagataagccgttatccaacatgaagatccttactcttgggaagctctcccggaacaaggatgaagtgaaggccacgattgagaaactcgggggaaagttgatggggacggccaacaaggcttctccgtgcatcagcactaaagaggaggtggaaaagaagaagaagaagatggaggaagtgaaagaagccaacatctgagctgtgtctgaggacttcctccaggacttctctgcctccaccaaggggctccaggagttgttctcagcgcacatcttgtccccctggggggcagaggtgaaggcagagcctgttgaagtcgtagccccaagagggaagtcaggagctgtgctctccaaaaaaagcaagggccaggtcaaggaggaaggtatcaacaaatctgaaaagagaatgaaattaactcttaaaggaggagcagctgtggatcctgactctggtctggaacactctgcgcatgtcctggagaaaggtgaaggtcttcagtgccaccctcagcctggtggacgtcgttaaaggaaccaactcctattacaagctgaagttgctgaaggatgacaaggaaagcaggcattggatattcaagtcctgggaccgtgtgggcacggtgatcggtagcaacaaactggaacagatgctgtccaaggaggacaccattgaacacttcatgaaattatatgaagaaaaactaggaatgcttggcactccaaaaattcacaaagtatcccaaaaagttctaccccctggagattgactacggccaggacaaagaggcggtgaagaagccsacagtaaatcctggcaccaagtccatgctccccaagccagttcaggacctcatcaagatgatctttgatgtggaaagtatgagcaaagccatggtggggtgtgagatcaaccttcagatgcccttggggaagctgagcaaaaggcaaatccaggccgcgtactccatcctcaggtccagcaggtggtgtcccagggcagcagcractctcagatcctggatytctcaaatcgcttttacatcctgatcccccacgactttgggatgaaggatcctctgctcctgaacaatgcagacagtgtgcaggccaaggyagaaatgctggacaacctgctggacattgaggtagcctacggtctgctcaggggagggtctcacgatagcaggaaggactccatcgatgtcaactatgagaagctcaaaactgacattaaggtggttgacagagattctgaagaagctgagatcatcaggaagtatgttaagaacactcatgcaaccaaccacacacgatgcatatgacttggaagtcattgatagctttaagatagagtgtgaagaggagtgccagcactacaagccctttaagcagcttcataactgaaggttgctgtggcatgggtccaggaccaccaactttgctgggatcctgtccctgggtctttggatagccctgcctgaagcacctgtgatgggctacatgtttggtaaagtgatctatttcgctgatcttgtctccaagagtgccaacgactgccatacatcttaggaagacccaatagggttaatcctgtcggaagaagttgcccttggaaacgtgtgtgaactgaagcatgcttcacatatcagcaagttacccaagggcaagcacagtgtcaaaggtttgggcaaaactactcctgacctttcagctagtatcccactggatggtgtagaggttcctcttgggaccagggtttcatctggtgtgaatgacacctgtctactgtataatgagtacattgtctatgatattgctcaggtaaatctgaaatatctgctgaaactgaaattcaattttaagacctccttgtgg

SEQ ID NO: 1840 - DNA, 1456 bp, Homo sapiens
atgcccccaccctccacagcctccgagcctgctgccatgaacgcctctgctccagcagataagccgttatccaacatgaagatccttactcttgggaagctctcccggaacaaggatgaagtgaaggccacgattgagaaactcgggggaaagttgatggggacggccaacaaggcttctccgtgcatcagcactaaagaggaggtggaaaagaagaagaagaagatggaggaagggctccaggagttgttctcagcgcacatcttgtccccctggggggcagaggtgaaggcagagcctgttgaagtcgtagccccaagagggaagtcaggagctgtgctctccaaaaaaagcaagggccaggtcaaggaggaaggtatcaacaaatctgaaaagagaatgaaattaactcttaaaggaggagcagctgtggatcctgactctggtctggaacactctgcgcatgtcctggagaaaggtgggaaggtcttcagtgccaccctcagcctggtggacgtcgttaaaggaaccaactcctattacaagctgaagttgctgaaggatgacaaggaaagcaggcattggatattcaagtcctgggaccgtgtgggcacggtgatcggtagcaacaaactggaacagatgctgtccaaggaggacaccattgaacacttcatgaaattatatgaagaaaaactaggaatgcttggcactccaaaaattcacaaagtatcccaaaaagttctaccccctggagattgactacggccaggacaaagaggcggtgaagaagccsacagtaaatcctggcaccaagtccatgctccccaagccagttcaggacctcatcaagatgatctttgatgtggaaagtatgagcaaagccatggtccagcaggtggtgtcccagggcagcagcractctcagatcctggatytctcaaatcgcttttacatcctgatcccccacgactttgggatgaaggatcctctgctcctgaacaatgcagacagtgtgcaggccaaggyagaaatgctggacaacctgctggacattgaggtagcctacggtctgctcaggggagggtctcacgatagcaggaaggactccatcgatgtcaactatgagaagctcaaaactgacattaaggaagacccaatagggttaatcctgtcggaagaagttgcccttggaaacgtgtgtgaactgaagcatgcttcacatatcagcaagttacccaagggcaagcacagtgtcaaaggtttgggcaaaactactcctgacctttcagctagtatcccactggatggtgtagaggttcctcttgggaccagggtttcatctggtgtgaatgacacctgtctactgtataatgagtacattgtctatgatattgctcaggtaaatctgaaatatctgctgaaactgaaattcaattttaagacctccttgtgg

SEQ ID NO: 1841 - DNA, 3147 bp, Homo sapiens
gtaaaaacaagttgctttccaggactgacaataggcgctggctgcagcctggcccagatgcaggacatcttggctgagagggtagctgagctcccagaggagaaaacacagacgtactgagccctcctgaagcacctgaggagtctggcaggccagcagatccggaatatggcgtccttaggggggcatgtgakaagccggcattgctattcggacctgaatccaattcttgctgtgggcaatgctaccctcaatctgatttcagcagaaggtacgcggcggattcctctaaatgaacattttcttgctgggttggcaagtgcagaccttaagccagaggaaattttggaatctgtgcatatcccgcactctcaaaagtgggaatttgtgtcagccttccgacaggctcaatgccagcagaatgccttgccccacgtgaatgccggcatgcgagtccttctcaaagaaggcacagacagcattgaggacctgagcatcgcctatggaggggtgggggctgccaccatcagtgcacacagatcctgctagcarctccttgggaggtgctggaatgagctgttgctggatgaggcttgcaggctgcttctggatgaagtctcgctcccaggctcagccccgggtggccgggtggaattcaagaggatgaggaccctagtcgtcagcttcctcttcaaattctacytagaggttctgcaggaactgaagaagctggacagccgtcatcattctgaaatttcagaccaattcctaagcgctctcgaagatttcccagtcacaataccccagggagtccaaacgtaccagagtgtggatcctcaccagcctctccaagacccagttggacaccctatcatgcacytgtcagctcttaaacatgccactggggaagccatgttttstgatgacattcccatggtggataaagaacttttcatggctttggtgaccagtagcagggctcatgcaaaaatcatatcaattgatgtgtccaaggcccttgaactacccgaagtggttgatgtgataacagctgaagacattccaggcaccaatggcgctgaaggtgacaaattgctggctgtagataaggtagtctgtgtgggccagatcatctgtgctgtggttgcagaaacagacgtacaggcaaaacgagcagctgaaaagataaagctcacctatgaagatctggaacctgtaatcttcacsatcaagccagtccacatcttactggcttttgaattctccaagacggtggctctccaagacggtggcttcccaccagcacacaccttaggagttgttctgtgcttatgcttaacaggagaggtccatgttggaggacaggaacatttttacatggaaacacaaagagtgcttgttattccaaagacagaggacaaagaactggacatttatgtgtccacacaggacccagcccacgtgcagaaaacagtgtcctctactttaaacatccccatcaacaggatcacctgtcatgtaaaacgagtgggtggaggttttggagggaaggtaggaaagccagctgtattcggggctattgcagctgtgggtgctatcaaaactggtcaccccattcgtctcatccttgatcgtgaagatgatatgctaataactggaggaaggcatccattatttggaaaatataaagtaggattcatgaacaacgggcggatcaaagctctagacattgagtgctacattaacggaggatgcacgctggatgactctgagctggtaacagaatttctaatactaaagctggaaaatgcatataaaattcrcaacctgttcaggttccagggccgtgcatgcatgacaaatttaccatccaatacggcctttcgtggatttggcttcccacraggagccctagtaacagaatcttgcatcacagctgtggcagccaaatgtggccttccaccagaaaaggtaakatatgtagataaacatatctacagatrtgtagataaaaccatctacaaacaagcattcaaccctgagaccctgataagatgttggaatgagtgtctagacaagtcttcctttcacagcagaagaatgcaagtcgaagagttcaataagaagaattattggaagaagaaaggcattgctattattcccatgaagttttcagttggctttgctgcaacaagctaccatcrggcagctgcactggttcatatctacrcagatgggtctgtgttggtcacacatggaagcaatgaactgggacaaggtattcacaccaaaatgctacaggtggccagccatgagctaaaaatacccatgtcctatatgcacatctgtgaaacgagcacagcaacagtgcccaatacaattgctacagcagcgtctatcggtgcagatgtcaacggcagagctgtgcagaatgcttgtcagatccttctgaaacgccttgagcccatcattaagaaacatccggaaggtaaatgggaagactgratagaagctgcatttgaacaaagaatcagtctctcagccactggatacttcaggggctacaaggccttcatggactgggagaagggggtgggggacccatttccttactatgtctgcagagctgcctgttctgaggttgaaaytgactgcctgacaggtgctcacaagaaaatcagaacggacatcatcatggatgcatgttgcagcctaaatccagccattgatattgggcagattgaaggtttgtttattcagggaatggggctttataccactgaagaactgaaatattccccagaaggtgtcctgtactctcggagcccagatgagtacaaaattccaaccatcactgatgtcccagaggagttcaatgtctccttgctgccatcmtcacaaaccccactaaccatctattcgtctaagggcctcggggagtctgggatgttcctggggtcatctgtgttctttgccattgctgacgctgtggccgcagtgcgaagagaaagagacatagctgaggacttcacggtgaagagcccagcaacrccagaatgggttcgaatggcctgygcagatcgattcacagaaatgatcccaagagatgaccctgagacatttaaaccttggtctatccctatagca

SEQ ID NO: 1842 - DNA, 1919 bp, Homo sapiens
cggggcggggcggggccgtgctgctcttgagcgaccggcagcgtatccggcgtggctcccgtctccgcccagtcgtaggcgctggccgctgacatgttgaggactacgcgcggcccaggcctgggccccccgctgctccaggccgcgctgggccttgggcgggctgggtggcactggcctgcgggccgggcggcgagcggggggcgcgggcgggcctggctgcagcccacgggccgggagacgggtgtgcaggtgtacaacagcctcaccgggaggaaggaacccctaatcgtggcgcacgccgaagccgcctcctggtatagctgtggaccaactgtatatgatcatgcgcaccttggccatgcttgctcatatgttagatttgatatcattcgaaggatcctaaccaaggtttttggatgcagcatagtcatggtgatgggtattacagatgtagatgataaaatcatcaaaagagccaatgagatgaatatttcccccgcttccctygccagtctttatgaggaagacttcaagcaggacatggcagccctgaaggttctcccacccacggtgtacctgagggtaaccgaaaatattcctcagataatttctttcattgaaggaatcattgctcgtgggaacgcttattcaacggcaaaaggcaatgtctacttcgatctgaagtctagaggagacaagtatggcaaattggtcggcgtggtccctggtccagtcggagagccagcggactctgacaagcgtcatgccagtgacttcgccctgtggaaggcggccaaaccccaggaggtgttctgggcctctccctggggacccgggaggccgggctggcacatcgagtgctctgccatcgctagtatggtatttggaagtcaactggatatccattcaggtgggatagatttagcttttccacatcatgaraacgaaattgcacagtgcgaagtctttcatcagtgcgagcagtggggaaattattttctgcattctgggcatttgcacgccaaaggcaaagaagaaaaaatgtccaaatcattaaagaactacattactattaaggactttctgaagaccttttcccccgatgtcttccggttcttctgcctgcggagcagctaccgctcagccatcgactacagtgacagcgccatgctccaagctcagcagctgctcctggggctgggctctttcctggaggacgcacgtgcctacatgaaggggcagctggcctgcggctccgtcagggaagcgatgctgtgggagaggctctccagcaccaagagggccgtgaaggcggccttggcagatgaytttgacacacccagggtggttgatgccatcctgggccttgcacaccacgggaatggacagctcagggcgtccctgaagraacctgaagggccgagaagtcctgctgtgtttggtgccatcatctcttactttgaacagttttttgaaactgttggaatttctctggcaaatcaacagtacgtttcaggagacggcagcgaggctaccttgcatggtgtggtggacgagctggtgcggttccggcagaaggtccggcagtttgcgctggccatgcccgaggccacgggggacgcccggcggcagcagctcctagaaaggcagcccctgctggaagcatgcgacaccctgcgccggggcctgactgcccacggcatcaacatcaaggacagaagcagtacaacatccacgtgggaactgctggatcmaaggacaaaagaccaaaaatcagcgggctgaggatggagcacagccatgaacctgctcacgacaagaygcacccatgcttctcasggtcaaggctttatgttaaagcttcctgtcggggctgctaggtcagcattaaagtaaggcaaccaacagtgtcccac

SEQ ID NO: 1843 - DNA, 886 bp, Homo sapiens
aataatgaaacaactgacagggaaagggataaagtgatgcccctgattatgcagggttttaaagatgcagccgaggaagcaggaatgtctgtaacttgtggccaaacagtgctaacctcctggattgttttgggaggagtcactacaactacaggccaatcartttatcatgccagacaatacagcgccaggggatgtgctggagtccacaaaacccctgggggcacaagtggagtggctgtgcacgactgtcactttggtcacccacgaagatgtagagttgacataccaagaagcaataatgaacatggtgaagttcaacaggaaagcttcatcatgywcacgttcagtgcccatgcagccacggacatcgtgggcattaggatttggggtcatacacagaacctgaccaagcagctgaggaatggttttttgcaattcacaacggtccctgtgctggccaagatgactgtgatgagcaaggcctgtggaaacatgttcagcctcatgcagggaacatgtccagagacagcaggaggcattctgatctgtttaccacatgagcaagcagcttggttctgtgcagagataaactcccccaaatgtggtggaggccaccaagcatggattattgggattgcagagaagggcagccatgcagctggaatcatagascaaccctggatcattgaggttgcccgagtagccactcaaaatgtgaatcccacacctggggccmcttsttaatctagacagaaatagctttttggttttgttttaaaatagatctatttcctttatcatcgcttccattaaagactataaacaataaaaatctcattgtgtctacacatctggtgaccctaagtcaatttgtgagtggata

SEQ ID NO: 1844 - DNA, 637 bp, Homo sapiens
ttctcyttcctttacagttttgatgtggacaatggcacatctgcgggacggagtcccttggatcccatgaccagcccaggatccgggctaattctccaagcaaattttgtccacagtcaacgacgggagtccttcctgtatcgatccgacagcgattatgacctctctccaaagtctatgtcccggaactcctccattgccagtgatatacacggagatgacttgattgtgactccatttgctcaggtcttggccagtctgcgaactgtacgaaacaactttgctgcattaactaatttgcaagatcgagcacctagcaaaagatcacccatgtgcaaccaaccatccatcaacaaagccaccataacaggatcctggatggaattgaacccatatacgttacttgacatgtgaaacacgtgtgaccctggcagatgatttggctgaccttgaaaactacagctgtttagtcactttgaaaacaatgcaatacaagtgatttactaggcttcagttttaaccattttatgctgactggtggaaattctaacccttcagaaagaaaaaaaaattgtgaagcaatggaaatgtaccatcctgggtattaatgtcattaattttcaatacattttctcac

SEQ ID NO: 1845 - DNA, 6803 bp, Homo sapiens
atgaaggagcagccctcatgtgccggcaccgggcatccgagcatggcggggtatggcaggatggccccctttgaactcgctagcggacccgtgaagcgcttgagaactgagtccccctttccctgtctcttcgcagaggaggcctaccagaaactggccagcgagaccctggaggagctggactggtgtctggaccagctagagaccctacagaccaggcactccgtcagtgagatggcctccaacaagtttaaaaggatgcttaatcgggagctcacccatctctctgaaatgagtcggtctggaaatcaagtgtcagagtttatatcaaacacattcttagataagcaacatgaagtggaaattccttctccaactcagaaggaaaaggagaaaaagaaaagaccaatgtctcagatcagtggagtcaagaaattgatgcacagctctagtctgactaattcaagtatcccaaggtttggagttaaaactgaacaagaagatgtccttgccaaggaactagaagatgtgaacaaatggggtcttcatgttttcagaatagcagagttgtctggtaaccggcccttgactgttatcatgcacaccatttttcaggaacgggatttattaaaaacatttaaaattccagtagatactttaattacatatcttatgactctcgaagaccattaccatgctgatgtggcctatcacaacaatatccatgctgcagatgttgtccagtctactcatgtgctattatctacacctgctttggaggctgtgtttacagatttggagattcttgcagcaatttttgccagtgcaatacatgatgtagatcatcctggtgtgtccaatcaatttctgatcaatacaaactctgaacttgccttgatgtacaatgattcctcagtcttagagaaccatcatttggctgtgggctttaaattgcttcaggaagaaaactgtgacattttccagaatttgaccaaaaaacaaagacaatctttaaggaaaatggtcattgacatcgtacttgcaacagatatgtcaaaacacatgaatctactggctgatttgaagactatggttgaaactaagaaagtgacaagctctggagttcttcttcttgataattattccgataggattcaggttcttcagaatatggtgcactgtgcagatctgagcaacccaacaaagcctctccagctgtaccgccagtggacggaccggataatggaggagttcttccgccaaggagaccgagagagggaacgtggcatggagataagccccatgtgtgacaagcacaatgcttccgtggaaaaatcacaggtgggcttcatagactatattgttcatcccctctgggagacatgggcagacctcgtccaccctgacgcccaggatattttggacactttggaggacaatcgtgaatggtaccagagcacaatccctcagagcccctctcctgcacctgatgacccagaggagggccggcagggtcaaactgagaaattccagtttgaactaactttagaggaagatggtgagtcagacacggaaaaggacagtggcagtcaagtggaagaagacactagctgcagtgactccaagactcttygtactcaagactcagagtctactgaaattccccttgatgaacaggttgaagaggaggcagtaggggaagaagaggaaagccarcctgaagcctgtgtcatagatgatcgttctcctgacacgtaacagtgcaaaaactttcatgcctttttttttttaagtagaaaaattgtttccaaagtgcatgtcacatgccacaaccacggtcacacctcactgtcatctgccaggacgtttgttgaacaaaactgaccttgactactcagtccagcgctcaggaatatcgtaaccagttttttcacctccatgtcatccgagcaaggtggacatcttcacgaacagcgtttttaacaagatttcagcttggtagagctgacaaagcagataaaatctactccaaattattttcaagagagtgtgactcatcaggcagcccaaaagtttattggacttggggtttctattcctttttatttgtttgcaatattttcagaagaaaggcattgcacagagtgaacttaatggacgaagcaacaaatatgtcaagaacaggacatagcacgaatctgttaccagtaggaggaggatgagccacagaaattgcataattttctaatttcaagtcttcctgatacatgactgaatagtgtggttcagtgagctgcactgacctctacattttgtatgatatgtaaaacagattttttgtagagcttacttttattattaaatgtattgaggtattatatttaaaaaaaactatgttcagaacttcatctgccactggttatttttttctaaggagtaacttgcaagttttcagtacaaatctgtgctacactggataaaaatctaatttatgaattttacttgcaccttatagttcatagcaattaactgatttgtagtgattcattgtttgttttatataccaatgacttcttccatattttaaaagagaaaaacaactttatgttgcaggaaaccctttttgtaagtctttctttattatttactttgcattttgtttcactctttccagataagcagagttgctcttcaccagtgtttttcttcatgtgcaaagtgactatttgttctataatacttttatgtgtgttatatcaaatgtgtcttaagcttcatgcaaactcagtcatcagttcgtgttgtctgaagcaagtgggagatatataaatacccagtagctaaaatggtcagtcttttttagatgttttcctacttagtatctcctaataacgttttgctgtgtcactagatgttcatttcacaagtgcatgtctttctaataatccacacatttcatgctctaataatccacacatttcatgctcatttttattgtttttacagccagttatagtaagaaaaaggtttttccccttgtgctgctttataatttagcgtgtgtctgaaccttatccatgtttgctagatgaggtcttgtcaaatatatcactaccattgtcaccggtgaaaagaaacaggtagttaagttagggttaacattcatttcaaccacgaggttgtatatcatgactagcttttactcttggtttacagagaaaagttaaacagccaactaggcagtttttaagaatattaacaatatattaacaaacaccaatacaactaatcctatttggttttaatgatttcaccatgggattaagaactatatcaggaacatccctgagaaacggttttaagtgtagcaactactcttccttaatggacagccacataacrtgtaggaagtcctttatcacttatcctcgatccataagcatatcttgcagaggggaactacttctttaaacacatggagggaaagaagatgatgccactggcaccagagggttagtactgtgatgcatcctaaartatttattatattggtaaaaattctggttaaataaaaaattagagatcactcttggctgatttcagcaccaggaactgtattacagttttagagattaattcctagtgtttacctgattatagcagttggcatcatggggcatttaattctgactttatccccaygtcagccttaataaagtcttctttaccttctctatgaagactttaaagcccaaataatcatttttcacattgatattcaagaattgagatagatagaagccaaagtgggtatctgacaagtggaaaatcaaacgtttaagaagaattacaactctgaaaagcatttatatgtggaacttctcaaggagcctcctggggactggaaagtaagtcatcagccaggcaaatgactcatgctgaagagagtccccatttcagtcccctgagatctagctgatgcttagatcctttgaaataaaaattatgtctttataactctgatcttttacataaagcagaakaggaatcarctagttaattgcaaggtttctactctgtttcctctgtaaagatcagatggtaatctttcaaataagaaaaaaataaagacgtatgtttgaccaagtagtttcacaagaatatttgggaacttgtttcttttaattttatttgtccctgagtgaagtctagaaagaaaggtaaagagtctagagtttattcctcttyccaaaacattctcattcctctcctccctacwcttagtatttcccccacagagtgcctagaatcttaataatgaataaaataaaaagcagcaatatgtcattaacaaatccagacctgaaagggtaaagggtttataactgcactaataaagagaggctctttttttttttccagtttgttggtttttaatggtaccgtgttgtaaagatacccactaatggacaatcaaattgcagaaaaggctcaatatccaagagacagggactaatgcactgtacaatckgcttatccttgcccttctctcttgccaaagtgtgcttcagaaatatatactgctttaaaaaagaataaaagaatatccttttacaagtggctttacatttcctaaaatgccataagaaaatgcaatatctgggtactgtatggggaaaaaaatgtccaagtttgtrtaaaaccagtgcatttcagcttgcaagttactgaacacaataatgctgttttaattttgttttatatcagttaaaattcacaataatgtagatagaacaaattacagacaaggaaagaaaaaacttgaatgaaatggattttacagaaagctttatgataatttttgaatgcattatttattttttgtgccatgcattttttttctcaccaaatgaccttacctgtaatacagtcttgtttgtctgtttacaaccatgtatttattgcaatgtacatactgtaatgttaattgtaaattatctgttcttattaaaacatcatcccatgatgggatggtgttgatatatttggaaactcttggtgagagaatgaatggtgtgtatacatactctgtacatttttcttttctcctgtaatatagtcttgtcaccttagagcttgtttatggaagattcaagaaaactataaaatacttaaagatatataaatttaaaaaaacatagctgcaggtctttggtcccagggctgtgccttaactttaaccaatattttcttctgttttgctgcatttgaaaggtaacagtggagctagggctgggcattttacatccaggcttttaattgattagaattctgccaataggtggattttacaaaaccacagacaacctctgaaagattctgagacccttttgagacagaagctcttaagtacttcttgccagggagcagcactgcatgtgtgatggttgtttgccatctgttgatcaggaactacttcagctacttgcatttgattatttcctttttttttttttttttaactcggaaacacaactggggaaatatattctttcccagtgattataaacaatctttttcttttttttaagtccttttggcttctagagctcataggaaaatggacttgatttgaaattggagccagagtttactcgtgttggttatctattcatcagcttcctgacatgttaagagaatacattaaagagaaaatactgttttttaatcctaaaatttttcttccactaagataaaccaaatgtscttacatatatgtaaacccatctatttaaacgcaaagktgggttgatgtcagtttacatagcagaaagcattcactatcctctaagatttgtttggccagcccctaaagcaggaaacatttataatggattatatggaaacatcctcccagtacttgcccagcccttgaatcatgtggcttttcagtgaaaggaaagattctttttctaggaaaaatgagcctattttattttattttattttattttttgacacaaactgtagattttagcagccctggcccaaaggaatttgattacttttgttttaaacagtacaaaggggacactataattacaaaaacatccttaactgatttgagttgtttttatttctttggatatattttcagagtggtaaattgtgtgtgagaattacaaatgattattcttttagtggtttcttagcctctcttacagcccacggggatagtactgtacatcaataccttcatatgaaatttttatatgcaatgaaaataaaagcatgggttgattctgcctatttatgactcaatcttttacaaataaaagattattcattttaaattatagttcaatcagcatgtctcttaggatactgaacgtggttgaaatgaaaggatagtgacatcataagttacttgagacatctggagaaactgaggaaaagtgagagagtaggcagggcctggagccgcagagccattgctaaccatcctgtgtgagatatcccccattctgtagctttattctcataaccctgctcaattttctttataacacttctcacagatttatatacgtgtttgtttttgttatctgtctctcccaccagaccacagctccatgagagcaaggtctttgcttaccaatatatcactagcacttaaaactatgcctggtacacagtaggttcttaatatgtgttgaatatagccatcaaattgatattggatataattcaatctgataagatattttgagatattaaagagtttttaacttgataccataaaa

SEQ ID NO: 1846 - DNA, 6910 bp, Homo sapiens
actgcacaaaggaaatgccctcactcagctacaagtgcctcctgctccgtgcggggcctcagggccccagagccccgcaccagctctgacttctcgtggttcctggggatcttggcatcgtccttaaaaatggcttttgtttgggatcctctgggagccacggtgccaggaccatctacaagagccaaatcaagattgcgtttctcaaagtcctacagttttgatgtggacaatggcacatctgcgggacggagtcccttggatcccatgaccagcccaggatccgggctaattctccaagcaaattttgtccacagtcaacgacgggagtccttcctgtatcgatccgacagcgattatgacctctctccaaagtctatgtcccggaactcctccattgccagtgatatacacggagatgacttgattgtgactccatttgctcaggtcttggccagtctgcgaactgtacgaaacaactttgctgcattaactaatttgcaagatcgagcacctagcaaaagatcacccatgtgcaaccaaccatccatcaacaaagccaccataacagaggaggcctaccagaaactggccagcgagaccctggaggagctggactggtgtctggaccagctagagaccctacagaccaggcactccgtcagtgagatggcctccaacaagtttaaaaggatgcttaatcgggagctcacccatctctctgaaatgagtcggtctggaaatcaagtgtcagagtttatatcaaacacattcttagataagcaacatgaagtggaaattccttctccaactcagaaggaaaaggagaaaaagaaaagaccaatgtctcagatcagtggagtcaagaaattgatgcacagctctagtctgactaattcaagtatcccaaggtttggagttaaaactgaacaagaagatgtccttgccaaggaactagaagatgtgaacaaatggggtcttcatgttttcagaatagcagagttgtctggtaaccggcccttgactgttatcatgcacaccatttttcaggaacgggatttattaaaaacatttaaaattccagtagatactttaattacatatcttatgactctcgaagaccattaccatgctgatgtggcctatcacaacaatatccatgctgcagatgttgtccagtctactcatgtgctattatctacacctgctttggaggctgtgtttacagatttggagattcttgcagcaatttttgccagtgcaatacatgatgtagatcatcctggtgtgtccaatcaatttctgatcaatacaaactctgaacttgccttgatgtacaatgattcctcagtcttagagaaccatcatttggctgtgggctttaaattgcttcaggaagaaaactgtgacattttccagaatttgaccaaaaaacaaagacaatctttaaggaaaatggtcattgacatcgtacttgcaacagatatgtcaaaacacatgaatctactggctgatttgaagactatggttgaaactaagaaagtgacaagctctggagttcttcttcttgataattattccgataggattcaggttcttcagaatatggtgcactgtgcagatctgagcaacccaacaaagcctctccagctgtaccgccagtggacggaccggataatggaggagttcttccgccaaggagaccgagagagggaacgtggcatggagataagccccatgtgtgacaagcacaatgcttccgtggaaaaatcacaggtgggcttcatagactatattgttcatcccctctgggagacatgggcagacctcgtccaccctgacgcccaggatattttggacactttggaggacaatcgtgaatggtaccagagcacaatccctcagagcccctctcctgcacctgatgacccagaggagggccggcagggtcaaactgagaaattccagtttgaactaactttagaggaagatggtgagtcagacacggaaaaggacagtggcagtcaagtggaagaagacactagctgcagtgactccaagactcttygtactcaagactcagagtctactgaaattccccttgatgaacaggttgaagaggaggcagtaggggaagaagaggaaagccarcctgaagcctgtgtcatagatgatcgttctcctgacacgtaacagtgcaaaaactttcatgcctttttttttttaagtagaaaaattgtttccaaagtgcatgtcacatgccacaaccacggtcacacctcactgtcatctgccaggacgtttgttgaacaaaactgaccttgactactcagtccagcgctcaggaatatcgtaaccagttttttcacctccatgtcatccgagcaaggtggacatcttcacgaacagcgtttttaacaagatttcagcttggtagagctgacaaagcagataaaatctactccaaattattttcaagagagtgtgactcatcaggcagcccaaaagtttattggacttggggtttctattcctttttatttgtttgcaatattttcagaagaaaggcattgcacagagtgaacttaatggacgaagcaacaaatatgtcaagaacaggacatagcacgaatctgttaccagtaggaggaggatgagccacagaaattgcataattttctaatttcaagtcttcctgatacatgactgaatagtgtggttcagtgagctgcactgacctctacattttgtatgatatgtaaaacagattttttgtagagcttacttttattattaaatgtattgaggtattatatttaaaaaaaactatgttcagaacttcatctgccactggttatttttttctaaggagtaacttgcaagttttcagtacaaatctgtgctacactggataaaaatctaatttatgaattttacttgcaccttatagttcatagcaattaactgatttgtagtgattcattgtttgttttatataccaatgacttcttccatattttaaaagagaaaaacaactttatgttgcaggaaaccctttttgtaagtctttctttattatttactttgcattttgtttcactctttccagataagcagagttgctcttcaccagtgtttttcttcatgtgcaaagtgactatttgttctataatacttttatgtgtgttatatcaaatgtgtcttaagcttcatgcaaactcagtcatcagttcgtgttgtctgaagcaagtgggagatatataaatacccagtagctaaaatggtcagtcttttttagatgttttcctacttagtatctcctaataacgttttgctgtgtcactagatgttcatttcacaagtgcatgtctttctaataatccacacatttcatgctctaataatccacacatttcatgctcatttttattgtttttacagccagttatagtaagaaaaaggtttttccccttgtgctgctttataatttagcgtgtgtctgaaccttatccatgtttgctagatgaggtcttgtcaaatatatcactaccattgtcaccggtgaaaagaaacaggtagttaagttagggttaacattcatttcaaccacgaggttgtatatcatgactagcttttactcttggtttacagagaaaagttaaacagccaactaggcagtttttaagaatattaacaatatattaacaaacaccaatacaactaatcctatttggttttaatgatttcaccatgggattaagaactatatcaggaacatccctgagaaacggttttaagtgtagcaactactcttccttaatggacagccacataacrtgtaggaagtcctttatcacttatcctcgatccataagcatatcttgcagaggggaactacttctttaaacacatggagggaaagaagatgatgccactggcaccagagggttagtactgtgatgcatcctaaartatttattatattggtaaaaattctggttaaataaaaaattagagatcactcttggctgatttcagcaccaggaactgtattacagttttagagattaattcctagtgtttacctgattatagcagttggcatcatggggcatttaattctgactttatccccaygtcagccttaataaagtcttctttaccttctctatgaagactttaaagcccaaataatcatttttcacattgatattcaagaattgagatagatagaagccaaagtgggtatctgacaagtggaaaatcaaacgtttaagaagaattacaactctgaaaagcatttatatgtggaacttctcaaggagcctcctggggactggaaagtaagtcatcagccaggcaaatgactcatgctgaagagagtccccatttcagtcccctgagatctagctgatgcttagatcctttgaaataaaaattatgtctttataactctgatcttttacataaagcagaakaggaatcarctagttaattgcaaggtttctactctgtttcctctgtaaagatcagatggtaatctttcaaataagaaaaaaataaagacgtatgtttgaccaagtagtttcacaagaatatttgggaacttgtttcttttaattttatttgtccctgagtgaagtctagaaagaaaggtaaagagtctagagtttattcctcttyccaaaacattctcattcctctcctccctacwcttagtatttcccccacagagtgcctagaatcttaataatgaataaaataaaaagcagcaatatgtcattaacaaatccagacctgaaagggtaaagggtttataactgcactaataaagagaggctctttttttttttccagtttgttggtttttaatggtaccgtgttgtaaagatacccactaatggacaatcaaattgcagaaaaggctcaatatccaagagacagggactaatgcactgtacaatckgcttatccttgcccttctctcttgccaaagtgtgcttcagaaatatatactgctttaaaaaagaataaaagaatatccttttacaagtggctttacatttcctaaaatgccataagaaaatgcaatatctgggtactgtatggggaaaaaaatgtccaagtttgtrtaaaaccagtgcatttcagcttgcaagttactgaacacaataatgctgttttaattttgttttatatcagttaaaattcacaataatgtagatagaacaaattacagacaaggaaagaaaaaacttgaatgaaatggattttacagaaagctttatgataatttttgaatgcattatttattttttgtgccatgcattttttttctcaccaaatgaccttacctgtaatacagtcttgtttgtctgtttacaaccatgtatttattgcaatgtacatactgtaatgttaattgtaaattatctgttcttattaaaacatcatcccatgatgggatggtgttgatatatttggaaactcttggtgagagaatgaatggtgtgtatacatactctgtacatttttcttttctcctgtaatatagtcttgtcaccttagagcttgtttatggaagattcaagaaaactataaaatacttaaagatatataaatttaaaaaaacatagctgcaggtctttggtcccagggctgtgccttaactttaaccaatattttcttctgttttgctgcatttgaaaggtaacagtggagctagggctgggcattttacatccaggcttttaattgattagaattctgccaataggtggattttacaaaaccacagacaacctctgaaagattctgagacccttttgagacagaagctcttaagtacttcttgccagggagcagcactgcatgtgtgatggttgtttgccatctgttgatcaggaactacttcagctacttgcatttgattatttcctttttttttttttttttaactcggaaacacaactggggaaatatattctttcccagtgattataaacaatctttttcttttttttaagtccttttggcttctagagctcataggaaaatggacttgatttgaaattggagccagagtttactcgtgttggttatctattcatcagcttcctgacatgttaagagaatacattaaagagaaaatactgttttttaatcctaaaatttttcttccactaagataaaccaaatgtscttacatatatgtaaacccatctatttaaacgcaaagktgggttgatgtcagtttacatagcagaaagcattcactatcctctaagatttgtttctgcaaaactttcattgctttagaattttaaaatttcaccttgtacaatggccagcccctaaagcaggaaacatttataatggattatatggaaacatcctcccagtacttgcccagcccttgaatcatgtggcttttcagtgaaaggaaagattctttttctaggaaaaatgagcctattttattttattttattttattttttgacacaaactgtagattttagcagccctggcccaaaggaatttgattacttttgttttaaacagtacaaaggggacactataattacaaaaacatccttaactgatttgagttgtttttatttctttggatatattttcagagtggtaaattgtgtgtgagaattacaaatgattattcttttagtggtttcttagcctctcttacagcccacggggatagtactgtacatcaataccttcatatgaaatttttatatgcaatgaaaataaaagcatgggttgattctgcctatttatgactcaatcttttacaaataaaagattattcattttaaattatagttcaatcagcatgtctcttaggatactgaacgtggttgaaatgaaaggatagtgacatcataagtta

SEQ ID NO: 1847 - DNA, 1774 bp, Homo sapiens
gtctgcaggctctggctcggccgccgccacccataagctacgaggaggagctttacgactgcctggatggcctgcacctggcgggcacgagcgcaaggtcgcgcagaagctcctcaatggccagcgcggaggaaaattcttccagcgatggtctcccactcagagctgaggaagcttttctactcagcagatgctgtgtgttttgatgttgacagcacggtcatcagagaagaaggaatcgatgagctagccaaaatctgtggcgttgaggacgcggtgtcagaaatgacacggcgagccatgggyggggcagtgcctttcaaagctgctctcacagagcgcttagccctcatccagccctccagggagcaggtgcagagactcatagcagagcaacccccacacctgacccccggcataagggagctggtaagtcgcctacaggagcgaaatgttcaggttttcctaatatctggtggctttaggagtattgtagagcatgttgcttcaaagctcaatatcccagcaaccaatgtatttgccaataggctgaaattctactttaacggtgaatatgcaggttttgatgagacgcagccaayagctgaatctggtggaaaaggaaaagtgattaaacttttaaaggaaaaatttcattttaagaaaataatcatgattggagatggtgccacagatatggaagcctgtcctcctgctgatgctttcattggatttggaggaaatgtgatcaggcaacaagtcaaggataacgccaaatggtatatcactgattttgtagagctgctgggagaactggaagaataacatccattgtygtacagctccaaacaacttcagatgaatttttacaagttatacagattgatactttttttttttttttaactgtagttccagtattatatgatgactattgatttcctggagaggttttttttttttttgagacagaatcttgctctgttgcccaggctggagtgcagtggcgcggtctcggctcactgcaagctctgcctcccaggttcacgccattctcctgcctcagcctcccgagtagctgggactacaggcacccgccaccacayccggctaattttttgtatttttagtagagacggggtttgaccgtgttagccaggatggtcttgatctcctgaccttgtgatccgcctgcctcagcctcccaaagtgctgggattacaggcttgggccaccgcgcccagccaatgtcctagagagttttgtgatctgaattctttatgtatatttgtagctatatttcatacaaagtgctttaagtgtggagagtcaattaaacacctttactcttagaaatacggattcggcagccttcagtgaatattggtttctctttggtatgtcaataaaagtttatccgtatgtcagaacggatttgtggaattttcagttctgcctcttgcatattggaatacccaatatttcaggtaccgtgttgaagcataaatagcccccaggcaagaaacaggcttaagactctactttgcttagtgctgggtacaatgtcctcaccccatgagcccactcccacttcctgaagccctgggacctggaaagtccttttttttacttcttgggatttgtcatatatgaaatgttacaaaagttttttgttttttgttttcctccaatataacaatagagtcttaaacaaaagtactgattaaaaatggatatttgggctcaggcctgtaatctcagcactgtgggagga

SEQ ID NO: 1848 - DNA, 2111 bp, Homo sapiens
cggtgccctaggtgccgtggggccacacgcgagtctgataagcaccctcccccggaatcatgcggtgctgtgaggcctagcgaagatgaagatagaatgcaagatctcaagagagcgttcggtggaggccctgggtctgcacagctcacctccctgggaactgctcgcccgagcgtcggagccggcgctggccccctgcagccggaaggttgcagccgcaggagccccggaggcccaggacacagggctcttgctcttgcagaatccacaggtctttcttgaggaaatctgtagacagaactttgtgctgcgtttttatctagggaaggaacagaagagtgtcgtctcctagaaatctagcactggagaaacgaggaaaattcttccagcgatggtctcccactcagagctgaggaagcttttctactcagcagatgctgtgtgttttgatgttgacagcacggtcatcagagaagaaggaatcgatgagctagccaaaatctgtggcgttgaggacgcggtgtcagaaatgacacggcgagccatgggyggggcagtgcctttcaaagctgctctcacagagcgcttagccctcatccagccctccagggagcaggtgcagagactcatagcagagcaacccccacacctgacccccggcataagggagctggtaagtcgcctacaggagcgaaatgttcaggttttcctaatatctggtggctttaggagtattgtagagcatgttgcttcaaagctcaatatcccagcaaccaatgtatttgccaataggctgaaattctactttaacggtgaatatgcaggttttgatgagacgcagccaayagctgaatctggtggaaaaggaaaagtgattaaacttttaaaggaaaaatttcattttaagaaaataatcatgattggagatggtgccacagatatggaagcctgtcctcctgctgatgctttcattggatttggaggaaatgtgatcaggcaacaagtcaaggataacgccaaatggtatatcactgattttgtagagctgctgggagaactggaagaataacatccattgtygtacagctccaaacaacttcagatgaatttttacaagttatacagattgatactgtttgcttacagttgcctattacaacttgctatagaaagttggtacaaatgatctgtactttaaactacagttaggaatcctagaagattgctttttttttttttttaactgtagttccagtattatatgatgactattgatttcctggagaggttttttttttttttgagacagaatcttgctctgttgcccaggctggagtgcagtggcgcggtctcggctcactgcaagctctgcctcccaggttcacgccattctcctgcctcagcctcccgagtagctgggactacaggcacccgccaccacayccggctaattttttgtatttttagtagagacggggtttgaccgtgttagccaggatggtcttgatctcctgaccttgtgatccgcctgcctcagcctcccaaagtgctgggattacaggcttgggccaccgcgcccagccaatgtcctagagagttttgtgatctgaattctttatgtatatttgtagctatatttcatacaaagtgctttaagtgtggagagtcaattaaacacctttactcttagaaatacggattcggcagccttcagtgaatattggtttctctttggtatgtcaataaaagtttatccgtatgtcagaacggatttgtggaattttcagttctgcctcttgcatattggaatacccaatatttcaggtaccgtgttgaagcataaatagcccccaggcaagaaacaggcttaagactctactttgcttagtgctgggtacaatgtcctcaccccatgagcccactcccacttcctgaagccctgggacctggaaagtccttttttttacttcttgggatttgtcatatatgaaatgttacaaaagttttttgttttttgttttcctccaatataacaatagagtcttaaacaaaagtactgattaaaaatggatatttgggctcaggcctgtaatctcagcactgtgggagga

SEQ ID NO: 1849 - DNA, 2520 bp, Homo sapiens
ggcattccgtgctccttggttccggcgttggagctctttggggcccagctttgcggacccgggagctcgggacgcaggcggggcttgtgctccgcgggggcagggcgtagggtgggcctcytacctcccctgatctcgcggtttgttccgtttcattggagcttcccggaccgtgtgctcgacggtgccctaggtgccgtggggccacacgcgagtctgataagcaccctcccccggaatcatgcggtgctgtgaggcctagcgaagatgaagatagaatgcaaggtagaaagtgctggatacctttagaaagctgcaggactkgtgcgatgggagttgagacgtaagaacctgcccgtccgtagggctctggatgctgctgaggcccgaggcccctatggcagatttgaaaattcacccttgtagagtcattcctgcctttgagcggactcccttttaagtttacagaagcacttgcagaactcatcagaagccaccccgcttatcagcagatctcaagagagcgttcggtggaggccctgggtctgcacagctcacctccctgggaactgctcgcccgagcgtcggagccggcgctggccccctgcagccggaaggttgcagccgcaggagccccggaggcccaggacacagggctcttgctcttgcagaatccacaggtctttcttgaggaaatctgtagacagaactttgtgctgcgtttttatctagggaaggaacagaagagtgtcgtctcctagaaatctagcactggagaaacgaggaaaattcttccagcgatggtctcccactcagagctgaggaagcttttctactcagcagatgctgtgtgttttgatgttgacagcacggtcatcagagaagaaggaatcgatgagctagccaaaatctgtggcgttgaggacgcggtgtcagaaatgacacggcgagccatgggyggggcagtgcctttcaaagctgctctcacagagcgcttagccctcatccagccctccagggagcaggtgcagagactcatagcagagcaacccccacacctgacccccggcataagggagctggtaagtcgcctacaggagcgaaatgttcaggttttcctaatatctggtggctttaggagtattgtagagcatgttgcttcaaagctcaatatcccagcaaccaatgtatttgccaataggctgaaattctactttaacggtgaatatgcaggttttgatgagacgcagccaayagctgaatctggtggaaaaggaaaagtgattaaacttttaaaggaaaaatttcattttaagaaaataatcatgattggagatggtgccacagatatggaagcctgtcctcctgctgatgctttcattggatttggaggaaatgtgatcaggcaacaagtcaaggataacgccaaatggtatatcactgattttgtagagctgctgggagaactggaagaataacatccattgtygtacagctccaaacaacttcagatgaatttttacaagttatacagattgatactgtttgcttacagttgcctattacaacttgctatagaaagttggtacaaatgatctgtactttaaactacagttaggaatcctagaagattgctttttttttttttttaactgtagttccagtattatatgatgactattgatttcctggagaggttttttttttttttgagacagaatcttgctctgttgcccaggctggagtgcagtggcgcggtctcggctcactgcaagctctgcctcccaggttcacgccattctcctgcctcagcctcccgagtagctgggactacaggcacccgccaccacayccggctaattttttgtatttttagtagagacggggtttgaccgtgttagccaggatggtcttgatctcctgaccttgtgatccgcctgcctcagcctcccaaagtgctgggattacaggcttgggccaccgcgcccagccaatgtcctagagagttttgtgatctgaattctttatgtatatttgtagctatatttcatacaaagtgctttaagtgtggagagtcaattaaacacctttactcttagaaatacggattcggcagccttcagtgaatattggtttctctttggtatgtcaataaaagtttatccgtatgtcagaacggatttgtggaattttcagttctgcctcttgcatattggaatacccaatatttcaggtaccgtgttgaagcataaatagcccccaggcaagaaacaggcttaagactctactttgcttagtgctgggtacaatgtcctcaccccatgagcccactcccacttcctgaagccctgggacctggaaagtccttttttttacttcttgggatttgtcatatatgaaatgttacaaaagttttttgttttttgttttcctccaatataacaatagagtcttaaacaaaagtactgattaaaaatggatatttgggctcaggcctgtaatctcagcactgtgggagga

SEQ ID NO: 1850 - DNA, 1867 bp, Homo sapiens
gtctgcaggctctggctcggccgccgccacccataagctacgaggaggagctttacgactgcctggatggcctgcacctggcgggcacgagcgcaaggtcgcgcagaagctcctcaatggccagcgcggaggaaaattcttccagcgatggtctcccactcagagctgaggaagcttttctactcagcagatgctgtgtgttttgatgttgacagcacggtcatcagagaagaaggaatcgatgagctagccaaaatctgtggcgttgaggacgcggtgtcagaaatgacacggcgagccatgggyggggcagtgcctttcaaagctgctctcacagagcgcttagccctcatccagccctccagggagcaggtgcagagactcatagcagagcaacccccacacctgacccccggcataagggagctggtaagtcgcctacaggagcgaaatgttcaggttttcctaatatctggtggctttaggagtattgtagagcatgttgcttcaaagctcaatatcccagcaaccaatgtatttgccaataggctgaaattctactttaacggtgaatatgcaggttttgatgagacgcagccaayagctgaatctggtggaaaaggaaaagtgattaaacttttaaaggaaaaatttcattttaagaaaataatcatgattggagatggtgccacagatatggaagcctgtcctcctgctgatgctttcattggatttggaggaaatgtgatcaggcaacaagtcaaggataacgccaaatggtatatcactgattttgtagagctgctgggagaactggaagaataacatccattgtygtacagctccaaacaacttcagatgaatttttacaagttatacagattgatactgtttgcttacagttgcctattacaacttgctatagaaagttggtacaaatgatctgtactttaaactacagttaggaatcctagaagattgctttttttttttttttaactgtagttccagtattatatgatgactattgatttcctggagaggttttttttttttttgagacagaatcttgctctgttgcccaggctggagtgcagtggcgcggtctcggctcactgcaagctctgcctcccaggttcacgccattctcctgcctcagcctcccgagtagctgggactacaggcacccgccaccacayccggctaattttttgtatttttagtagagacggggtttgaccgtgttagccaggatggtcttgatctcctgaccttgtgatccgcctgcctcagcctcccaaagtgctgggattacaggcttgggccaccgcgcccagccaatgtcctagagagttttgtgatctgaattctttatgtatatttgtagctatatttcatacaaagtgctttaagtgtggagagtcaattaaacacctttactcttagaaatacggattcggcagccttcagtgaatattggtttctctttggtatgtcaataaaagtttatccgtatgtcagaacggatttgtggaattttcagttctgcctcttgcatattggaatacccaatatttcaggtaccgtgttgaagcataaatagcccccaggcaagaaacaggcttaagactctactttgcttagtgctgggtacaatgtcctcaccccatgagcccactcccacttcctgaagccctgggacctggaaagtccttttttttacttcttgggatttgtcatatatgaaatgttacaaaagttttttgttttttgttttcctccaatataacaatagagtcttaaacaaaagtactgattaaaaatggatatttgggctcaggcctgtaatctcagcactgtgggagga

SEQ ID NO: 1851 - DNA, 4324 bp, Homo sapiens
ttcctcattggaagaagaagcatagtatagaagaaaggcaaacacaacacattcaacctctgccaccatggggaactgggctgtgaatgaggggctctccatttttgtcattctggtttgsctgsggttgaacgtcttcctctttgtctggtattaccgggtttawgatattccacctaagttcttttacacawgaaaacttcttgggtcagcactggcactggmcaksgcccctgcagcctgcctgaatttcaacygcatgctgattctcttgccagtctgtcgaaatctgctgtccttcctcaggggttccagtgcgtgctgctcaacaagagttcgaagacaactggacaggaatctcacctttcataaaatggtggcatgrakgattgcacttcactctgcgattcacaccattgcacrtctatttaatgtggaatggtgtgtgaatgccygagtcaataattctgatccttattcagtagcactctctgaacttggagacaggyaaaatgaaagttatctcaattttrctygaaagagaataarkaaccctgaaggaggcctgtacctggctgtgaccctgttggcaggcatcactggagttgtcatcacgctgtgmctcatattaattatcacttcctycaccaaaaccatccggaggtcttactttkaagtcwtttggtacacayrwcatctctttgtgatcttcttcattggccttgccatchrtggagstgwaygaattgtacgtgggyagaccgcagagagtttggctgtgcataatataacagttbvtgaayaaaaaatctcagaatrgggaaaaataaaggaatgcccaatccctcagtttgctggaaaccctcctatgacttggaaatrratagtgggtcccatgtttctgtatctctgtgagaggttggtgcggttttggcgatctcaacagaaggtggtcatcaccaaggtggtcactcaccctttcwaamccatcgagctacagatgaagaagaaggggttcaaaatggaagtggrayaatacwtttttgtcaagtgcccaaaggtgyccaarctgkagtrgyaccmttttamacwgacatycgcccctgaggaagacttctttagtatccrtatccscatcgttrgggactggacagagsggctgttcaatgctygtggctgtgataagcaggagtttcaagatgcgtrgaaactacctaagatagcggttgatgvgcyctttggcactgccagtgaagatgtgttcagctatgaggtggtgakgttagtgrragcagggattggggtcacachcttcgcatccattcycaagycagtctggtacaaatattgcaataacgccaccaatctgaagctcwaaaagatctamttctactgrctgtgccgggacacacatgcctttkagyrgtttgcagatctgctgcaactgctgkagagccagatgyaggaaaggaacaatgccggcttcctcagctacaacatctacctcactggctgrgatgagtctcaggccaatcactttgctgtgcaccatgatgaggagaaagatgtgatcacaggcckgaaayaaaagactttgtatggacggcccaactgggataatgaattcaagacaattgcaagtcaacaccctaataccagaataggagwtttcctctgtggacctgaagccttggctgaaacccygagtaaayaaagcatctccaactctgagtctggccctcggggagtgcatttcattttcaacaagraaaacttctaacttgtctcttccatgaggaaataaatgtgggttgtgctgccaaatgctcaaataatgctaattgataatataaataccccctgcttaaaaatggacaaaaagaaactataatgtaatggttttcccttaaaggaatgtcaaagattgtttgatagtgataagttacatttatgtggagctctatggttttgagagcacttttacaaacattatttcatttttttcctctcagtaatgtcagtggaagttagggaaaagattcttggactcaattttagaatcaaaagggaaaggatcaaaaggttcagtaacttccctaagattatgaaactgtgaccagatctagcccatcttactccaggtttgatactctttccacaatactgagctgcctcagaatcctcaaaatcagtttttatattccccaaaagaagaaggaaaccaaggagtagctatatatttctactttgtgtcatttttgccatcattattatcatactgaaggaaattttccagatcattaggacataatacatgttgagagtgtctcaacacttattagtgacagtattgacatctgagcatactccagtttactaatacagcagggtaactgggccagatgttctttctacagaagaatattggattgattggagttaatgtaatactcatcatttaccactgtgcttggcagagagcggatactcaagtaagttttgttaaatgaatgaatgaatttagaaccacacaatgccaagatagaattaatttaaagccttaaacaaaatttatctaaagaaataacttctattactgtcatagaccaaaggaatctgattctccctagggtcaagaacaggctaaggatactaaccaataggattgcctgaagggttctgcacattcttatttgaagcatgaaaaaagagggttggaggtggagaattaacctcctgccatgactctggctcatctagtcctgctccttgtgctataaaataaatgcagactaatttcctgcccaaagtggtcttctccagctagcccttatgaatattgaacttaggaattgtgacaaatatgtatctgatatggtcatttgttttaaataacacccaccccttattttccgtaaatacacacacaaaatggatcgcatctgtgtgactaatggtttatttgtattatatcatcatcatcatcctaaaattaacaacccagaaacaaaaatctctatacagagatcaaattcacactcaatagtatgttctgaatatatgttcaagagagagtctctaaatcactgttagtgtggccaagagcagggttttctttttgttcttagaactgctcccatttctgggaactaaaaccagttttatttgccccaccccttggagccacaaatgtttagaactcttcaacttcggtaatgaggaagaaggagaaagagctgggggaagggcagaagactggtttaggaggaaaaggaaataaggagaaaagagaatgggagagtgagagaaaataaaaaaggcaaaagggagagagaggggaagggggtctcatattggtcattccctgccccagatttcttaaagtttgatatgtatagaatataattgaaggaggtatacacatattgatgttgttttgattatctatggtattgaatcttttaaaatctggtcacaaattttgatgctgagggggattattcaagggactaggatgaactaaataagaactcagttgttctttgtcatactactattcctttcgtctcccagaatcctcagggcactgagggtaggtctgacaaataaggcctgctgtgcgaatatagcctttctgaaatgtaccaggatggtttctgcttagagacacttaggtccagcctgttcacactgcacctcaggtatcaattcatctattcaacagatatttattgtgttattactatgagtcaggctctgtttattgtttcaattctttacaccaaagtatgaactggagagggtacctcagttataaggagtctgagaatattggccctttctaacctatgtgcataattaaaaccagcttcatttgttgctccgagagtgtttctccaaggttttctatcttcaaaaccaactaagttatgaaagtagagagatctgccctgtgttatccagttatgagataaaaaatgaatataagagtgcttgtcattataaaagtttccttttttattctctcaagccaccagctgccagccaccagcagccagctgccagcctagctttttttttttttttttttttttagcacttagtatttagcatttattaacaggtactctaagaatgatgaagcattgtttttaatcttaagactatgaaggtttttcttagttcttctgcttttgcaattgtgtttgtgaaatttgaatacttgcaggctttgtatgtgaataattctagcgggggacctgggagataattcctacggggaattcttaaaactgtgctcaactattaaaatgaatgagctttc

SEQ ID NO: 1852 - DNA, 3216 bp, Homo sapiens
gcgctgcgaggggaccggaggccgcggcgagagcgcgcccagccccgccgcgatgcccgcgcgcccaggacgcctcctcccgctgctggcccggccggcggccctgactgcgctgctgctgctgctgctgggccatggcggcggcgggcgacggcgaggacggacaggacccgcacagcaagcacctgtacacggccgacatgttcacgcacgggatccagagcgccgcgcacttcgtcatgttcttcgcgccctggtgtggacactgccagcggctgcagccgacttggaatgacctgggagacaaatacaacagcatggaagatgccaaagtctatgtggctaaagtggactgcacggcccactccgacgtgtgctccgcccagggggtgcgaggataccccaccttaaagcttttcaagccaggccaagaagctgtgaagtaccagggtcctcgggacttccagacactggaaaactggatgctgcagacactgaacgaggagccagtgacaccagagccggaagtggaaccgcccagtgcccccgagctcaagcaagggctgtatgagctctcagcaagcaactttgagctgcacgttgcacaaggcgaccactttatcaagttcttcgctccgtggtgtggtcactgcaaagccctggctccaacctgggagcagctggctctgggccttgaacattccgaaactgtcaagattggcaaggttgattgtacacagcactatgaactctgctccggaaaccaggttcgtggctatcccactcttctctggttccgagatgggaaaaaggtggatcagtacaagggaaagcgggatttggagtcactgagggagtacgtggagtcgcagctgcagcgcacagagactggagcgacggagaccgtcacgccctcagaggccccggtgctggcagctgagcccgaggctgacaagggcactgtgttggcactcactgaaaataacttcgatgacaccattgcagaaggaataaccttcatcaagttttatgctccatggtgtggtcattgtaagactctggctcctacttgggaggaactctctaaaaaggaaytccctggtctggcrggggtcaagatcgccgaagtagactgcactgctgaacggaatatctgcagcaagtattcggtacgaggctaccccacgttattgcttttccgaggagggaagaaagtcagtgagcacagtggaggcagagaccttgactcgttacaccgctttgtcctgagccaagcgaaagaygaactttaggaacacagttggaggtcacctctcctgcccagctcccgcaccctgcgtttaggagttcagtcccacagaggccactgggttcccagtggtggctgttcagaaagcagaacatactaagcgtgaggtatcttctttgtgtgtgtgttttccaagccaacacactctacagattctttattaagttaagtttctctaagtaaatgtgtaactcatggtcactgtgtaaacattttcagtggcgatatatcccctttgaccttctcttgatgaaatttacatggtttcctttgagactaaaatagcrttgagggaaatgaaattgctggactatttgtggctcctgagttgagtgattttggtgaaagaaagcacatccaaagcatagtttacctgcccacgagttctggaaaggtggccttgtggcagtattgacgttcctctgatcttaaggtcacagttgactcaatactgtgttggtccgtagcatggagcagattgaaatgcaaaaacccacacctctggaagataccttcacggccgctgctggagcttctgttgctgtgaatacttctctcagtgtgagaggttagccgtgatgaaagcagcgttacttctgaccgtgcctgagtaagagaatgctgatgccataactttatgtgtcgatacttgtcaaatcagttactgttcaggggatccttctgtttctcacggggtgaaacatgtctttagttcctcatgttaacacgaagccagagcccacatgaactgttggatgtcttccttagaaagggtaggcatggaaaattccacgaggctcattctcagtatctcattaactcattgaaagattccagttgtatttgtcacctggggtgacargaccagacaggctttcccaggcctgggtatccagggaggctctgcagccctgctgaagggccctaactagagttctagagtttctgattctgtttctcagtagtccttttagaggcttgctatacttggtctgcttcaaggaggtcgaccttctaatgtatgaagaatgggatgcatttgatctcaagaccaaagacagatgtcagtgggctgctctggccctggtgtgcacggctgtggcagctgttgatgccagtgtcctctaactcatgctgtccttgtgattaaacacytctatctcccttgggaataagcacatacaggcttaagctctaagatagataggtgtttgtccttttaccatcgagctacttcccataataaccactttgcatccaacactcttcacccacctcccatacgcaaggggatgtggatacttggcccaaagtaactggtggtaggaatcttagaaacaagaccacttatactgtctgtctgaggcagaagataacagcagcatctcgaccagcctctgccttaaaggaaatctttattaatcacgtrtggttcacagataattctttttttaaaaaaacccaacctcctagagaagcacaactgtcaagagtcttgtrcacacaacttcagctttgcatcacgagtcttgtattccaagaaaatcaaagtggtacaatttgtttgtttacactatgatactttctaaataaactctttttttttaaaagtctggtctttccttcaatgttacagcaaaacagatataaaatagacaataaattatagtttatatttacaaaaaaagctgtaagtgcaaacagttgtagattataaatgtattatttaatcagtttagtatgaaattgccttcccagtacatgattgtgaaaaagacatttagaaaatattctaaaatttaatctgagcctcactttctacaagggaaatcatgatttccgttcataaacagcatgctcatccccctaacaccattcttataagctgggcaccctcattttatttt

SEQ ID NO: 1853 - DNA, 2960 bp, Homo sapiens
gtgtggacactgccagcggctgcagccgacttggaatgacctgggagacaaatacaacagcatggaagatgccaaagtctatgtggctaaagtggactgcacggcccactccgacgtgtgctccgcccagggggtgcgaggataccccaccttaaagcttttcaagccaggccaagaagctgtgaagtaccagggtcctcgggacttccagacactggaaaactggatgctgcagacactgaacgaggagccagtgacaccagagccggaagtggaaccgcccagtgcccccgagctcaagcaagggctgtatgagctctcagcaagcaactttgagctgcacgttgcacaaggcgaccactttatcaagttcttcgctccgtggtgtggtcactgcaaagccctggctccaacctgggagcagctggctctgggccttgaacattccgaaactgtcaagattggcaaggttgattgtacacagcactatgaactctgctccggaaaccaggttcgtggctatcccactcttctctggttccgagatgggaaaaaggtggatcagtacaagggaaagcgggatttggagtcactgagggagtacgtggagtcgcagctgcagcgcacagagactggagcgacggagaccgtcacgccctcagaggccccggtgctggcagctgagcccgaggctgacaagggcactgtgttggcactcactgaaaataacttcgatgacaccattgcagaaggaataaccttcatcaagttttatgctccatggtgtggtcattgtaagactctggctcctacttgggaggaactctctaaaaaggaaytccctggtctggcrggggtcaagatcgccgaagtagactgcactgctgaacggaatatctgcagcaagtattcggtacgaggctaccccacgttattgcttttccgaggagggaagaaagtcagtgagcacagtggaggcagagaccttgactcgttacaccgctttgtcctgagccaagcgaaagaygaactttaggaacacagttggaggtcacctctcctgcccagctcccgcaccctgcgtttaggagttcagtcccacagaggccactgggttcccagtggtggctgttcagaaagcagaacatactaagcgtgaggtatcttctttgtgtgtgtgttttccaagccaacacactctacagattctttattaagttaagtttctctaagtaaatgtgtaactcatggtcactgtgtaaacattttcagtggcgatatatcccctttgaccttctcttgatgaaatttacatggtttcctttgagactaaaatagcrttgagggaaatgaaattgctggactatttgtggctcctgagttgagtgattttggtgaaagaaagcacatccaaagcatagtttacctgcccacgagttctggaaaggtggccttgtggcagtattgacgttcctctgatcttaaggtcacagttgactcaatactgtgttggtccgtagcatggagcagattgaaatgcaaaaacccacacctctggaagataccttcacggccgctgctggagcttctgttgctgtgaatacttctctcagtgtgagaggttagccgtgatgaaagcagcgttacttctgaccgtgcctgagtaagagaatgctgatgccataactttatgtgtcgatacttgtcaaatcagttactgttcaggggatccttctgtttctcacggggtgaaacatgtctttagttcctcatgttaacacgaagccagagcccacatgaactgttggatgtcttccttagaaagggtaggcatggaaaattccacgaggctcattctcagtatctcattaactcattgaaagattccagttgtatttgtcacctggggtgacargaccagacaggctttcccaggcctgggtatccagggaggctctgcagccctgctgaagggccctaactagagttctagagtttctgattctgtttctcagtagtccttttagaggcttgctatacttggtctgcttcaaggaggtcgaccttctaatgtatgaagaatgggatgcatttgatctcaagaccaaagacagatgtcagtgggctgctctggccctggtgtgcacggctgtggcagctgttgatgccagtgtcctctaactcatgctgtccttgtgattaaacacytctatctcccttgggaataagcacatacaggcttaagctctaagatagataggtgtttgtccttttaccatcgagctacttcccataataaccactttgcatccaacactcttcacccacctcccatacgcaaggggatgtggatacttggcccaaagtaactggtggtaggaatcttagaaacaagaccacttatactgtctgtctgaggcagaagataacagcagcatctcgaccagcctctgccttaaaggaaatctttattaatcacgtrtggttcacagataattctttttttaaaaaaacccaacctcctagagaagcacaactgtcaagagtcttgtrcacacaacttcagctttgcatcacgagtcttgtattccaagaaaatcaaagtggtacaatttgtttgtttacactatgatactttctaaataaactctttttttttaaaagtctggtctttccttcaatgttacagcaaaacagatataaaatagacaataaattatagtttatatttacaaaaaaagctgtaagtgcaaacagttgtagattataaatgtattatttaatcagtttagtatgaaattgccttcccagtacatgattgtgaaaaagacatttagaaaatattctaaaatttaatctgagcctcactttctacaagggaaatcatgatttccgttcataaacagcatgctcatccccctaacaccattcttataagctgggcaccctcattttatttt

SEQ ID NO: 1854 - DNA, 3161 bp, Homo sapiens
gagcgcgcccagccccgccgcgatgcccgcgcgcccaggacgcctcctcccgctgctggcccggccggcggcggcggacgggccccccgcggcagacggcgaggacggacaggacccgcacagcaagcacctgtacacggccgacatgttcacgcacgggatccagagcgccgcgcacttcgtcatgttcttcgcgccctggtgtggacactgccagcggctgcagccgacttggaatgacctgggagacaaatacaacagcatggaagatgccaaagtctatgtggctaaagtggactgcacggcccactccgacgtgtgctccgcccagggggtgcgaggataccccaccttaaagcttttcaagccaggccaagaagctgtgaagtaccagggtcctcgggacttccagacactggaaaactggatgctgcagacactgaacgaggagccagtgacaccagagccggaagtggaaccgcccagtgcccccgagctcaagcaagggctgtatgagctctcagcaagcaactttgagctgcacgttgcacaaggcgaccactttatcaagttcttcgctccgtggtgtggtcactgcaaagccctggctccaacctgggagcagctggctctgggccttgaacattccgaaactgtcaagattggcaaggttgattgtacacagcactatgaactctgctccggaaaccaggttcgtggctatcccactcttctctggttccgagatgggaaaaaggtggatcagtacaagggaaagcgggatttggagtcactgagggagtacgtggagtcgcagctgcagcgcacagagactggagcgacggagaccgtcacgccctcagaggccccggtgctggcagctgagcccgaggctgacaagggcactgtgttggcactcactgaaaataacttcgatgacaccattgcagaaggaataaccttcatcaagttttatgctccatggtgtggtcattgtaagactctggctcctacttgggaggaactctctaaaaaggaaytccctggtctggcrggggtcaagatcgccgaagtagactgcactgctgaacggaatatctgcagcaagtattcggtacgaggctaccccacgttattgcttttccgaggagggaagaaagtcagtgagcacagtggaggcagagaccttgactcgttacaccgctttgtcctgagccaagcgaaagaygaactttaggaacacagttggaggtcacctctcctgcccagctcccgcaccctgcgtttaggagttcagtcccacagaggccactgggttcccagtggtggctgttcagaaagcagaacatactaagcgtgaggtatcttctttgtgtgtgtgttttccaagccaacacactctacagattctttattaagttaagtttctctaagtaaatgtgtaactcatggtcactgtgtaaacattttcagtggcgatatatcccctttgaccttctcttgatgaaatttacatggtttcctttgagactaaaatagcrttgagggaaatgaaattgctggactatttgtggctcctgagttgagtgattttggtgaaagaaagcacatccaaagcatagtttacctgcccacgagttctggaaaggtggccttgtggcagtattgacgttcctctgatcttaaggtcacagttgactcaatactgtgttggtccgtagcatggagcagattgaaatgcaaaaacccacacctctggaagataccttcacggccgctgctggagcttctgttgctgtgaatacttctctcagtgtgagaggttagccgtgatgaaagcagcgttacttctgaccgtgcctgagtaagagaatgctgatgccataactttatgtgtcgatacttgtcaaatcagttactgttcaggggatccttctgtttctcacggggtgaaacatgtctttagttcctcatgttaacacgaagccagagcccacatgaactgttggatgtcttccttagaaagggtaggcatggaaaattccacgaggctcattctcagtatctcattaactcattgaaagattccagttgtatttgtcacctggggtgacargaccagacaggctttcccaggcctgggtatccagggaggctctgcagccctgctgaagggccctaactagagttctagagtttctgattctgtttctcagtagtccttttagaggcttgctatacttggtctgcttcaaggaggtcgaccttctaatgtatgaagaatgggatgcatttgatctcaagaccaaagacagatgtcagtgggctgctctggccctggtgtgcacggctgtggcagctgttgatgccagtgtcctctaactcatgctgtccttgtgattaaacacytctatctcccttgggaataagcacatacaggcttaagctctaagatagataggtgtttgtccttttaccatcgagctacttcccataataaccactttgcatccaacactcttcacccacctcccatacgcaaggggatgtggatacttggcccaaagtaactggtggtaggaatcttagaaacaagaccacttatactgtctgtctgaggcagaagataacagcagcatctcgaccagcctctgccttaaaggaaatctttattaatcacgtrtggttcacagataattctttttttaaaaaaacccaacctcctagagaagcacaactgtcaagagtcttgtrcacacaacttcagctttgcatcacgagtcttgtattccaagaaaatcaaagtggtacaatttgtttgtttacactatgatactttctaaataaactctttttttttaaaagtctggtctttccttcaatgttacagcaaaacagatataaaatagacaataaattatagtttatatttacaaaaaaagctgtaagtgcaaacagttgtagattataaatgtattatttaatcagtttagtatgaaattgccttcccagtacatgattgtgaaaaagacatttagaaaatattctaaaatttaatctgagcctcactttctacaagggaaatcatgatttccgttcataaacagcatgctcatccccctaacaccattcttataagctgggcaccctcattttatttt

SEQ ID NO: 1855 - DNA, 3041 bp, Homo sapiens
gagcgcgcccagccccgccgcgatgcccgcgcgcccaggacgcctcctcccgctgctggcccggccggcggcggcggacgggccccccgcggcagacggcgaggacggacaggacccgcacagcaagcacctgtacacggccgacatgttcacgcacgggatccagagcgccgcgcacttcgtcatgttcttcgcgccctggtgtggacactgccagcggctgcagccgacttggaatgacctgggagacaaatacaacagcatggaagatgccaaagtctatgtggctaaagtggactgcacggcccactccgacgtgtgctccgcccagggggtgcgaggataccccaccttaaagcttttcaagccaggccaagaagctgtgaagtaccagggtcctcgggacttccagacactggaaaactggatgctgcagacactgaacgaggagccagtgacaccagagccggaagtggaaccgcccagtgcccccgagctcaagcaagggctgtatgagctctcagcaagcaactttgagctgcacgttgcacaaggcgaccactttatcaagttcttcgctccgtggtgtggtcactgcaaagccctggctccaacctgggagcagctggctctgggccttgaacattccgaaactgtcaagattggcaaggttgattgtacacagcactatgaactctgctccggaaaccaggttcgtggctatcccactcttctctggttccgagatgggaaaaaggtggatcagtacaagggaaagcgggatttggagtcactgagggagtacgtggagtcgcagctgcagcgcacagagactggagcgacggagaccgtcacgccctcagaggccccggtgctggcagctgagcccgaggctgacaagggcactgtgttggcactcactgaaaataacttcgatgacaccattgcagaaggaataaccttcatcaagttttatgctccatggtgtggtcattgtaagactctggctcctacttgggaggaactctctaaaaaggaaytccctggtctggcrggggtcaagatcgccgaagtagactgcactgctgaacggaatatctgcagcaagtattcggtacgaggctaccccacgttattgcttttccgaggagggaagaaagtcagtgagcacagtggaggcagagaccttgactcgttacaccgctttgtcctgagccaagcgaaagaygaactttaggaacacagttggaggtcacctctcctgcccagctcccgcaccctgcgtttaggagttcagtcccacagaggccactgggttcccagtggtggctgttcagaaagcagaacatactaagcgtgaggtatcttctttgtgtgtgtgttttccaagccaacacactctacagattctttattaataaatgtgtaactcatggtcactgtgtaaacattttcagtggcgatatatcccctttgaccttctcttgatgaaatttacatggtttcctttgagactaaaatagcrttgagggaaatgaaattgctggactatttgtggctcctgagttgagtgattttggtgaaagaaagcacatccaaagcatagtttacctgcccacgagttctggaaaggtggccttgtggcagtattgacgttcctctgatcttaaggtcacagttgactcaatactgtgttggtccgtagcatggagcagattgaaatgcaaaaacccacacctctggaagataccttcacggccgctgctggagcttctgttgctgtgaatacttctctcagtgtgagaggttagccgtgatgaaagcagcgttacttctgaccgtgcctgagtaagagaatgctgatgccataactttatgtgtcgatacttgtcaaatcagttactgttcaggggatccttctgtttctcacggggtgaaacatgtctttagttcctcatgttaacacgaagccagagcccacatgaactgttggatgtcttccttagaaagggtaggcatggaaaattccacgaggctcattctcagtatctcattaactcattgaaagattccagttgtatttgtcacctggggtgacargaccagacaggctttcccaggcctgggtatccagggaggctctgcagccctgctgaagggccctaactagagttctagagtttctgattctgtttctcagtagtccttttagaggcttgctatacttggtctgcttcaaggaggtcgaccttctaatgtatgaagaatgggatgcatttgatctcaagaccaaagtcccttgggaataagcacatacaggcttaagctctaagatagataggtgtttgtccttttaccatcgagctacttcccataataaccactttgcatccaacactcttcacccacctcccatacgcaaggggatgtggatacttggcccaaagtaactggtggtaggaatcttagaaacaagaccacttatactgtctgtctgaggcagaagataacagcagcatctcgaccagcctctgccttaaaggaaatctttattaatcacgtrtggttcacagataattctttttttaaaaaaacccaacctcctagagaagcacaactgtcaagagtcttgtrcacacaacttcagctttgcatcacgagtcttgtattccaagaaaatcaaagtggtacaatttgtttgtttacactatgatactttctaaataaactctttttttttaaaagtctggtctttccttcaatgttacagcaaaacagatataaaatagacaataaattatagtttatatttacaaaaaaagctgtaagtgcaaacagttgtagattataaatgtattatttaatcagtttagtatgaaattgccttcccagtacatgattgtgaaaaagacatttagaaaatattctaaaatttaatctgagcctcactttctacaagggaaatcatgatttccgttcataaacagcatgctcatccccctaacaccattcttataagctgggcaccctcattttatttt

SEQ ID NO: 1856 - DNA, 1637 bp, Homo sapiens
tgcacccaagatcccaaggtagggcagtttctctcagaactattgaccaaccgaaaggaraacattcctttcaagctttctgaagactgtctttacctcaatatttacactcctgctgacttgaccaagaaaaacaggctgctggtgatggtgtggatccacagaggggggctgatggtgggcaccgcatcaacctctgatgggcgggtactcgcagcccatgaaaacgtggtggtggtgaccattcagcactgcctgggcatctggggattcttcaggaccagctctggtcatgtcagccctcaggagaccttaactgggttcctcattgtagcagacaagcaccttcataattggacactacctaccctctcactccccagccacactagtccactagcctctgagcttttgtatgtggtgttccctctgcctggaatgcttagtgtggtggctcatgcctgtaatttctgagagtgatgtggccctcactcctgctctggtggagaagggtgacgtcaagcccctggctgagcaaattgctaacactgttgggtgtgaaaccaccaactcagctgtcatggctcactgtctgcggcagaagatggaagaggagctcttggagacgacattgaaaatggtagggtgggaatcacaggcgctgtgttgctctctcccccagagttacccccacacacccacggtgattgatggagtggtgctgccaaaaacacccgaggagcttcaagctgaaaggaagttccacactgtcccctacattgtcggatttaacagraaggaatttggctggtttcttccaacattgatgagctatctactctccgaagggaaactggaccagaagacagccatgtcactcttctggaagtcctatccctttgttcgcattcctaaggaattgattccagaagccattgagaagtacttaggaggaacagatgaccctgtcaagaagaaagacctgttcctggacttaatggggracgtactgttcggtgtcccatctgtgactgtggcccggaaccacagagatgctggagcacccacctacatgtatgagtttcagtaccgtccaagcttctcatcagacatgaaacccaagacggtgataggagaccacrgggatgagctcttctccgtccttggggccccatctttaaaagagggtgcctcagaagaggagatcagacttagcaagatggtgatgaaattctgggccaactttgctcgcaatggaaaccccaatggagaagggctgccgcactggccagagtacaaccaggaggaagggtacctgcagattggtgctaacacccaggcagcccagaagctgaaggacaaggaagtagctttytggaccaaactcttcgccaagaaggcagtggagaagccaccccagatagaacacattgcgctgtgaacggaaggtccatccagcctcgggaacctggaggagcaaagactggggtcttttgccaaagggattgcaggttcagaaggcatcttaccatggctggggaattgtctggtggtggggggtagggggcaraggtcatgaaggagcaagttttttatttgtgaccycagctttggcaataaaagatcttttgaaagcc

SEQ ID NO: 1857 - DNA, 1497 bp, Homo sapiens
actagaagcccagggagatctgaggaaagggagggcttttctgatctctcccaattagaggattaggcaattggcagcgcagggcggtaactctgggcggggctgggctccagggctggacagcacagtccctctgagctgcacggagacctcgcaggcccccggaactgtcgcccttccaggatgtggctccctgctcttgtcctggccactctcgctgcttccgcggcttgggggcatccgtcctcgccacctgtggtggacaccgtgcatggcaaagtgytggggaagttcgtcagcttagaaggatttgcacagcctgtggccrttttcctgggaatcccttttgscaagccgcctcttggacccctgaggtttactccaccgcagcctgcagaaccatggarctttgtgaagaatgccacctcgtaccctcctatgtkcacccaagatcccaaggcggggcagttamtctcagagctatttacaaacygaaargagaacattcctctcaagctttctgaagactgtctttacctcaatatttacactcctgctgacttgaccaagaaaaacaggctgccggtgatggtgtggatccacggaggggggctgatggtgggtgcggcatcaacctatgatgggctggcccttgctgcccatgaaaacgtggtggtggtgaccattcaatatcgcctgggcatctggggattcttcagcacaggggatgaacacagccgggggaactggggtcacctggaccaggtggctgccctgcrctgggtccaggamaacattgccagctttggagggaacccaggctctgtgaccatctttggagagtcagcgggaggagaaagtgtctctgttcttgttttgtctccattggccaagaacctcttccaccgggccatttctgagagtggcgtggccctcacttctgttctggtgaagaaaggtgatgtcaagcccttggctgagcaaattgctatcactgctgggtgcaaaaccaccacctctgctgtcatggttcactgcctgcgacagaagacggaagaggagctcttggagacgacattgaaaatgaaattcttatctctggacttacagggagaccccagagagagtcaaccccttctgggcactgtgattgatgggatgctgctgctgaaaacacctgaagagcttcaagctgaaaggaatttccacactgtcccctacatggtcggaattaacaagcaggagtttggctggttgattccaatgcagttgatgagctatccactctccgaagggcaactggaccagaagacagccatgtcactcctgtggaagtcctatccccttgtttgcattgctaaggaactgattccagaagccactgagaaatacttaggaggaacagacgacactgtcaaaaagaaagacctgttcctggacttgatagcagatgtgatgtttggtgtcccatctgtgattgtggcccggaaccacaga

SEQ ID NO: 1858 - DNA, 393 bp, Homo sapiens
atgtggctccctgctcttgtcctggccactctcgctgcttccgcggcttgggtcctcccctgccgcaagtcccagctcctccatgatgcccgcaatcagaaggccttgccccctcttctaattcctagactgccttatgggtacctctcccaggacatggccacttccttcccagctgtagccccagggcatccgtcctcgccacctgtggtggacaccgtgcatggcaaagtgytggggaagttcgtcagcttagaaggatttgcacagcctgtggccrttttcctgggaatcccttttgscaagccgcctcttggacccctgaggtttactccaccgcagcctgcagaaccatggarctttgtgaagaatgccacctcgtaccctcctatg

SEQ ID NO: 1859 - DNA, 1500 bp, Homo sapiens
actagaagcccagggagatctgaggaaagggagggcttttctgatctctcccaattagaggattaggcaattggcagcgcagggcggtaactctgggcggggctgggctccagggctggacagcacagtccctctgagctgcacggagacctcgcaggcccccggaactgtcgcccttccaggatgtggctccctgctcttgtcctggccactctcgctgcttccgcggcttgggggcatccgtcctcgccacctgtggtggacaccgtgcatggcaaagtgytggggaagttcgtcagcttagaaggatttgcacagcctgtggccrttttcctgggaatcccttttgscaagccgcctcttggacccctgaggtttactccaccgcagcctgcagaaccatggarctttgtgaagaatgccacctcgtaccctcctatgtkcacccaagatcccaaggcggggcagttamtctcagagctatttacaaacygaaargagaacattcctctcaagctttctgaagactgtctttacctcaatatttacactcctgctgacttgaccaagaaaaacaggctgccggtgatggtgtggatccacggaggggggctgatggtgggtgcggcatcaacctatgatgggctggcccttgctgcccatgaaaacgtggtggtggtgaccattcaatatcgcctgggcatctggggattcttcagcacaggggatgaacacagccgggggaactggggtcacctggaccaggtggctgccctgcrctgggtccaggamaacattgccagctttggagggaacccaggctctgtgaccatctttggagagtcagcgggaggagaaagtgtctctgttcttgttttgtctccattggccaagaacctcttccaccgggccatttctgagagtggcgtggccctcacttctgttctggtgaagaaaggtgatgtcaagcccttggctgagcaaattgctatcactgctgggtgcaaaaccaccacctctgctgtcatggttcactgcctgcgacagaagacggaagaggagctcttggagacgacattgaaaatgaaattcttatctctggacttacagggagaccccagagagagtcaaccccttctgggcactgtgattgatgggatgctgctgctgaaaacacctgaagagcttcaagctgaaaggaatttccacactgtcccctacatggtcggaattaacaagcaggagtttggctggttgattccaatgttgatgagctatccactctccgaagggcaactggaccagaagacagccatgtcactcctgtggaagtcctatccccttgtttgcattgctaaggaactgattccagaagccactgagaaatacttaggaggaacagacgacactgtcaaaaagaaagacctgttcctggacttgatagcagatgtgatgtttggtgtcccatctgtgattgtggcccggaaccacagaggtgag

SEQ ID NO: 1860 - DNA, 5699 bp, Homo sapiens
attattttggcagccttatccaagtctggtacaacatagcaaagagaacaggctatgaaataagatggcaagaaagaaatttagtggattggaaatctctctgattgtcctttttgtcatagttactataatagctattgccttaattgttgttttagcaactaagacacctgctgttgatgaaattagtgattctacttcaactccagctactactcgtgtgactacaaatccttctgattcaggaaaatgtccaaatgtgttaaatgatcctgtcaatgtgagaataaactgcattccagaacaattcccaacagagggaatttgtgcacagagaggctgctgctggaggccgtggaatgactctcttattccttggtgcttcttcgttgataatcatggttataacgttcaagacatgacaacaacaagtattggagttgaagccaaattaaacaggataccttcacctacactatttggaaatgacatcaacagtgttctcttcacaactcaaaatcagacacccaatcgtttccggttcaagattactgatccaaataatagaagatatgaagttcctcatcagtatgtaaaagagtttactggacccacagtttctgatacgttgtatgatgtgaaggttgcccaaaacccatttagcatccaagttattaggaaaagcaacggtaaaactttgtttgacaccagcattggtcccttagtgtactctgaccagtacttacagatctcagcccgtcttccaagtgattatatttatggtattggagaacaagttcataagagatttcgtcatgatttatcctggaaaacatggccaatttttactcgagaccaacttcctggtgataataataataatttatacggccatcaaacattctttatgtgtattgaagatacatctggaaagtcattcggtgtttttttaatgaatagcaatgcaatggagatttttatccagcctactccaatagtaacatatagagttaccggtggcattctggatttttacatccttctaggagatacaccagaacaagtagttcaacagtatcaacagcttgttggactaccagcaatgccagcatattggaatcttgggattccaactaagtcgctggaattagtatggccaggattaacagtataccctgatttcactaatccaaactgcattgattggtgggcaaatgaatgcagtattttccatcaagaagtgcaatatgatggactttggattgacatgaatgaagtttccagctttattcaaggttcaacaaaaggatgtaatgtaaacaaattgaattatccaccgtttactcctgatattcttgacaaactcatgtattccaaaacaatttgcatggatgctgtgcagaactggggtaaacagtatgatgttcatagcctctatggatacagcatggctatagccacagagcaagctgtacaaaaagtttttcctaataagagaagcttcattcttacccgctcaacatttgctggatctggaagacatgctgctcattggttaggagacaatactgcttcatgggaacaaatggaatggtctataactggaatgctggagttcagtttgtttggaatacctttggttggagcagacatctgtggatttgtggctgaaaccacagaagaactttgcagaagatggatgcaacttggggcattttatccattttccagaaaccataattctgacggatatgaacatcaggatcctgcattttttgggcagaattcacttttggttaaatcatcaaggcagtatttaactattcgctacaccttattacccttcctctacactctgttttataaagcccatgtgtttggagaaacagtagcaagaccagttcttcatgagttttatgaggatacgaacagctggattgaggacactgagtttttgtggggccctgcattacttattactcctgttctaaaacagggagcagatactgtgagtgcctacatccctgatgctatttggtatgattatgaatctggtgcaaaaaggccatggaggaaacaacgggttgatatgtatcttccagcagacaaaataggattacatcttagaggaggttatatcatccccattcaagaaccagatgtaacaacaacagcaagccgtaagaatcctctaggacttatagtcgcattaggtgaaaacaacacagccaaaggagactttttctgggatgatggagaaactaaagatacaatacaaaatggcaactacatattatatacattttcagtttctaataacacattagatattgtgtgcacacattcatcatatcaggaaggaactaccttagcatttcagactgtaaaaatccttgggttgacagacagtgttacagaagttagagtggcggaaaataatcaaccaatgaacgctcattccaatttcacttatgatgcttctaaccaggttctcctaattgcagatctcaaacttaatcttggaagaaactttagtgttcaatggaatcaaattttctcagaaaatgaaagatttaattgttatccagatgcagatttggcaactgaacaaaagtgcacacaacgtggctgtgtatggagaacgggttcttctctatccaaagcacctgagtgttactttcccagacaagataactcttattcagtcaactcagctcgctattcatccatgggtataacagctgacctccaactaaatactgcaaatgccagaataaagttaccttctgaccccatctcaactcttcgtgtggaggtgaaatatcacaaaaatgatatgttgcagtttaagatttatgatccccaaaagaagagatatgaagtaccagtaccgttaaacattccaaccaccccaataagtacttatgaagacagactttatgatgtggaaatcaaggaaaatccttttggcatccagattcgacggagaagcagtggaagagtcatttgggattcttggctgcctggatttgcttttaatgaccagttcattcaaatatcgactcgcctgccatcagaatatatatatggttttggggaagtggaacatacagcatttaagcgagatctgaactggaatacttggggaatgttcacaagagaccaaccccctggttacaaacttaattcctatggatttcatccctattacatggctctggaagaggagggcaatgctcatggtgttttcttactcaacagcaatgcaatggatgttacattccagccaactcctgctctaacttaccgtacagttggagggatcttggatttttatatgtttttgggcccaactccagaagttgcaacaaagcaataccatgaagtaattggccatccagtcatgccagcttattgggctttgggattccaattatgtcgttatggatatgcaaatacttcagaggttcgggaattatatgacgctatggtggctgctaacatcccctatgatgttcagtacacagacattgactacatggaaaggcagctagactttacaattggtgaagcattccaggaccttcctcagtttgttgacaaaataagaggagaaggaatgagatacattattatcctggatccagcaatttcaggaaatgaaacaaagacttaccctgcatttgaaagaggacagcagaatgatgtctttgtcaaatggccaaacaccaatgacatttgttgggcaaaggtttggccagatttgcccaacataacaatagataaaactctaacggaagatgaagctgttaatgcttccagagctcatgtagctttcccagatttcttcaggacttccacagcagagtggtgggccagagaaattgtggacttttacaatgaaaagatgaagtttgatggtttgtggattgatatgaatgagccatcaagttttgtaaatggaacaactactaatcaatgcagaaatgacgaactaaattatccaccttatttcccagaactcacaaaaagaactgatggattacatttcagaacaatttgcatggaagctgagcagattcttagtgatggaacatcagttttgcattacgatgttcacaatctctatggatggtcacagatgaaacctactcatgatgcattgcagaagacaactggaaaaagagggattgtaatttctcgttccacgtatcctactagtggacgatggggaggacactggcttggagacaactatgcacgatgggacaacatggacaaatcaatcattggtatgatggaatttagtctgtttggaatrtcatatactggagcagacatctgtggttttttcaacaactcagaatatcatctctgtacccgctggatgcaacttggagcattttatccatactcaaggaatcacaacattgcaaatactagaagacaagatcccgcttcctggaatgaaacttttgctgaaatgtcaaggaatattctaaatattagatacaccttattgccctatttttacacacaaatgcatgaaattcatgctaatggtggcactgttatccgaccccttttgcatgagttctttgatgaaaaaccaacctgggatatattcaagcagttcttatggggtccagcatttatggttaccccagtactggaaccttatgttcaaactgtaaatgcctacgtccccaatgctcggtggtttgactaccatacaggcaaagatattggcgtcagaggacaatttcaaacatttaatgcttcttatgacacaataaacctacatgtccgtggtggtcacatcctaccatgtcaagagccagctcaaaacacattttacagtcgacaaaaacacatgaagctcattgttgctgcagatgataatcagatggcacagggttctctgttttgggatgatggagagagtatagacacctatgaaagagacctatatttatctgtacaatttaatttaaaccagaccaccttaacaagcactatattgaagagaggttacataaataaaagtgaaacgaggcttggatcccttcatgtatgggggaaaggaactactcctgtcaatgcagttactctaacgtataacggaaataaaaattcgcttccttttaatgaagacactaccaacatgatattacgtattgatctgaccacacacaatgttactctagaagaaccaatagaaatcaactggtcatgaagatcaccatcaattttagttgtcaatgggaaaaaacaccaggatttaagtttcacagcacttacaattttccctcttcacttggttcttgtactctacaaaatatagctttcataacatcgaaaagttattttgtagcgtacatcaatgataatgctaattttattatagtaatgtgacttggattcaattttaaggcatatttaacaaaatttgaatagccctatttatccttgttaagtatcagctacaattgtaaactagttactaaacatgtatgtaaatagctaagatataatttaaacgtgatttttaaattaaataaaatttttatgtaattatatatactatatttttctcaatgtttagcagatttaagatatgtaacaacaattatttgaagatttaattacttcttagtatgtgcatttaattagaaaaagagaataaaaaatgtaagtgt

SEQ ID NO: 1861 - DNA, 1995 bp, Homo sapiens
ctttaagggccgcttctcggagcgcagggagccgcggagtccggggcgtgggagacttccatgggcggagcgagggcaggagtgggcgggccgtaggcggagctccgtccgcgccctcccggcgcaccgcctgcggggcggtgactggcccagccgcaccgcgtctcccgccttctccgcagccccgcaggccccgggccctgtcattcccagcgctgccctgtcttgcgttccagtgttccagcttctgcgagatgaccctcaaggcgagcgagggcgagagtgggggcagcatgcacacggcgctctccgacctctacctggagcatttgctgcagaagcgtagtcggccagaggctgtatcgcatccattgaatactgtgaccgaggacatgtacaccaacgggtctcctgccccaggtagccctgcccaggtcaagggacaggaggtgcggaaagtgcgactcatacagtttgagaaggtcacagaagagcccatgggaatcackctgaagctgaatgaaaaacagtcctgtacggtggccagaattcttcatggtggcatgatccatagacaaggctcccttcacgtgggggatgagatcctagaaatcaatggcacaaatgtgacaaatcattcagtggatcagctgcagaaggcgatgaaagaaaccaaaggaatgatctcattaaaagtaattcccaaccagcaaagccgtcttcctgcactacagatgttcatgagagcgcagtttgactatgatcccaaaaaggacaatctgatcccttgcaaggaggcgggactgaagtttgctactggggacattatccagattatcaacaaggatgacagcaattggtggcagggacgggtggaaggctyctccaaggagtcagcaggattgatcccttcccctgagctgcaggaatggcgagtggcaagtatggctcagtcagctcctagcgaagccccgagctgcagtccctttgggaagaagaagaagtacaaagacaaatatctggccaagcacagctcgatttttgatcagttggatgttgtttcctacgaggaagtcgttcggctccctgcattcaagaggaagaccctggtgctgatcggagccagtggggtgggtcgcagccacattaagaatgccctgctcagccagaatccggagaagtttgtgtaccctgtcccatatacaacacggccgccaaggaagagtgaggaagatgggaaggagtaccactttatctcaacggaggagatgacgaggaacatctctgccaatgagttcttggagtttggcagctaccaaggcaacatgtttggcaccaaatttgaaacagtgcaccagatccataagcagaacaagattgccatccttgacattgagccccagaccctgaaaattgttcggacagcagaactttcgcctttcattgtgttcattgcacctactgaccagggcactcagacagaagccctgcagcagctgcagaaggactctgaggccatccgcagccagtacgctcactactttgacctctcactggtcaataatggtgttgatgaaacccttaagaaattacaasaagccttcgaccaagcgtgcagttctccacagtgggtgcctgtctcctgggtttactaagcttgtagaatgggggaacccactgtatgcccctctccagcatttggaattccacccgccttgctttaagacaaacagggctgctccaactagttttgtgtcagcttccagctctctgcagctatcctaattcagccagtaaggttcagtcttcttgctcaggctcctgaagggttgattctcctgatagatggggccccactgatctggatttgaaaaggatttctagaaattgggggtaagaagtactaccaaaatgtaaacatctgtgcaatagaatgatgtctgctctagggaaaccttcaaaagcaataaaaatgctgtgttgaaatgccaatga

SEQ ID NO: 1862 - DNA, 1607 bp, Homo sapiens
cgtctcccgccttctccgcagccccgcaggccccgggccctgtcattcccagcgctgccctgtcttgcgttccagtgttccagcttctgcgagatgaccctcaaggcgagcgagggcgagagtgggggcagcatgcacacggcgctctccgacctctacctggagcatttgctgcagaagcgtagtcggccagagatgttcatgagagcgcagtttgactatgatcccaaaaaggacaatctgatcccttgcaaggaggcgggactgaagtttgctactggggacattatccagattatcaacaaggatgacagcaattggtggcagggacgggtggaaggctyctccaaggagtcagcaggattgatcccttcccctgagctgcaggaatggcgagtggcaagtatggctcagtcagctcctagcgaagccccgagctgcagtccctttgggaagaagaagaagtacaaagacaaatatctggccaagcacagctcgatttttgatcagttggatgttgtttcctacgaggaagtcgttcggctccctgcattcaagaggaagaccctggtgctgatcggagccagtggggtgggtcgcagccacattaagaatgccctgctcagccagaatccggagaagtttgtgtaccctgtcccatatacaacacggccgccaaggaagagtgaggaagatgggaaggagtaccactttatctcaacggaggagatgacgaggaacatctctgccaatgagttcttggagtttggcagctaccaaggcaacatgtttggcaccaaatttgaaacagtgcaccagatccataagcagaacaagattgccatccttgacattgagccccagaccctgaaaattgttcggacagcagaactttcgcctttcattgtgttcattgcacctactgaccagggcactcagacagaagccctgcagcagctgcagaaggactctgaggccatccgcagccagtacgctcactactttgacctctcactggtcaataatggtgttgatgaaacccttaagaaattacaasaagccttcgaccaagcgtgcagttctccacagtgggtgcctgtctcctgggtttactaagcttgtagaatgggggaacccactgtatgcccctctccagcatttggaattccacccgccttgctttaagacaaacagggctgctccaactagttttgtgtcagcttccagctctctgcagctatcctaattcagccagtaaggttcagtcttcttgctcaggctcctgaagggttgattctcctgatagatggggccccactgatctggatttgaaaaggatttctagaaattgggggtaagaagtactaccaaaatgtaactgctaatcaagggtgatgcacagcaaaagcaatggrccccatccctytaaagcctgccctcctttgccytcaactgtatatgctgggtatttcatttgtctttttattttggagaaagcgtttttaactgcaactttctataatgccaaaatgacacatctgtgcaatagaatgatgtctgctctagggaaaccttcaaaagcaataaaaatgctgtgttgaaatgcc

SEQ ID NO: 1863 - DNA, 2146 bp, Homo sapiens
ctttaagggccgcttctcggagcgcagggagccgcggagtccggggcgtgggagacttccatgggcggagcgagggcaggagtgggcgggccgtaggcggagctccgtccgcgccctcccggcgcaccgcctgcggggcggtgactggcccagccgcaccgcgtctcccgccttctccgcagccccgcaggccccgggccctgtcattcccagcgctgccctgtcttgcgttccagtgttccagcttctgcgagatgaccctcaaggcgagcgagggcgagagtgggggcagcatgcacacggcgctctccgacctctacctggagcatttgctgcagaagcgtagtcggccagaggctgtatcgcatccattgaatactgtgaccgaggacatgtacaccaacgggtctcctgccccaggtagccctgcccaggtcaagggacaggaggtgcggaaagtgcgactcatacagtttgagaaggtcacagaagagcccatgggaatcackctgaagctgaatgaaaaacagtcctgtacggtggccagaattcttcatggtggcatgatccatagacaaggctcccttcacgtgggggatgagatcctagaaatcaatggcacaaatgtgacaaatcattcagtggatcagctgcagaaggcgatgaaagaaaccaaaggaatgatctcattaaaagtaattcccaaccagcaaagccgtcttcctgcactacagatgttcatgagagcgcagtttgactatgatcccaaaaaggacaatctgatcccttgcaaggaggcgggactgaagtttgctactggggacattatccagattatcaacaaggatgacagcaattggtggcagggacgggtggaaggctyctccaaggagtcagcaggattgatcccttcccctgagctgcaggaatggcgagtggcaagtatggctcagtcagctcctagcgaagccccgagctgcagtccctttgggaagaagaagaagtacaaagacaaatatctggccaagcacagctcgatttttgatcagttggatgttgtttcctacgaggaagtcgttcggctccctgcattcaagaggaagaccctggtgctgatcggagccagtggggtgggtcgcagccacattaagaatgccctgctcagccagaatccggagaagtttgtgtaccctgtcccatatacaacacggccgccaaggaagagtgaggaagatgggaaggagtaccactttatctcaacggaggagatgacgaggaacatctctgccaatgagttcttggagtttggcagctaccaaggcaacatgtttggcaccaaatttgaaacagtgcaccagatccataagcagaacaagattgccatccttgacattgagccccagaccctgaaaattgttcggacagcagaactttcgcctttcattgtgttcattgcacctactgaccagggcactcagacagaagccctgcagcagctgcagaaggactctgaggccatccgcagccagtacgctcactactttgacctctcactggtcaataatggtgttgatgaaacccttaagaaattacaasaagccttcgaccaagcgtgcagttctccacagtgggtgcctgtctcctgggtttactaagcttgtagaatgggggaacccactgtatgcccctctccagcatttggaattccacccgccttgctttaagacaaacagggctgctccaactagttttgtgtcagcttccagctctctgcagctatcctaattcagccagtaaggttcagtcttcttgctcaggctcctgaagggttgattctcctgatagatggggccccactgatctggatttgaaaaggatttctagaaattgggggtaagaagtactaccaaaatgtaactgctaatcaagggtgatgcacagcaaaagcaatggrccccatccctytaaagcctgccctcctttgccytcaactgtatatgctgggtatttcatttgtctttttattttggagaaagcgtttttaactgcaactttctataatgccaaaatgacacatctgtgcaatagaatgatgtctgctctagggaaaccttcaaaagcaataaaaatgctgtgttgaaatgcc

SEQ ID NO: 1864 - DNA, 2086 bp, Homo sapiens
ctttaagggccgcttctcggagcgcagggagccgcggagtccggggcgtgggagacttccatgggcggagcgagggcaggagtgggcgggccgtaggcggagctccgtccgcgccctcccggcgcaccgcctgcggggcggtgactggcccagccgcaccgcgtctcccgccttctccgcagccccgcaggccccgggccctgtcattcccagcgctgccctgtcttgcgttccagtgttccagcttctgcgagatgaccctcaaggcgagcgagggcgagagtgggggcagcatgcacacggcgctctccgacctctacctggagcatttgctgcagaagcgtagtcggccagaggctgtatcgcatccattgaatactgtgaccgaggacatgtacaccaacgggtctcctgccccaggtagccctgcccaggtcaagggacaggaggtgcggaaagtgcgactcatacagtttgagaaggtcacagaagagcccatgggaatcackctgaagctgaatgaaaaacagtcctgtacggtggccagaattcttcatggtggcatgatccatagacaaggctcccttcacgtgggggatgagatcctagaaatcaatggcacaaatgtgacaaatcattcagtggatcagctgcagaaggcgatgaaagaaaccaaaggaatgatctcattaaaagtaattcccaaccagcaaagccgtcttcctgcactacaggaggcgggactgaagtttgctactggggacattatccagattatcaacaaggatgacagcaattggtggcagggacgggtggaaggctyctccaaggagtcagcaggattgatcccttcccctgagctgcaggaatggcgagtggcaagtatggctcagtcagctcctagcgaagccccgagctgcagtccctttgggaagaagaagaagtacaaagacaaatatctggccaagcacagctcgatttttgatcagttggatgttgtttcctacgaggaagtcgttcggctccctgcattcaagaggaagaccctggtgctgatcggagccagtggggtgggtcgcagccacattaagaatgccctgctcagccagaatccggagaagtttgtgtaccctgtcccatatacaacacggccgccaaggaagagtgaggaagatgggaaggagtaccactttatctcaacggaggagatgacgaggaacatctctgccaatgagttcttggagtttggcagctaccaaggcaacatgtttggcaccaaatttgaaacagtgcaccagatccataagcagaacaagattgccatccttgacattgagccccagaccctgaaaattgttcggacagcagaactttcgcctttcattgtgttcattgcacctactgaccagggcactcagacagaagccctgcagcagctgcagaaggactctgaggccatccgcagccagtacgctcactactttgacctctcactggtcaataatggtgttgatgaaacccttaagaaattacaasaagccttcgaccaagcgtgcagttctccacagtgggtgcctgtctcctgggtttactaagcttgtagaatgggggaacccactgtatgcccctctccagcatttggaattccacccgccttgctttaagacaaacagggctgctccaactagttttgtgtcagcttccagctctctgcagctatcctaattcagccagtaaggttcagtcttcttgctcaggctcctgaagggttgattctcctgatagatggggccccactgatctggatttgaaaaggatttctagaaattgggggtaagaagtactaccaaaatgtaactgctaatcaagggtgatgcacagcaaaagcaatggrccccatccctytaaagcctgccctcctttgccytcaactgtatatgctgggtatttcatttgtctttttattttggagaaagcgtttttaactgcaactttctataatgccaaaatgacacatctgtgcaatagaatgatgtctgctctagggaaaccttcaaaagcaataaaaatgctgtgttgaaatgcc

SEQ ID NO: 1865 - DNA, 2095 bp, Homo sapiens
ctttaagggccgcttctcggagcgcagggagccgcggagtccggggcgtgggagacttccatgggcggagcgagggcaggagtgggcgggccgtaggcggagctccgtccgcgccctcccggcgcaccgcctgcggggcggtgactggcccagccgcaccgcgtctcccgccttctccgcagccccgcaggccccgggccctgtcattcccagcgctgccctgtcttgcgttccagtgttccagcttctgcgagatgaccctcaaggcgagcgagggcgagagtgggggcagcatgcacacggcgctctccgacctctacctggagcatttgctgcagaagcgtagtcggccagaggctgtatcgcatccattgaatactgtgaccgaggacatgtacaccaacgggtctcctgccccaggtagccctgcccaggtcaagggacaggagggaatcackctgaagctgaatgaaaaacagtcctgtacggtggccagaattcttcatggtggcatgatccatagacaaggctcccttcacgtgggggatgagatcctagaaatcaatggcacaaatgtgacaaatcattcagtggatcagctgcagaaggcgatgaaagaaaccaaaggaatgatctcattaaaagtaattcccaaccagcaaagccgtcttcctgcactacagatgttcatgagagcgcagtttgactatgatcccaaaaaggacaatctgatcccttgcaaggaggcgggactgaagtttgctactggggacattatccagattatcaacaaggatgacagcaattggtggcagggacgggtggaaggctyctccaaggagtcagcaggattgatcccttcccctgagctgcaggaatggcgagtggcaagtatggctcagtcagctcctagcgaagccccgagctgcagtccctttgggaagaagaagaagtacaaagacaaatatctggccaagcacagctcgatttttgatcagttggatgttgtttcctacgaggaagtcgttcggctccctgcattcaagaggaagaccctggtgctgatcggagccagtggggtgggtcgcagccacattaagaatgccctgctcagccagaatccggagaagtttgtgtaccctgtcccatatacaacacggccgccaaggaagagtgaggaagatgggaaggagtaccactttatctcaacggaggagatgacgaggaacatctctgccaatgagttcttggagtttggcagctaccaaggcaacatgtttggcaccaaatttgaaacagtgcaccagatccataagcagaacaagattgccatccttgacattgagccccagaccctgaaaattgttcggacagcagaactttcgcctttcattgtgttcattgcacctactgaccagggcactcagacagaagccctgcagcagctgcagaaggactctgaggccatccgcagccagtacgctcactactttgacctctcactggtcaataatggtgttgatgaaacccttaagaaattacaasaagccttcgaccaagcgtgcagttctccacagtgggtgcctgtctcctgggtttactaagcttgtagaatgggggaacccactgtatgcccctctccagcatttggaattccacccgccttgctttaagacaaacagggctgctccaactagttttgtgtcagcttccagctctctgcagctatcctaattcagccagtaaggttcagtcttcttgctcaggctcctgaagggttgattctcctgatagatggggccccactgatctggatttgaaaaggatttctagaaattgggggtaagaagtactaccaaaatgtaactgctaatcaagggtgatgcacagcaaaagcaatggrccccatccctytaaagcctgccctcctttgccytcaactgtatatgctgggtatttcatttgtctttttattttggagaaagcgtttttaactgcaactttctataatgccaaaatgacacatctgtgcaatagaatgatgtctgctctagggaaaccttcaaaagcaataaaaatgctgtgttgaaatgcc

SEQ ID NO: 1866 - DNA, 1650 bp, Homo sapiens
caggccccgggccctgtcattcccagcgctgccctgtcttgcgttccagtgttccagcttctgcgagatgaccctcaaggcgagcgagggcgagagtgggggcagcatgcacacggcgctctccgacctctacctggagcatttgctgcagaagcgtagtcggccagagaaagaaaccaaaggaatgatctcattaaaagtaattcccaaccagcaaagccgtcttcctgcactacagatgttcatgagagcgcagtttgactatgatcccaaaaaggacaatctgatcccttgcaaggaggcgggactgaagtttgctactggggacattatccagattatcaacaaggatgacagcaattggtggcagggacgggtggaaggctyctccaaggagtcagcaggattgatcccttcccctgagctgcaggaatggcgagtggcaagtatggctcagtcagctcctagcgaagccccgagctgcagtccctttgggaagaagaagaagtacaaagacaaatatctggccaagcacagctcgatttttgatcagttggatgttgtttcctacgaggaagtcgttcggctccctgcattcaagaggaagaccctggtgctgatcggagccagtggggtgggtcgcagccacattaagaatgccctgctcagccagaatccggagaagtttgtgtaccctgtcccatatacaacacggccgccaaggaagagtgaggaagatgggaaggagtaccactttatctcaacggaggagatgacgaggaacatctctgccaatgagttcttggagtttggcagctaccaaggcaacatgtttggcaccaaatttgaaacagtgcaccagatccataagcagaacaagattgccatccttgacattgagccccagaccctgaaaattgttcggacagcagaactttcgcctttcattgtgttcattgcacctactgaccagggcactcagacagaagccctgcagcagctgcagaaggactctgaggccatccgcagccagtacgctcactactttgacctctcactggtcaataatggtgttgatgaaacccttaagaaattacaasaagccttcgaccaagcgtgcagttctccacagtgggtgcctgtctcctgggtttactaagcttgtagaatgggggaacccactgtatgcccctctccagcatttggaattccacccgccttgctttaagacaaacagggctgctccaactagttttgtgtcagcttccagctctctgcagctatcctaattcagccagtaaggttcagtcttcttgctcaggctcctgaagggttgattctcctgatagatggggccccactgatctggatttgaaaaggatttctagaaattgggggtaagaagtactaccaaaatgtaactgctaatcaagggtgatgcacagcaaaagcaatggrccccatccctytaaagcctgccctcctttgccytcaactgtatatgctgggtatttcatttgtctttttattttggagaaagcgtttttaactgcaactttctataatgccaaaatgacacatctgtgcaatagaatgatgtctgctctagggaaaccttcaaaagcaataaaaatgctgtgttgaaatgcc

SEQ ID NO: 1867 - DNA, 4414 bp, Homo sapiens
ctgcgctgaagtgagtcaagtgatgaaatcaagactacacgggaaggaagctcacgaaacctaactggtgacagaagctgctgaaccctgcccgaagaaaccacatgagccagcagttgctgccctcccgaagtggtcctcggaggcagcgcaccccttcattttggcgaaccgaggaggaagggaggaaccgtgtgggggaaatctagaacttctggttccccaaggacccagcagactgtgttctggctacaaggtgatcactgccaccaggtcagtgcaggattcctccaatgtagatgggccgggagccacaacttgcgcggagcagcagcctcgccgaccactcagagagaagccgcgcgacagccaggcttggcccggacggcgcccccaccctgcgcgcgcgatccaaggttctcacctggagcgctcaggtactaccattaaagataccttcttctcagcaaatctatgataaaaaatataagtaacagaagaagaaataactgttatttgtcaagtgacaagcttttaatgtcagaatggctcacctaaagcgactagtaaaattacacattaaaagacattaccataaaaagttctggaagcttggtgcagtaatttttttctttataatagttttggttttaatgcaaagagaagtaagtgttcaatattccaaagaggaatcaaggatggaaaggaacatgaaaaacaaaaacaagatgttggatttaatgctagaagctgtaaacaatattaaggatgccatgccaaaaatgcaaataggagcacctgtcaggcaaaacattgatgctggtgagagaccttgtttgcaaggatattatacagcagcagaattgaagcctgtccttgaccgtccacctcaggattcaaatgcacctggtgcttctggtaaagcattcaagacaaccaatttaagtgttgaagagcaaaaggaaaaggaacgtggggaagctaaacactgctttaatgctttcgcaagtgacaggatttctttgcaccgagatcttggaccagacactcgacctcctgaatgtattgaacaaaaatttaagcgctgccctcccctgcccaccaccagtgtcataatagtttttcataatgaagcgtggtccacgttgcttagaactgtccacagtgtgctctattcttcacctgcaatactgctgaaggaaatcattttggtggatgatgctagtgtaratgagtacttacatgataaactagatgaatatgtaaaacaattttctatagtaaaaatagtcagacaaagagaaagaaaaggtctgatcactgctcggttgctaggagcaacagtcgcaacagctgaaacgctcacatttttagatgctcactgtgagtgtttctatggttggctagaacctctgttggccagaatagctgagaactacacggctgtcgtaagtccagatattgcatccatagatctgaacacgtttgaattcaacaaaccttctccttatggaagtaaccataaccgtggaaattttgactggagtctttcatttggctgggagtcgcttcctgatcatgagaagcaaagaaggaaagatgaaacctacccaattaaaacacccacttttgcaggaggacttttttccatatcaaaagaatattttgagtatattggaagctatgatgaagaaatggaaatctggggaggtgaaaatatagaaatgtctttcagagtatggcaatgtggtgggcagttggagattatgccttgctctgttgttggacatgtttttcgcagcaaaagccctcatagctttccaaaaggcactcaggtgattgctagaaaccaagttcgccttgcagaagtctggatggatgaatacaaggaaatattttataggagaaatacagatgcagcaaaaattgttaaacaaaaagcatttggtgatctttcaaaaagatttgaaataaaacaccgccttcagtgtaaaaattttacatggtatctgaacaacatttatccagaggtgtatgtgccagaccttaatcctgttatatctggatacattaaaagcgttggtcagcctctatgtctggatgttggagaaaacaatcaaggaggcaaaccattaattatgtatacatgtcatggacttgggggaaaccagtactttgaatactctgctcaacatgaaattcggcacaacatccagaaggaattatgtcttcatgctgctcaaggtctcgttcagctgaaggcatgtacctacaaaggtcacaagacagttgtcactggagagcagatatgggagatccagaaggatcaacttctatacaatccattcttaaaaatgtgcctttcagcaaatggagagcatccaagtttagtgtcatgcaacccatcagatccactccaaaaatggatacttagccaaaatgattaagtgttccttaaaattaagttgaaaaaggaaatattctttctcataaaactgtgactaggcatacactgtagtttttgaaaattatgcaaaagcagctaaatgtaacttattccaagtgcatttttcttatttatatctttatgtagcactactacagaaattctgcaagtttctgtttcaaagcacaataactagtaataccaaagactatttcaaaatgtccagatgtaggggaagagatgtttacagtatgatgaaaataattttccaagtaaagtgawgtttgtgtgttttgtacacttagggatatatatatatagctacattcacacactcacaatttaaaatatttcccctagttttttggggggataggaagaaagatttgttactgtatttttttaactacataaaaatagatcaataaatgtcagcattggcctctgtgtacaaaccaagagcttttacagatccagaatttattagtttaaaatgcaggtgaacttttttttgcgtttggtttacttgtctgtcaaatgtttccttaaacatgaaactgaataaggrgaagagtatttttaacacttaaatttcttggcaaattttaaaacattttttagtctgtaatacactccacttgaagcacttaagtcttccttaaatgacttttcttaagtaatgatactgtgtgttttcccaaagcacttttaaaaaaatttttataaattactatctgttgaaaaggtgtccttttcctttcttctagtatttttttcttaccaaaattcactaatcttgaatgtttgtgatattaaatttcaaatgcagaatacttgactcatttaaagctaaattttgttactgattcaattataattgtaatggatttttgactttgtaatggattcttttcatcaaaaagccttatttttttatctatgtggaaaacacaataaaaaatcctcaacactattgtaatcatttggttaagtttttttcctcttttgggtaaaatctgtaattgataataggtgggggaaaatgaattttgtatgctgaatttctaagcgcctattgtttgtaaaaccatcagatatttcttatggcacaaaaaatgaggaatagcaaaattcctgtgttcaatatttagaaaattttgtattaatttctgataaagttccttaagcatctgatagaatgatgttttaaaaaaatttgacgcttgcttaggagatttaccactttttttttttgtttttcgtcattttatatttagatctcctgtattcttgttcccgaagtaaaatacgatcggtttcatattttaaatctggcagagcctcagctgtacgaaaaagagcatatactggttattgaccctatcttctcattgtttgtttgtaagtttgaatttgtattaaaaagcctgcattctgagctggacatggtggctcagcttctaatcccagcactttggtaggcaaaggtgggaggatcatttgagctcaggagttccagaccagcctgggcaacatagcaaaatctcatctctacaaaaagtaaaaattaaaaaatgaaattaaaaataaaattacctaggtgtggtggcacgcatctgtagttccagctatacaggaaggtgaggcagaagcattgcttgagcttgggagatcgaggctacagtgagctatgattacaccactgcacttcagtctgtgtgactgagcaagactctttcaaaaaaaaaaaaaaagcctacattctccagttgattatttcaactaatgtgtattatgtgcctaattttctatcagaagttgtattagcccgttttcacactgctgttaaagacatacctgagactgggtaatttataaagaaaaataggttcgatggactcacaggtccgcgtggctggggaggcttcacaatcatggcggaaggtgaaaggcatgtcttacgtggag

SEQ ID NO: 1868 - DNA, 3977 bp, Homo sapiens
gtactaccattaaagataccttcttctcagcaaatctatgataaaaaatataagtaacagaagaagaaataactgttatttgtcaagtgacaagcttttaatgtcagaatggctcacctaaagcgactagtaaaattacacattaaaagacattaccataaaaagttctggaagcttggtgcagtaatttttttctttataatagttttggttttaatgcaaagagaagtaagtgttcaatattccaaagaggaatcaaggatggaaaggaacatgaaaaacaaaaacaagatgttggatttaatgctagaagctgtaaacaatattaaggatgccatgccaaaaatgcaaataggagcacctgtcaggcaaaacattgatgctggtgagagaccttgtttgcaaggatattatacagcagcagaattgaagcctgtccttgaccgtccacctcaggattcaaatgcacctggtgcttctggtaaagcattcaagacaaccaatttaagtgttgaagagcaaaaggaaaaggaacgtggggaagctaaacactgctttaatgctttcgcaagtgacaggatttctttgcaccgagatcttggaccagacactcgacctcctgaatgtattgaacaaaaatttaagcgctgccctcccctgcccaccaccagtgtcataatagtttttcataatgaagcgtggtccacgttgcttagaactgtccacagtgtgctctattcttcacctgcaatactgctgaaggaaatcattttggtggatgatgctagtgtaratgagtacttacatgataaactagatgaatatgtaaaacaattttctatagtaaaaatagtcagacaaagagaaagaaaaggtctgatcactgctcggttgctaggagcaacagtcgcaacagctgaaacgctcacatttttagatgctcactgtgagtgtttctatggttggctagaacctctgttggccagaatagctgagaactacacggctgtcgtaagtccagatattgcatccatagatctgaacacgtttgaattcaacaaaccttctccttatggaagtaaccataaccgtggaaattttgactggagtctttcatttggctgggagtcgcttcctgatcatgagaagcaaagaaggaaagatgaaacctacccaattaaaacacccacttttgcaggaggacttttttccatatcaaaagaatattttgagtatattggaagctatgatgaagaaatggaaatctggggaggtgaaaatatagaaatgtctttcagagtatggcaatgtggtgggcagttggagattatgccttgctctgttgttggacatgtttttcgcagcaaaagccctcatagctttccaaaaggcactcaggtgattgctagaaaccaagttcgccttgcagaagtctggatggatgaatacaaggaaatattttataggagaaatacagatgcagcaaaaattgttaaacaaaaagcatttggtgatctttcaaaaagatttgaaataaaacaccgccttcagtgtaaaaattttacatggtatctgaacaacatttatccagaggtgtatgtgccagaccttaatcctgttatatctggatacattaaaagcgttggtcagcctctatgtctggatgttggagaaaacaatcaaggaggcaaaccattaattatgtatacatgtcatggacttgggggaaaccagtactttgaatactctgctcaacatgaaattcggcacaacatccagaaggaattatgtcttcatgctgctcaaggtctcgttcagctgaaggcatgtacctacaaaggtcacaagacagttgtcactggagagcagatatgggagatccagaaggatcaacttctatacaatccattcttaaaaatgtgcctttcagcaaatggagagcatccaagtttagtgtcatgcaacccatcagatccactccaaaaatggatacttagccaaaatgattaagtgttccttaaaattaagttgaaaaaggaaatattctttctcataaaactgtgactaggcatacactgtagtttttgaaaattatgcaaaagcagctaaatgtaacttattccaagtgcatttttcttatttatatctttatgtagcactactacagaaattctgcaagtttctgtttcaaagcacaataactagtaataccaaagactatttcaaaatgtccagatgtaggggaagagatgtttacagtatgatgaaaataattttccaagtaaagtgawgtttgtgtgttttgtacacttagggatatatatatatagctacattcacacactcacaatttaaaatatttcccctagttttttggggggataggaagaaagatttgttactgtatttttttaactacataaaaatagatcaataaatgtcagcattggcctctgtgtacaaaccaagagcttttacagatccagaatttattagtttaaaatgcaggtgaacttttttttgcgtttggtttacttgtctgtcaaatgtttccttaaacatgaaactgaataaggrgaagagtatttttaacacttaaatttcttggcaaattttaaaacattttttagtctgtaatacactccacttgaagcacttaagtcttccttaaatgacttttcttaagtaatgatactgtgtgttttcccaaagcacttttaaaaaaatttttataaattactatctgttgaaaaggtgtccttttcctttcttctagtatttttttcttaccaaaattcactaatcttgaatgtttgtgatattaaatttcaaatgcagaatacttgactcatttaaagctaaattttgttactgattcaattataattgtaatggatttttgactttgtaatggattcttttcatcaaaaagccttatttttttatctatgtggaaaacacaataaaaaatcctcaacactattgtaatcatttggttaagtttttttcctcttttgggtaaaatctgtaattgataataggtgggggaaaatgaattttgtatgctgaatttctaagcgcctattgtttgtaaaaccatcagatatttcttatggcacaaaaaatgaggaatagcaaaattcctgtgttcaatatttagaaaattttgtattaatttctgataaagttccttaagcatctgatagaatgatgttttaaaaaaatttgacgcttgcttaggagatttaccactttttttttttgtttttcgtcattttatatttagatctcctgtattcttgttcccgaagtaaaatacgatcggtttcatattttaaatctggcagagcctcagctgtacgaaaaagagcatatactggttattgaccctatcttctcattgtttgtttgtaagtttgaatttgtattaaaaagcctgcattctgagctggacatggtggctcagcttctaatcccagcactttggtaggcaaaggtgggaggatcatttgagctcaggagttccagaccagcctgggcaacatagcaaaatctcatctctacaaaaagtaaaaattaaaaaatgaaattaaaaataaaattacctaggtgtggtggcacgcatctgtagttccagctatacaggaaggtgaggcagaagcattgcttgagcttgggagatcgaggctacagtgagctatgattacaccactgcacttcagtctgtgtgactgagcaagactctttcaaaaaaaaaaaaaaagcctacattctccagttgattatttcaactaatgtgtattatgtgcctaattttctatcagaagttgtattagcccgttttcacactgctgttaaagacatacctgagactgggtaatttataaagaaaaataggttcgatggactcacaggtccgcgtggctggggaggcttcacaatcatggcggaaggtgaaaggcatgtcttacgtggag

SEQ ID NO: 1869 - DNA, 1775 bp, Homo sapiens
ctgcgctgaagtgagtcaagtgatgaaatcaagactacacgggaaggaagctcacgaaacctaactggtgacagaagctgctgaaccctgcccgaagaaaccacatgagccagcagttgctgccctcccgaagtggtcctcggaggcagcgcaccccttcattttggcgaaccgaggaggaagggaggaaccgtgtgggggaaatctagaacttctggttccccaaggacccagcagactgtgttctggctacaaggtgatcactgccaccaggtcagtgcaggattcctccaatgtagatgggccgggagccacaacttgcgcggagcagcagcctcgccgaccactcagagagaagccgcgcgacagccaggcttggcccggacggcgcccccaccctgcgcgcgcgatccaaggttctcacctggagcgctcaggtagggctggggcggggcgggaggctggcgcgcaggcgcggaagtggggcctcgcccctgccgacgtcgcaggctggagctcacctgggagactccaagtggaagccgagcctcggttctgcctctccaggcaacgcgggaggcccagcgggaaggcaggaggcggcggcggaggaggagctctactgagccgcaactgtggcgacagcaaccggagtcgcagccgccgccacctgcacctggcgcctagcccacgtccagcgcctgcccggccgccgcttcccgccaccctgccctgcccacccgccaggtactaccattaaagataccttcttctcagcaaatctatgataaaaaatataagtaacagaagaagaaataactgttatttgtcaagtgacaagcttttaatgtcagaatggctcacctaaagcgactagtaaaattacacattaaaagacattaccataaaaagttctggaagcttggtgcagtaatttttttctttataatagttttggttttaatgcaaagagaagtaagtgttcaatattccaaagaggaatcaaggatggaaaggaacatgaaaaacaaaaacaagatgttggatttaatgctagaagctgtaaacaatattaaggatgccatgccaaaaatgcaaataggagcacctgtcaggcaaaacattgatgctggtgagagaccttgtttgcaaggatattatacagcagcagaattgaagcctgtccttgaccgtccacctcaggattcaaatgcacctggtgcttctggtaaagcattcaagacaaccaatttaagtgttgaagagcaaaaggaaaaggaacgtggggaagctaaacactgctttaatgctttcgcaagtgacaggatttctttgcaccgagatcttggaccagacactcgacctcctgagtatgttgaagaatatttattgtttattctttatcaccaggctttgcaggggagagaggggtgagctaaggaagttatctgttttttagytactctaaggcagaaaatcagcaaatactgtttatttaacctgttgtatttattttttgcttataatgattgaggctacatatccctatttatgcttggtgaggcagtgcagatatgaaaagttattagcttggaaattagaaaactgaattctagatctgactgctatccacaaggaaattctttattcctaaatactgtggttttctcatctatttagggggaattattggacaatttgtataggaagtagaaggtagaggaattgtttccatttctctgtatttctttagaataaaaatgtttaaaaacatg

SEQ ID NO: 1870 - DNA, 4724 bp, Homo sapiens
ctgcgctgaagtgagtcaagtgatgaaatcaagactacacgggaaggaagctcacgaaacctaactggtgacagaagctgctgaaccctgcccgaagaaaccacatgagccagcagttgctgccctcccgaagtggtcctcggaggcagcgcaccccttcattttggcgaaccgaggaggaagggaggaaccgtgtgggggaaatctagaacttctggttccccaaggacccagcagactgtgttctggctacaaggtgatcactgccaccaggtcagtgcaggattcctccaatgtagatgggccgggagccacaacttgcgcggagcagcagcctcgccgaccactcagagagaagccgcgcgacagccaggcttggcccggacggcgcccccaccctgcgcgcgcgatccaaggttctcacctggagcgctcaggtagggctggggcggggcgggaggctggcgcgcaggcgcggaagtggggcctcgcccctgccgacgtcgcaggctggagctcacctgggagactccaagtggaagccgagcctcggttctgcctctccaggcaacgcgggaggcccagcgggaaggcaggaggcggcggcggaggaggagctctactgagccgcaactgtggcgacagcaaccggagtcgcagccgccgccacctgcacctggcgcctagcccacgtccagcgcctgcccggccgccgcttcccgccaccctgccctgcccacccgccaggtactaccattaaagataccttcttctcagcaaatctatgataaaaaatataagtaacagaagaagaaataactgttatttgtcaagtgacaagcttttaatgtcagaatggctcacctaaagcgactagtaaaattacacattaaaagacattaccataaaaagttctggaagcttggtgcagtaatttttttctttataatagttttggttttaatgcaaagagaagtaagtgttcaatattccaaagaggaatcaaggatggaaaggaacatgaaaaacaaaaacaagatgttggatttaatgctagaagctgtaaacaatattaaggatgccatgccaaaaatgcaaataggagcacctgtcaggcaaaacattgatgctggtgagagaccttgtttgcaaggatattatacagcagcagaattgaagcctgtccttgaccgtccacctcaggattcaaatgcacctggtgcttctggtaaagcattcaagacaaccaatttaagtgttgaagagcaaaaggaaaaggaacgtggggaagctaaacactgctttaatgctttcgcaagtgacaggatttctttgcaccgagatcttggaccagacactcgacctcctgaatgtattgaacaaaaatttaagcgctgccctcccctgcccaccaccagtgtcataatagtttttcataatgaagcgtggtccacgttgcttagaactgtccacagtgtgctctattcttcacctgcaatactgctgaaggaaatcattttggtggatgatgctagtgtaratgagtacttacatgataaactagatgaatatgtaaaacaattttctatagtaaaaatagtcagacaaagagaaagaaaaggtctgatcactgctcggttgctaggagcaacagtcgcaacagctgaaacgctcacatttttagatgctcactgtgagtgtttctatggttggctagaacctctgttggccagaatagctgagaactacacggctgtcgtaagtccagatattgcatccatagatctgaacacgtttgaattcaacaaaccttctccttatggaagtaaccataaccgtggaaattttgactggagtctttcatttggctgggagtcgcttcctgatcatgagaagcaaagaaggaaagatgaaacctacccaattaaaacacccacttttgcaggaggacttttttccatatcaaaagaatattttgagtatattggaagctatgatgaagaaatggaaatctggggaggtgaaaatatagaaatgtctttcagagtatggcaatgtggtgggcagttggagattatgccttgctctgttgttggacatgtttttcgcagcaaaagccctcatagctttccaaaaggcactcaggtgattgctagaaaccaagttcgccttgcagaagtctggatggatgaatacaaggaaatattttataggagaaatacagatgcagcaaaaattgttaaacaaaaagcatttggtgatctttcaaaaagatttgaaataaaacaccgccttcagtgtaaaaattttacatggtatctgaacaacatttatccagaggtgtatgtgccagaccttaatcctgttatatctggatacattaaaagcgttggtcagcctctatgtctggatgttggagaaaacaatcaaggaggcaaaccattaattatgtatacatgtcatggacttgggggaaaccagtactttgaatactctgctcaacatgaaattcggcacaacatccagaaggaattatgtcttcatgctgctcaaggtctcgttcagctgaaggcatgtacctacaaaggtcacaagacagttgtcactggagagcagatatgggagatccagaaggatcaacttctatacaatccattcttaaaaatgtgcctttcagcaaatggagagcatccaagtttagtgtcatgcaacccatcagatccactccaaaaatggatacttagccaaaatgattaagtgttccttaaaattaagttgaaaaaggaaatattctttctcataaaactgtgactaggcatacactgtagtttttgaaaattatgcaaaagcagctaaatgtaacttattccaagtgcatttttcttatttatatctttatgtagcactactacagaaattctgcaagtttctgtttcaaagcacaataactagtaataccaaagactatttcaaaatgtccagatgtaggggaagagatgtttacagtatgatgaaaataattttccaagtaaagtgawgtttgtgtgttttgtacacttagggatatatatatatagctacattcacacactcacaatttaaaatatttcccctagttttttggggggataggaagaaagatttgttactgtatttttttaactacataaaaatagatcaataaatgtcagcattggcctctgtgtacaaaccaagagcttttacagatccagaatttattagtttaaaatgcaggtgaacttttttttgcgtttggtttacttgtctgtcaaatgtttccttaaacatgaaactgaataaggrgaagagtatttttaacacttaaatttcttggcaaattttaaaacattttttagtctgtaatacactccacttgaagcacttaagtcttccttaaatgacttttcttaagtaatgatactgtgtgttttcccaaagcacttttaaaaaaatttttataaattactatctgttgaaaaggtgtccttttcctttcttctagtatttttttcttaccaaaattcactaatcttgaatgtttgtgatattaaatttcaaatgcagaatacttgactcatttaaagctaaattttgttactgattcaattataattgtaatggatttttgactttgtaatggattcttttcatcaaaaagccttatttttttatctatgtggaaaacacaataaaaaatcctcaacactattgtaatcatttggttaagtttttttcctcttttgggtaaaatctgtaattgataataggtgggggaaaatgaattttgtatgctgaatttctaagcgcctattgtttgtaaaaccatcagatatttcttatggcacaaaaaatgaggaatagcaaaattcctgtgttcaatatttagaaaattttgtattaatttctgataaagttccttaagcatctgatagaatgatgttttaaaaaaatttgacgcttgcttaggagatttaccactttttttttttgtttttcgtcattttatatttagatctcctgtattcttgttcccgaagtaaaatacgatcggtttcatattttaaatctggcagagcctcagctgtacgaaaaagagcatatactggttattgaccctatcttctcattgtttgtttgtaagtttgaatttgtattaaaaagcctgcattctgagctggacatggtggctcagcttctaatcccagcactttggtaggcaaaggtgggaggatcatttgagctcaggagttccagaccagcctgggcaacatagcaaaatctcatctctacaaaaagtaaaaattaaaaaatgaaattaaaaataaaattacctaggtgtggtggcacgcatctgtagttccagctatacaggaaggtgaggcagaagcattgcttgagcttgggagatcgaggctacagtgagctatgattacaccactgcacttcagtctgtgtgactgagcaagactctttcaaaaaaaaaaaaaaagcctacattctccagttgattatttcaactaatgtgtattatgtgcctaattttctatcagaagttgtattagcccgttttcacactgctgttaaagacatacctgagactgggtaatttataaagaaaaataggttcgatggactcacaggtccgcgtggctggggaggcttcacaatcatggcggaaggtgaaaggcatgtcttacgtggag

SEQ ID NO: 1871 - DNA, 5095 bp, Homo sapiens
gccaccagccagacagatctagaaaactgggtcactgctgtacactctgcttgtgcatccctttttgcaaagaagcatgggaaagaggacacsctgcggctgctgaagaaccagaccaaaaacctgcttcagaagatagacatggacagcaagatgaagaagatggcagagctgcagctgtccgtggtgagcgacccaaagaacaggaaagccatagagaaccagatccarcaatgggagcagaatcttgagaaatttcacatggatctgttcaggatgcgctgctatctggccagcctacaaggtggggagttaccgaacccaaagagtctccttgcagccgccagccgcccctccaagctggccctcggcaggctgggcatcttgtctgtttcctctttccatgctctggtatgttctagagatgactctgctctccggaaaaggacactgtcactgacccagcgagggagaaacaagaagggaatattttcttcgttaaaagggctggacacactggccagaaaaggcaargagaagagaccttctrtaactcagatatttgattcaagtggcagccatggattttctggaactcagctacctcaaaactccagtaactccagtgargtcgatgaacttctgcatatatatggttcaacagtagacggtgttccccgagacaatrcatgggaaatccagacttatgtccactttcaggacaatcacggagttactgtagggatcaagccagagcacagagtagaagatattttgactttggcatgcaagatgaggcagttggaacccagccattatggcctacagcttcgaaaattagtagatgacaatgttgagtattgcatccctgcaccatatgaatatatgcaacaacaggtttatgatgaaatagaagtctttccactaaatgtttatgacgtgcagctcacgaagactgggagtgtgtgtgactttgggtttgcagttacagcgcaggtggatgagcgtcagcatctcagccggatatttataagcgacgttcttccygatggcctggcgtatggggaaggkctgagaaagggcaatgagatcatgaccttaaatggggaagctgtgtctgatcttgaccttaagcagatggaggccctgttttctgagaagagcgtcggactcactctgattgcccggcctccggacacaaaarcaaccctgtgtacatcctggtcagacagtgacctgttctccagggaccagaagagtctgctgccccctcctaaccagtcccaactgctggaggaattcctggataactttaaaaagaatacagccaatgatttcagcaacgtccctgatatcacaacaggtctgaaaaggagtcagacagatggcactctggatcaggtttcccacagggagaaaatggagcagacattcaggagtgctgagcagatcactgcactgtgcaggagttttaacgacagtcaggccaacggcatggaaggaccgcgggagaatcaggatcctcctccgaggyctctggcccgccacctgtctgatgcagaccgcctcygcaaagtcatccaggagcttgtggacacagagaagtcctacgtgaaggatttgagctgcctctttgaattatacttggagccacttcagaatgagacctttcttacccaagatgagatggagtcactttttggaagtttgccagagatgcttgagtttcagaaggtgtttctggagaccctggaggatgggatttcagcatcatctgactttaacaccctagaaaccccctcacagtttagaaaattactgttttcccttggaggctctttcctttattacgcggaccactttaaactgtacagtggattctgtgctaaccatatcaaagtacagaaggttctggagcgagctaaaactgacaaagccttcaaggcttttctggaygcccggaaccccaccaagcagcattcctccacgctggagtcctacctcatcaagccggttcagagagtgctcaagtacccgctgctgctcaaggagctggtgtccctgacggaccaggagagcgaggagcactaccacctgacggaagcactaaaggcaatggagaaagtagcgagccacatcaatgagatgcagaagatctatgaggattatgggaccgtgtttgaccagctagtagctgagcagagcggaacagagaaggaggtaacagaactttcgatgggagagcttctgatgcactctacggtttcctggttgaatccatttctgtctctaggaaaagctagaaaggaccttgagctcacagtatttgtttttaagagagccgtcatactggtttataaagaaaactgcaaactgaaaaagaaattgccctcgaattcccggcctgcacacaactctactgacttggacccatttaaattccgctggttgatccccatctccgcgcttcaagtcagactggggaatccagcagggacagaaaataattccatatgggaactgatccatacgaagtcagaaatagaaggacggccagaaaccatctttcagttgtgttgcagtgacagtgaaagcaaaaccaacattgttaaggtgattcgttctattctgagggaraacttcaggcgtcacataaagtgtgaattaccactggagaaaacgtgtaaggatcgcctggtacctcttaagaaccgagttcctgtttcggccaaattagcttcatccaggtctttaaaagtcctgaagaattcctccagcaacgagtggaccggtgagactggcaagggaaccttgctggactctgacragggcascytgagcagcggcacccagagcagcggctgccccacggctgagggcaggcaggactccaagagcacttctcccgggaaatacccacaccccggcttggcagattttgcygacaatctcatcaaagagagtgacatcctgagcgatgaagawgatgaccaccgtcagactgtgaagcagggcagccctactaaagacatygaaattcagttccagagactgaggatttccgaggacccagacgttcaccccgargctgagcagcagcctggcccggagtcgggtgagggtcagaaaggaggagagcagcccaaactggtccgggggcacttctgccccattaaacgaaaagccaacagcaccaagagggacagaggaactttgctcaaggcgcagatccgtcaccagtcccttgacagtcagtctgaaaatgccaccatcgacctaaattctgttctagagcgagaattcagtgtccagagtttaacatctgttgtcagtgaggagtgtttttatgaaacagagagccacggaaaatcatagtatgattcaatccagatatgggttaaattcctcattttacttttaaactggtggtaaagtggaaattgcaaaaaaaaaaaaaaaaaaaaactgttcattcctgggttttgtgcagtatacattttcccacaaaatggttgtaaagatttaagttattttaatttattgtggatcagaaacctagatgaaactggtcagaatctgtaaattacttagtttatatccactttgagcaggtatcaaatgatttaggatccttaaaattacattctaataattaagttatgtggaaaaagtaaggctggggaagtcgtgattaatagttttcaaagggccattttttwaaatcctctgggcattttctttcagctgtttgttagtttttgctttatttaaagcatatttaagttattttaatgtggtttaggrgcaaaatgtgcagatacttcatttttgtaagattgtaatagatgctgtttatactaaacatgtcatawctatctatacagtatatattaaaagaaagcttgtactgtatcttatttgatgatatttattttctctgccaagctgtatagtaaaaggaaaataagtcacatctggtcattggcatttgtatcgtcattctgtaaagacaaaagagtacctatataagaagctccacgtagtgcaaatcgacatctggtaggctgctcgcccccaggcagcagctagagtctgtaattctctgcgtcatcctcttctttttcttcatttttgctttttcttcgcttgagttcttctctgaaattatatgcaaagagttgtgggtcttcatcacacatttttctgtatacatcacagaggctcttaaagtgtgagatggagagctggcggggccgaagagtagggtctatgtctgccaactctaacagcctgcccgtgctttccaagcgctgcgcttcagggaataacattctgaggccctcgatggcagtatttccttcggaactgaaatacattctgaaccactttttccaccagcttgaatggctgctctatcttgggctgtatcaagggagtgaagtgcaccacgcccacgtccaccttcgttgtaagcaaacatattatcattctgtggcatgatatgtggcatagtgtgatcaatcaactcatccttgtaaaacaggargatgggctgtcaacagcctgttttcataaacagacctttccacgtacttcggtttcatctctaggcatggaagatggtacattctggattcgcaaatgacatggagaaatcagccggctgcacctgttctctaatgacatccaccagacctgtgcttgatggtcacttaattttaaaacacagtttcacaatggcttaaaaatcaatccaaatcaktaaagtcagtcagcagataatagatggcattagaatattttagtttttgaatgaggaaaaaaataagcygcagcagcagcttcaagacacagagagatggcagacaggcccccagggaccactcagtgctaaacttcccagatagagacaccacttattttcggtagacactgattaatcagctggactgaattcatgagtgtagtctgaaaagccacagaactttctagtagcaattttaaatgccccgaaaggcataggcaggactgaaattgaaaatggaaaccatcaaaaaatgtcactgtttgatagtgtttaagctactgccagctg

SEQ ID NO: 1872 - DNA, 6898 bp, Homo sapiens
atgggcaactccgacagtcagtacacccttcaaggatctaaaaatcatagcaatactattactggtgctaagcaaattccttgctccctgaaaatacgtggcattcatgcaaaagaggaaaagtcattgcatggatggggtcacggaagcaacggagcaggttacaagtccaggtccctggcccgaagctgcctttctcactttaagagtaaccagccttacgcatcgagactcggtggccccacatgcaaggtctccagaggtgttgcctactccacgcacaggacaaatgccccagggaaggatttccagggcatcagtgctgctttctcaactgagaatggcttccactctgttggccacgagctggcagataaccacatcacctccagagactgcaacggacaccttctcaactgctacgggaggaatgagagcattgcctccaccccaccgggcgaagaccgcaagagcccccgagtgctcatcaaaacgctggggaagctggatgggtgtttaagggtcgagttccacaatggtggcaaccccagcaaagtgcctgcagaggactgcagtgagccggtgcagctgctgaggtactcacctaccttagcatcggaaacctcccctgtgcctgaagccaggagggggtccagcgccgattccctgcccagccatcgcccctctcccacggactctcgcctgcggtccagcaaaggcagctccctgagttctgagtcatcctggtacgactccccttggggcaatgctggagagctgagcgaggctgagggctccttcctggcccccggcatgcctgaccccagtctccatgccagcttcccacctggcgatgccaaaaagcctttcaaccaaagctcttccctctcctccctccgggaactgtacaaagatgccaacctggggagcctctccccctcaggtatccgcctttctgatgaatacatgggcacgcatgccagcctgagcaaccrtgtctcttttgcttccgacattgatgtgccctccagagtggcacacggggaccccatccagtacagttccttcactctcccctgtcggaagcccaaagcctttgttgaggatactgcgaagaaggactccctcaaagccaggatgcgacggatcagtgactggacgggaagcctctcaaggaagaaaaggaaactccaggagccgaggtccaaggagggcagtgactactttgacagtcgctctgatggactgaatacagatgtgcagggatcctcccaggcatctgcttttctgtggtcagggggctctactcagatcctgtctcagagaagtgaatccacacatgcgattggcagcgatcccctccggcagaacatttatgagaatttcatgcgagagttggaaatgagcaggaccaacactgagaacatagaaacatctacagaaaccgccgagtccagcagcgagtcactcagctctctggaacagctggatctgctctttgagaaggaacagggggtggtccggaaggccgggtggctcttcttcaagcccctggtcactgtgcagaaggaaaggaagcttgagctggtggcacgaaggaaatggaaacagtactgggtaacgctgaaaggatgcacgctgctgttttatgagacctatgggaagaattccatggatcagagcagtgcccctcggtgtgctctgtttgcagaagacagcatagtgcagtctgttccagagcatcccaagaaagaaaatgtgttctgcctcagcaactcctttggagatgtctaccttttccaggccaccagccagacagatctagaaaactgggtcactgctgtacactctgcttgtgcatccctttttgcaaagaagcatgggaaagaggacacsctgcggctgctgaagaaccagaccaaaaacctgcttcagaagatagacatggacagcaagatgaagaagatggcagagctgcagctgtccgtggtgagcgacccaaagaacaggaaagccatagagaaccagatccarcaatgggagcagaatcttgagaaatttcacatggatctgttcaggatgcgctgctatctggccagcctacaaggtggggagttaccgaacccaaagagtctccttgcagccgccagccgcccctccaagctggccctcggcaggctgggcatcttgtctgtttcctctttccatgctctggtatgttctagagatgactctgctctccggaaaaggacactgtcactgacccagcgagggagaaacaagaagggaatattttcttcgttaaaagggctggacacactggccagaaaaggcaargagaagagaccttctrtaactcagatatttgattcaagtggcagccatggattttctggaactcagctacctcaaaactccagtaactccagtgargtcgatgaacttctgcatatatatggttcaacagtagacggtgttccccgagacaatrcatgggaaatccagacttatgtccactttcaggacaatcacggagttactgtagggatcaagccagagcacagagtagaagatattttgactttggcatgcaagatgaggcagttggaacccagccattatggcctacagcttcgaaaattagtagatgacaatgttgagtattgcatccctgcaccatatgaatatatgcaacaacaggtttatgatgaaatagaagtctttccactaaatgtttatgacgtgcagctcacgaagactgggagtgtgtgtgactttgggtttgcagttacagcgcaggtggatgagcgtcagcatctcagccggatatttataagcgacgttcttccygatggcctggcgtatggggaaggkctgagaaagggcaatgagatcatgaccttaaatggggaagctgtgtctgatcttgaccttaagcagatggaggccctgttttctgagaagagcgtcggactcactctgattgcccggcctccggacacaaaarcaaccctgtgtacatcctggtcagacagtgacctgttctccagggaccagaagagtctgctgccccctcctaaccagtcccaactgctggaggaattcctggataactttaaaaagaatacagccaatgatttcagcaacgtccctgatatcacaacaggtctgaaaaggagtcagacagatggcactctggatcaggtttcccacagggagaaaatggagcagacattcaggagtgctgagcagatcactgcactgtgcaggagttttaacgacagtcaggccaacggcatggaaggaccgcgggagaatcaggatcctcctccgaggyctctggcccgccacctgtctgatgcagaccgcctcygcaaagtcatccaggagcttgtggacacagagaagtcctacgtgaaggatttgagctgcctctttgaattatacttggagccacttcagaatgagacctttcttacccaagatgagatggagtcactttttggaagtttgccagagatgcttgagtttcagaaggtgtttctggagaccctggaggatgggatttcagcatcatctgactttaacaccctagaaaccccctcacagtttagaaaattactgttttcccttggaggctctttcctttattacgcggaccactttaaactgtacagtggattctgtgctaaccatatcaaagtacagaaggttctggagcgagctaaaactgacaaagccttcaaggcttttctggaygcccggaaccccaccaagcagcattcctccacgctggagtcctacctcatcaagccggttcagagagtgctcaagtacccgctgctgctcaaggagctggtgtccctgacggaccaggagagcgaggagcactaccacctgacggaagcactaaaggcaatggagaaagtagcgagccacatcaatgagatgcagaagatctatgaggattatgggaccgtgtttgaccagctagtagctgagcagagcggaacagagaaggaggtaacagaactttcgatgggagagcttctgatgcactctacggtttcctggttgaatccatttctgtctctaggaaaagctagaaaggaccttgagctcacagtatttgtttttaagagagccgtcatactggtttataaagaaaactgcaaactgaaaaagaaattgccctcgaattcccggcctgcacacaactctactgacttggacccatttaaattccgctggttgatccccatctccgcgcttcaagtcagactggggaatccagcagggacagaaaataattccatatgggaactgatccatacgaagtcagaaatagaaggacggccagaaaccatctttcagttgtgttgcagtgacagtgaaagcaaaaccaacattgttaaggtgattcgttctattctgagggaraacttcaggcgtcacataaagtgtgaattaccactggagaaaacgtgtaaggatcgcctggtacctcttaagaaccgagttcctgtttcggccaaattagcttcatccaggtctttaaaagtcctgaagaattcctccagcaacgagtggaccggtgagactggcaagggaaccttgctggactctgacragggcascytgagcagcggcacccagagcagcggctgccccacggctgagggcaggcaggactccaagagcacttctcccgggaaatacccacaccccggcttggcagattttgcygacaatctcatcaaagagagtgacatcctgagcgatgaagawgatgaccaccgtcagactgtgaagcagggcagccctactaaagacatygaaattcagttccagagactgaggatttccgaggacccagacgttcaccccgargctgagcagcagcctggcccggagtcgggtgagggtcagaaaggaggagagcagcccaaactggtccgggggcacttctgccccattaaacgaaaagccaacagcaccaagagggacagaggaactttgctcaaggcgcagatccgtcaccagtcccttgacagtcagtctgaaaatgccaccatcgacctaaattctgttctagagcgagaattcagtgtccagagtttaacatctgttgtcagtgaggagtgtttttatgaaacagagagccacggaaaatcatagtatgattcaatccagatatgggttaaattcctcattttacttttaaactggtggtaaagtggaaattgcaaaaaaaaaaaaaaaaaaaaactgttcattcctgggttttgtgcagtatacattttcccacaaaatggttgtaaagatttaagttattttaatttattgtggatcagaaacctagatgaaactggtcagaatctgtaaattacttagtttatatccactttgagcaggtatcaaatgatttaggatccttaaaattacattctaataattaagttatgtggaaaaagtaaggctggggaagtcgtgattaatagttttcaaagggccattttttwaaatcctctgggcattttctttcagctgtttgttagtttttgctttatttaaagcatatttaagttattttaatgtggtttaggrgcaaaatgtgcagatacttcatttttgtaagattgtaatagatgctgtttatactaaacatgtcatawctatctatacagtatatattaaaagaaagcttgtactgtatcttatttgatgatatttattttctctgccaagctgtatagtaaaaggaaaataagtcacatctggtcattggcatttgtatcgtcattctgtaaagacaaaagagtacctatataagaagctccacgtagtgcaaatcgacatctggtaggctgctcgcccccaggcagcagctagagtctgtaattctctgcgtcatcctcttctttttcttcatttttgctttttcttcgcttgagttcttctctgaaattatatgcaaagagttgtgggtcttcatcacacatttttctgtatacatcacagaggctcttaaagtgtgagatggagagctggcggggccgaagagtagggtctatgtctgccaactctaacagcctgcccgtgctttccaagcgctgcgcttcagggaataacattctgaggccctcgatggcagtatttccttcggaactgaaatacattctgaaccactttttccaccagcttgaatggctgctctatcttgggctgtatcaagggagtgaagtgcaccacgcccacgtccaccttcgttgtaagcaaacatattatcattctgtggcatgatatgtggcatagtgtgatcaatcaactcatccttgtaaaacaggargatgggctgtcaacagcctgttttcataaacagacctttccacgtacttcggtttcatctctaggcatggaagatggtacattctggattcgcaaatgacatggagaaatcagccggctgcacctgttctctaatgacatccaccagacctgtgcttgatggtcacttaattttaaaacacagtttcacaatggcttaaaaatcaatccaaatcaktaaagtcagtcagcagataatagatggcattagaatattttagtttttgaatgaggaaaaaaataagcygcagcagcagcttcaagacacagagagatggcagacaggcccccagggaccactcagtgctaaacttcccagatagagacaccacttattttcggtagacactgattaatcagctggactgaattcatgagtgtagtctgaaaagccacagaactttctagtagcaattttaaatgccccgaaaggcataggcaggactgaaattgaaaatggaaaccatcaaaaaatgtcactgtttgatagtgtttaagctactgccagctg

SEQ ID NO: 1873 - DNA, 4885 bp, Homo sapiens
agggccattcagagytctgcatggaggcagggtggccggccttcgtmccctcaggccagcagggcaaggcagctcccctcaatagagatccarcaatgggagcagaatcttgagaaatttcacatggatctgttcaggatgcgctgctatctggccagcctacaaggtggggagttaccgaacccaaagagtctccttgcagccgccagccgcccctccaagctggccctcggcaggctgggcatcttgtctgtttcctctttccatgctctggtatgttctagagatgactctgctctccggaaaaggacactgtcactgacccagcgagggagaaacaagaagggaatattttcttcgttaaaagggctggacacactggccagaaaaggcaargagaagagaccttctrtaactcaggtcgatgaacttctgcatatatatggttcaacagtagacggtgttccccgagacaatrcatgggaaatccagacttatgtccactttcaggacaatcacggagttactgtagggatcaagccagagcacagagtagaagatattttgactttggcatgcaagatgaggcagttggaacccagccattatggcctacagcttcgaaaattagtagatgacaatgttgagtattgcatccctgcaccatatgaatatatgcaacaacaggtttatgatgaaatagaagtctttccactaaatgtttatgacgtgcagctcacgaagactgggagtgtgtgtgactttgggtttgcagttacagcgcaggtggatgagcgtcagcatctcagccggatatttataagcgacgttcttccygatggcctggcgtatggggaaggkctgagaaagggcaatgagatcatgaccttaaatggggaagctgtgtctgatcttgaccttaagcagatggaggccctgttttctgagaagagcgtcggactcactctgattgcccggcctccggacacaaaarcaaccctgtgtacatcctggtcagacagtgacctgttctccagggaccagaagagtctgctgccccctcctaaccagtcccaactgctggaggaattcctggataactttaaaaagaatacagccaatgatttcagcaacgtccctgatatcacaacaggtctgaaaaggagtcagacagatggcactctggatcaggtttcccacagggagaaaatggagcagacattcaggagtgctgagcagatcactgcactgtgcaggagttttaacgacagtcaggccaacggcatggaaggaccgcgggagaatcaggatcctcctccgaggyctctggcccgccacctgtctgatgcagaccgcctcygcaaagtcatccaggagcttgtggacacagagaagtcctacgtgaaggatttgagctgcctctttgaattatacttggagccacttcagaatgagacctttcttacccaagatgagatggagtcactttttggaagtttgccagagatgcttgagtttcagaaggtgtttctggagaccctggaggatgggatttcagcatcatctgactttaacaccctagaaaccccctcacagtttagaaaattactgttttcccttggaggctctttcctttattacgcggaccactttaaactgtacagtggattctgtgctaaccatatcaaagtacagaaggttctggagcgagctaaaactgacaaagccttcaaggcttttctggaygcccggaaccccaccaagcagcattcctccacgctggagtcctacctcatcaagccggttcagagagtgctcaagtacccgctgctgctcaaggagctggtgtccctgacggaccaggagagcgaggagcactaccacctgacggaagcactaaaggcaatggagaaagtagcgagccacatcaatgagatgcagaagatctatgaggattatgggaccgtgtttgaccagctagtagctgagcagagcggaacagagaaggaggtaacagaactttcgatgggagagcttctgatgcactctacggtttcctggttgaatccatttctgtctctaggaaaagctagaaaggaccttgagctcacagtatttgtttttaagagagccgtcatactggtttataaagaaaactgcaaactgaaaaagaaattgccctcgaattcccggcctgcacacaactctactgacttggacccatttaaattccgctggttgatccccatctccgcgcttcaagtcagactggggaatccagcagggacagaaaataattccatatgggaactgatccatacgaagtcagaaatagaaggacggccagaaaccatctttcagttgtgttgcagtgacagtgaaagcaaaaccaacattgttaaggtgattcgttctattctgagggaraacttcaggcgtcacataaagtgtgaattaccactggagaaaacgtgtaaggatcgcctggtacctcttaagaaccgagttcctgtttcggccaaattagcttcatccaggtctttaaaagtcctgaagaattcctccagcaacgagtggaccggtgagactggcaagggaaccttgctggactctgacragggcascytgagcagcggcacccagagcagcggctgccccacggctgagggcaggcaggactccaagagcacttctcccgggaaatacccacaccccggcttggcagattttgcygacaatctcatcaaagagagtgacatcctgagcgatgaagawgatgaccaccgtcagactgtgaagcagggcagccctactaaagacatygaaattcagttccagagactgaggatttccgaggacccagacgttcaccccgargctgagcagcagcctggcccggagtcgggtgagggtcagaaaggaggagagcagcccaaactggtccgggggcacttctgccccattaaacgaaaagccaacagcaccaagagggacagaggaactttgctcaaggcgcagatccgtcaccagtcccttgacagtcagtctgaaaatgccaccatcgacctaaattctgttctagagcgagaattcagtgtccagagtttaacatctgttgtcagtgaggagtgtttttatgaaacagagagccacggaaaatcatagtatgattcaatccagatatgggttaaattcctcattttacttttaaactggtggtaaagtggaaattgcaaaaaaaaaaaaaaaaaaaaactgttcattcctgggttttgtgcagtatacattttcccacaaaatggttgtaaagatttaagttattttaatttattgtggatcagaaacctagatgaaactggtcagaatctgtaaattacttagtttatatccactttgagcaggtatcaaatgatttaggatccttaaaattacattctaataattaagttatgtggaaaaagtaaggctggggaagtcgtgattaatagttttcaaagggccattttttwaaatcctctgggcattttctttcagctgtttgttagtttttgctttatttaaagcatatttaagttattttaatgtggtttaggrgcaaaatgtgcagatacttcatttttgtaagattgtaatagatgctgtttatactaaacatgtcatawctatctatacagtatatattaaaagaaagcttgtactgtatcttatttgatgatatttattttctctgccaagctgtatagtaaaaggaaaataagtcacatctggtcattggcatttgtatcgtcattctgtaaagacaaaagagtacctatataagaagctccacgtagtgcaaatcgacatctggtaggctgctcgcccccaggcagcagctagagtctgtaattctctgcgtcatcctcttctttttcttcatttttgctttttcttcgcttgagttcttctctgaaattatatgcaaagagttgtgggtcttcatcacacatttttctgtatacatcacagaggctcttaaagtgtgagatggagagctggcggggccgaagagtagggtctatgtctgccaactctaacagcctgcccgtgctttccaagcgctgcgcttcagggaataacattctgaggccctcgatggcagtatttccttcggaactgaaatacattctgaaccactttttccaccagcttgaatggctgctctatcttgggctgtatcaagggagtgaagtgcaccacgcccacgtccaccttcgttgtaagcaaacatattatcattctgtggcatgatatgtggcatagtgtgatcaatcaactcatccttgtaaaacaggargatgggctgtcaacagcctgttttcataaacagacctttccacgtacttcggtttcatctctaggcatggaagatggtacattctggattcgcaaatgacatggagaaatcagccggctgcacctgttctctaatgacatccaccagacctgtgcttgatggtcacttaattttaaaacacagtttcacaatggcttaaaaatcaatccaaatcaktaaagtcagtcagcagataatagatggcattagaatattttagtttttgaatgaggaaaaaaataagcygcagcagcagcttcaagacacagagagatggcagacaggcccccagggaccactcagtgctaaacttcccagatagagacaccacttattttcggtagacactgattaatcagctggactgaattcatgagtgtagtctgaaaagccacagaactttctagtagcaattttaaatgccccgaaaggcataggcaggactgaaattgaaaatggaaaccatcaaaaaatgtcactgtttgatagtgtttaagctactgccagctg

SEQ ID NO: 1874 - DNA, 5004 bp, Homo sapiens
csctgcggctgctgaagaaccagaccaaaaacctgcttcagaagatagacatggacagcaagatgaagaagatggcagagctgcagctgtccgtggtgagcgacccaaagaacaggaaagccatagagaaccagatccarcaatgggagcagaatcttgagaaatttcacatggatctgttcaggatgcgctgctatctggccagcctacaaggtggggagttaccgaacccaaagagtctccttgcagccgccagccgcccctccaagctggccctcggcaggctgggcatcttgtctgtttcctctttccatgctctggtatgttctagagatgactctgctctccggaaaaggacactgtcactgacccagcgagggagaaacaagaagggaatattttcttcgttaaaagggctggacacactggccagaaaaggcaargagaagagaccttctrtaactcagatatttgattcaagtggcagccatggattttctggaactcagctacctcaaaactccagtaactccagtgargtcgatgaacttctgcatatatatggttcaacagtagacggtgttccccgagacaatrcatgggaaatccagacttatgtccactttcaggacaatcacggagttactgtagggatcaagccagagcacagagtagaagatattttgactttggcatgcaagatgaggcagttggaacccagccattatggcctacagcttcgaaaattagtagatgacaatgttgagtattgcatccctgcaccatatgaatatatgcaacaacaggtttatgatgaaatagaagtctttccactaaatgtttatgacgtgcagctcacgaagactgggagtgtgtgtgactttgggtttgcagttacagcgcaggtggatgagcgtcagcatctcagccggatatttataagcgacgttcttccygatggcctggcgtatggggaaggkctgagaaagggcaatgagatcatgaccttaaatggggaagctgtgtctgatcttgaccttaagcagatggaggccctgttttctgagaagagcgtcggactcactctgattgcccggcctccggacacaaaarcaaccctgtgtacatcctggtcagacagtgacctgttctccagggaccagaagagtctgctgccccctcctaaccagtcccaactgctggaggaattcctggataactttaaaaagaatacagccaatgatttcagcaacgtccctgatatcacaacaggtctgaaaaggagtcagacagatggcactctggatcaggtttcccacagggagaaaatggagcagacattcaggagtgctgagcagatcactgcactgtgcaggagttttaacgacagtcaggccaacggcatggaaggaccgcgggagaatcaggatcctcctccgaggyctctggcccgccacctgtctgatgcagaccgcctcygcaaagtcatccaggagcttgtggacacagagaagtcctacgtgaaggatttgagctgcctctttgaattatacttggagccacttcagaatgagacctttcttacccaagatgagatggagtcactttttggaagtttgccagagatgcttgagtttcagaaggtgtttctggagaccctggaggatgggatttcagcatcatctgactttaacaccctagaaaccccctcacagtttagaaaattactgttttcccttggaggctctttcctttattacgcggaccactttaaactgtacagtggattctgtgctaaccatatcaaagtacagaaggttctggagcgagctaaaactgacaaagccttcaaggcttttctggaygcccggaaccccaccaagcagcattcctccacgctggagtcctacctcatcaagccggttcagagagtgctcaagtacccgctgctgctcaaggagctggtgtccctgacggaccaggagagcgaggagcactaccacctgacggaagcactaaaggcaatggagaaagtagcgagccacatcaatgagatgcagaagatctatgaggattatgggaccgtgtttgaccagctagtagctgagcagagcggaacagagaaggaggtaacagaactttcgatgggagagcttctgatgcactctacggtttcctggttgaatccatttctgtctctaggaaaagctagaaaggaccttgagctcacagtatttgtttttaagagagccgtcatactggtttataaagaaaactgcaaactgaaaaagaaattgccctcgaattcccggcctgcacacaactctactgacttggacccatttaaattccgctggttgatccccatctccgcgcttcaagtcagactggggaatccagcagggacagaaaataattccatatgggaactgatccatacgaagtcagaaatagaaggacggccagaaaccatctttcagttgtgttgcagtgacagtgaaagcaaaaccaacattgttaaggtgattcgttctattctgagggaraacttcaggcgtcacataaagtgtgaattaccactggagaaaacgtgtaaggatcgcctggtacctcttaagaaccgagttcctgtttcggccaaattagcttcatccaggtctttaaaagtcctgaagaattcctccagcaacgagtggaccggtgagactggcaagggaaccttgctggactctgacragggcascytgagcagcggcacccagagcagcggctgccccacggctgagggcaggcaggactccaagagcacttctcccgggaaatacccacaccccggcttggcagattttgcygacaatctcatcaaagagagtgacatcctgagcgatgaagawgatgaccaccgtcagactgtgaagcagggcagccctactaaagacatygaaattcagttccagagactgaggatttccgaggacccagacgttcaccccgargctgagcagcagcctggcccggagtcgggtgagggtcagaaaggaggagagcagcccaaactggtccgggggcacttctgccccattaaacgaaaagccaacagcaccaagagggacagaggaactttgctcaaggcgcagatccgtcaccagtcccttgacagtcagtctgaaaatgccaccatcgacctaaattctgttctagagcgagaattcagtgtccagagtttaacatctgttgtcagtgaggagtgtttttatgaaacagagagccacggaaaatcatagtatgattcaatccagatatgggttaaattcctcattttacttttaaactggtggtaaagtggaaattgcaaaaaaaaaaaaaaaaaaaaactgttcattcctgggttttgtgcagtatacattttcccacaaaatggttgtaaagatttaagttattttaatttattgtggatcagaaacctagatgaaactggtcagaatctgtaaattacttagtttatatccactttgagcaggtatcaaatgatttaggatccttaaaattacattctaataattaagttatgtggaaaaagtaaggctggggaagtcgtgattaatagttttcaaagggccattttttwaaatcctctgggcattttctttcagctgtttgttagtttttgctttatttaaagcatatttaagttattttaatgtggtttaggrgcaaaatgtgcagatacttcatttttgtaagattgtaatagatgctgtttatactaaacatgtcatawctatctatacagtatatattaaaagaaagcttgtactgtatcttatttgatgatatttattttctctgccaagctgtatagtaaaaggaaaataagtcacatctggtcattggcatttgtatcgtcattctgtaaagacaaaagagtacctatataagaagctccacgtagtgcaaatcgacatctggtaggctgctcgcccccaggcagcagctagagtctgtaattctctgcgtcatcctcttctttttcttcatttttgctttttcttcgcttgagttcttctctgaaattatatgcaaagagttgtgggtcttcatcacacatttttctgtatacatcacagaggctcttaaagtgtgagatggagagctggcggggccgaagagtagggtctatgtctgccaactctaacagcctgcccgtgctttccaagcgctgcgcttcagggaataacattctgaggccctcgatggcagtatttccttcggaactgaaatacattctgaaccactttttccaccagcttgaatggctgctctatcttgggctgtatcaagggagtgaagtgcaccacgcccacgtccaccttcgttgtaagcaaacatattatcattctgtggcatgatatgtggcatagtgtgatcaatcaactcatccttgtaaaacaggargatgggctgtcaacagcctgttttcataaacagacctttccacgtacttcggtttcatctctaggcatggaagatggtacattctggattcgcaaatgacatggagaaatcagccggctgcacctgttctctaatgacatccaccagacctgtgcttgatggtcacttaattttaaaacacagtttcacaatggcttaaaaatcaatccaaatcaktaaagtcagtcagcagataatagatggcattagaatattttagtttttgaatgaggaaaaaaataagcygcagcagcagcttcaagacacagagagatggcagacaggcccccagggaccactcagtgctaaacttcccagatagagacaccacttattttcggtagacactgattaatcagctggactgaattcatgagtgtagtctgaaaagccacagaactttctagtagcaattttaaatgccccgaaaggcataggcaggactgaaattgaaaatggaaaccatcaaaaaatgtcactgtttgatagtgtttaagctactgccagctg

SEQ ID NO: 1875 - DNA, 1056 bp, Homo sapiens
ctgctgaccgtggggattgcctcaatgcagcatcctcgtgggagctacctcttggacaacctgcagtccatgttccaagcttcctcataacgtgagctggagtatatcgtggtgctggtccacctgtcaggtcctgaccctgaatggcttggccaaacagctgccactatttcaggtctcttcacaccacagattagggcmgggaagctgctggtgatcaatcatagctcccctctcccaggagatctgagtgacgttaatcactcatcactctgtgaagccctctattccagrcagaaagtagatcatgccctcctcatgaactttgctakcaacctctctgattactttcttttgttggaagatcatattcattgcacccccaaattcgctgctgccatctcttcggccttatcagcctggaaagaactaccttgggtgatcctggmgttctcccacctgagcatctctgggaaagttttctgcaccagtgacttctcccgcctgaacacttytttcctcctcttccataaggacactcctactcacttgyttctctctgaatttcgtcttctcttggcccagaatattcctattcatttcagtccctctgtcttccaccacacaggcaattattctgtgtttgatgacatgtgcttttctgtggagaaggacagggtctttggtgaaccagacaaccctgttgcaactgtccttactgacatggtatcaatgttggctgtgattctacaatacacttatacactgaacaaggagggctactctaccttaaatcctttaaaaggaaactacttgacagtgattctggacaggccacaaaaaaacacccagatagcagtcgggaggtaccgactgcagcaggggcaagtggaaccgggctatgacccccaggaggatcccaaaagctgtgctcrctatgccctgctagggccactggtgggaggaaatttggaccaggtagtattttctgaagaagagtctgtggaacagttgaattgtatccggctgctggtgttggcatctcaagagtcttga

SEQ ID NO: 1876 - DNA, 3497 bp, Homo sapiens
ctgggtcctgtgtgtgccacaggggtggggtgtccagcgagcsgtctcctcctcctgctagtgctgctgcggcgtcccgcggcctccccgagtcgggcgggaggggagagcgggtgtggatttgtcttgacggtaattgtkgcgtttccacgtctcggaggcctgcgcgctgggttgctccttcttcgggagcgagctgttctcagcgatcccactcccagccggggctccccacacacactgggctgcgtgcgtgtggagtgggacccgcgcacacgcgtgtctctggacagctacggcgccgaaagaactaaaattccagatggcaaactcaatgaatggcagaaaccctggtggtcgaggaggaaatccccgaaaaggtcgaattttgggtattattgatgctattcaggatgcagttggaccccctaagcaagctgccgcagatcgcaggaccgtggagaagacttggaagctcatggacaaagtggtaagactgtgccaaaatcccaaacttcagttgaaaaatagcccaccatatatacttgatattttgcctgatacatatcagcatttacgacttatattgagtaaatatgatgacaaccagaaacttgcccaactcagtgagaatgagtactttaaaatctacattgatagccttatgaaaaagtcaaaacgggcaataagactctttaaagaaggcaaggagagaatgtatgaagaacagtcacaggacagacgaaatctcacaaaactgtcccttatcttcagtcacatgctggcagaaatcaaagcaatctttcccaatggtcaattccagggagataactttcgtatcacaaaagcagatgctgctgaattctggagaaagttttttggagacaaaactatcgtaccatggaaagtattcagacagtgccttcatgaggtccaccagattagctctggcctggaagcaatggctctaaaatcaacaattgatttaacttgcaatgattacatttcagtttttgaatttgatatttttaccaggctgtttcagccttggggctctattttgcggaattggaatttcttagctgtgacacatccaggttacatggcatttctcacatatgatgaagttaaagcacgactacagaaatatagcaccaaaccyggaagctatattttccggttaagttgcactcgattgggacagtgggccattggctatgtgactggggatgggaatatcttacagaccatacctcataacaagcccttatttcaagccctgattgatggcagcagggaaggattttatctttatcctgatgggaggagttataatcctgatttaactggattatgtgaacctacacctcatgaccatataaaagttacacaggaacaatatgaattatattgtgaaatgggctccacttttcagctctgtaagatttgtgcagagaatgacaaagatgtcaagattgagccytgtgggcatttgatgtgcacctcttgccttacggcatggcaggagtcggatggtcagggctgccctttctgtcgttgtgaaataaaaggaactgagcccataatcgtggayccctttgatccaagagatgaaggctccaggtgttgcagcatcattgacccctttggcatgccgatgctmgacttggacgacgatgatgatcgtgaggagtccttgatgatgaatcggttggcaaacgtccgaaagtgcactgacaggcagaactcaccagtcacatcaccaggatcctctccccttgcccagagaagaaagccacagcctgacccactccagatcccacatctaagcctgccacccgtgcctcctcgcctggatctaattcagaaaggcatagttagatctccctgtggcagcccaacrggttcaccaaagtcttctccttgcatggtgagaaaacaagataaaccactcccagcaccacctcctcccttaagagatcctcctccaccgccacctgaaagacctccaccaatcccaccagacaatagactgagtagacacatccatcatgtggaaagcgtgccttccagagacccgccaatgcctcttgaagcatggtgccctcgggatgtgtttgggactaatcagcttgtgggatgtcgactcctaggggagggctctccaaaacctggaatcacagcragttcaaatgtcaatggaaggcacagtagagtgggctctgacccagtgcttatgcggaaacacagacgccatgatttgcctttagaaggagctaaggtcttttccaatggtcaccttggaagtgaagaatatgatgttcctccccggctttctcctcctcctccagttaccaccctcctccctagcataaagtgtactggtccrttagcaaattctctttcagagaaaacaagagacccagtagaggaagatgatgatgaatacaagattccttcatcccaccctgtttccctgaattcacaaccatctcattgtcataatgtaaaacctcctgttcggtcttgtgataatggtcactgtatgctgaatggaacacatggtccatcttcagagaagaaatcaaacatccctgacttaagcatatatttaaagggagatgtttttgattcagcctctgatcccgtgccattaccacctgccaggcctccaactygggacaatccaaagcatggttcttcactcaacaggacgccctctgattatgatcttctcatccctccattaggtgaagatgcttttgatgccctccctccatctctcccacctcccccacctcctgcaaggcatagtctcattgaacattcaaaacctcctggctccagtagccggccatcctcaggacaggatcyttttcttcttccttcagatccctttgttgatctagcaagtggccaagttcctttgcctccygctagaaggttaccaggtgaaaatgtcaaaactracagaacatcacaggactatgatcagcttccttcatgttcagatggttcacaggcaccagccagaccccctaaaccacgaccgcgcaggactgcaccagaaattcaccacagaaaaccccatgggcctgaggyggcattggaaaatgtcgatgcaaaaattgcaaaactcatgggagagggttatgcctttgaagaggtgaagagagccttagagatagcccagaataatgtcgaagttgccyggagcatcctccgagaatttgccttccctcctccagtatccccacgtctaaatctatagcagccagaactgtagacaccaaaatggaaagcaatcgatgtattccaagagtgtggaaataaagagaactgagatggaattcaagagagaagtgtctcctcctcgtgtagcagcttgagaagaggcttgggagtgcagcttctcaaccatatttttaaatcagggttgaactgacaaaaataatttaaagacgtttacttcccttgaactttgaacctgtgaaatg

SEQ ID NO: 1877 - DNA, 4108 bp, Homo sapiens
ctgggtcctgtgtgtgccacaggggtggggtgtccagcgagcsgtctcctcctcctgctagtgctgctgcggcgtcccgcggcctccccgagtcgggcgggaggggagagcgggtgtggatttgtcttgacggtaattgtkgcgtttccacgtctcggaggcctgcgcgctgggttgctccttcttcgggagcgagctgttctcagcgatcccactcccagccggggctccccacacacactgggctgcgtgcgtgtggagtgggacccgcgcacacgcgtgtctctggacagctacggcgccgaaagaactaaaattccagatggcaaactcaatgaatggcagaaaccctggtggtcgaggaggaaatccccgaaaaggtcgaattttgggtattattgatgctattcaggatgcagttggaccccctaagcaagctgccgcagatcgcaggaccgtggagaagacttggaagctcatggacaaagtggtaagactgtgccaaaatcccaaacttcagttgaaaaatagcccaccatatatacttgatattttgcctgatacatatcagcatttacgacttatattgagtaaatatgatgacaaccagaaacttgcccaactcagtgagaatgagtactttaaaatctacattgatagccttatgaaaaagtcaaaacgggcaataagactctttaaagaaggcaaggagagaatgtatgaagaacagtcacaggacagacgaaatctcacaaaactgtcccttatcttcagtcacatgctggcagaaatcaaagcaatctttcccaatggtcaattccagggagataactttcgtatcacaaaagcagatgctgctgaattctggagaaagttttttggagacaaaactatcgtaccatggaaagtattcagacagtgccttcatgaggtccaccagattagctctggcctggaagcaatggctctaaaatcaacaattgatttaacttgcaatgattacatttcagtttttgaatttgatatttttaccaggctgtttcagccttggggctctattttgcggaattggaatttcttagctgtgacacatccaggttacatggcatttctcacatatgatgaagttaaagcacgactacagaaatatagcaccaaaccyggaagctatattttccggttaagttgcactcgattgggacagtgggccattggctatgtgactggggatgggaatatcttacagaccatacctcataacaagcccttatttcaagccctgattgatggcagcagggaaggattttatctttatcctgatgggaggagttataatcctgatttaactggattatgtgaacctacacctcatgaccatataaaagttacacaggaacaatatgaattatattgtgaaatgggctccacttttcagctctgtaagatttgtgcagagaatgacaaagatgtcaagattgagccytgtgggcatttgatgtgcacctcttgccttacggcatggcaggagtcggatggtcagggctgccctttctgtcgttgtgaaataaaaggaactgagcccataatcgtggayccctttgatccaagagatgaaggctccaggtgttgcagcatcattgacccctttggcatgccgatgctmgacttggacgacgatgatgatcgtgaggagtccttgatgatgaatcggttggcaaacgtccgaaagtgcactgacaggcagaactcaccagtcacatcaccaggatcctctccccttgcccagagaagaaagccacagcctgacccactccagatcccacatctaagcctgccacccgtgcctcctcgcctggatctaattcagaaaggcatagttagatctccctgtggcagcccaacrggttcaccaaagtcttctccttgcatggtgagaaaacaagataaaccactcccagcaccacctcctcccttaagagatcctcctccaccgccacctgaaagacctccaccaatcccaccagacaatagactgagtagacacatccatcatgtggaaagcgtgccttccagagacccgccaatgcctcttgaagcatggtgccctcgggatgtgtttgggactaatcagcttgtgggatgtcgactcctaggggagggctctccaaaacctggaatcacagcragttcaaatgtcaatggaaggcacagtagagtgggctctgacccagtgcttatgcggaaacacagacgccatgatttgcctttagaaggagctaaggtcttttccaatggtcaccttggaagtgaagaatatgatgttcctccccggctttctcctcctcctccagttaccaccctcctccctagcataaagtgtactggtccrttagcaaattctctttcagagaaaacaagagacccagtagaggaagatgatgatgaatacaagattccttcatcccaccctgtttccctgaattcacaaccatctcattgtcataatgtaaaacctcctgttcggtcttgtgataatggtcactgtatgctgaatggaacacatggtccatcttcagagaagaaatcaaacatccctgacttaagcatatatttaaagggagatgtttttgattcagcctctgatcccgtgccattaccacctgccaggcctccaactygggacaatccaaagcatggttcttcactcaacaggacgccctctgattatgatcttctcatccctccattaggtgaagatgcttttgatgccctccctccatctctcccacctcccccacctcctgcaaggcatagtctcattgaacattcaaaacctcctggctccagtagccggccatcctcaggacaggatcyttttcttcttccttcagatccctttgttgatctagcaagtggccaagttcctttgcctccygctagaaggttaccaggtgaaaatgtcaaaactracagaacatcacaggactatgatcagcttccttcatgttcagatggttcacaggcaccagccagaccccctaaaccacgaccgcgcaggactgcaccagaaattcaccacagaaaaccccatgggcctgaggyggcattggaaaatgtcgatgcaaaaattgcaaaactcatgggagagggttatgcctttgaagaggtgaagagagccttagagatagcccagaataatgtcgaagttgccyggagcatcctccgagaatttgccttccctcctccagtatccccacgtctaaatctatagcagccagaactgtagacaccaaaatggaaagcaatcgatgtattccaagagtgtggaaataaagagaactgagatggaattcaagagagaagtgtctcctcctcgtgtagcagcttgagaagaggcttgggagtgcagcttctcaaaggagaccgatgcttgctcaggatgtcgacagctgtggcttccttgtttttgctagccatatttttaaatcagggttgaactgacaaaaataatttaaagacgtttacttcccttgaactttgaacctgtgaaatgctttaccttgtttacartttggcaaagttgcagtttgttcttgtttttagtttagttttgttttggtgttttgatacctgtactgtgttcttcacagaccctttgtagcgtggtcaggtctgctgtaacatttcccaccaactctcttgctgtccacatcaacagctaaatcatttattcatatggatctctaccatccccatgccttgcccaggtccagttccatttctctcattcacaagatgctttgaaggttctgattttcaactgatcaaactaatgcaaaaaaaaaaaagtatgtattcttcactactgagtttcttctttggaaaccatcactattgagagatgggaaaaacctgaatgtataaagcatttatttgtcaataaactgccttttgtaaggggttttcacataacatagaggagcttcccttttttgtttaagttttgtaacctttaatcctccatattctcatgtctgtcatcccaggggtgtcacaactgtaaaaatctacaatattagaaagcagctaytacagatgtggaagagag

SEQ ID NO: 1878 - DNA, 3343 bp, Homo sapiens
ctgggtcctgtgtgtgccacaggggtggggtgtccagcgagcsgtctcctcctcctgctagtgctgctgcggcgtcccgcggcctccccgagtcgggcgggaggggagagcgggtgtggatttgtcttgacggtaattgtkgcgtttccacgtctcggaggcctgcgcgctgggttgctccttcttcgggagcgagctgttctcagcgatcccactcccagccggggctccccacacacactgggctgcgtgcgtgtggagtgggacccgcgcacacgcgtgtctctggacagctacggcgccgaaagaactaaaattccagatggcaaactcaatgaatggcagaaaccctggtggtcgaggaggaaatccccgaaaaggtcgaattttgggtattattgatgctattcaggatgcagttggaccccctaagcaagctgccgcagatcgcaggaccgtggagaagacttggaagctcatggacaaagtggtaagactgtgccaaaatcccaaacttcagttgaaaaatagcccaccatatatacttgatattttgcctgatacatatcagcatttacgacttatattgagtaaatatgatgacaaccagaaacttgcccaactcagtgagaatgagtactttaaaatctacattgatagccttatgaaaaagtcaaaacgggcaataagactctttaaagaaggcaaggagagaatgtatgaagaacagtcacaggacagacgaaatctcacaaaactgtcccttatcttcagtcacatgctggcagaaatcaaagcaatctttcccaatggtcaattccagggagataactttcgtatcacaaaagcagatgctgctgaattctggagaaagttttttggagacaaaactatcgtaccatggaaagtattcagacagtgccttcatgaggtccaccagattagctctggcctggaagcaatggctctaaaatcaacaattgatttaacttgcaatgattacatttcagtttttgaatttgatatttttaccaggctgtttcagccttggggctctattttgcggaattggaatttcttagctgtgacacatccaggttacatggcatttctcacatatgatgaagttaaagcacgactacagaaatatagcaccaaaccyggaagctatattttccggttaagttgcactcgattgggacagtgggccattggctatgtgactggggatgggaatatcttacagaccatacctcataacaagcccttatttcaagccctgattgatggcagcagggaaggattttatctttatcctgatgggaggagttataatcctgatttaactggattatgtgaacctacacctcatgaccatataaaagttacacaggaacaatatgaattatattgtgaaatgggctccacttttcagctctgtaagatttgtgcagagaatgacaaagatgtcaagattgagccytgtgggcatttgatgtgcacctcttgccttacggcatggcaggagtcggatggtcagggctgccctttctgtcgttgtgaaataaaaggaactgagcccataatcgtggayccctttgatccaagagatgaaggctccaggtgttgcagcatcattgacccctttggcatgccgatgctmgacttggacgacgatgatgatcgtgaggagtccttgatgatgaatcggttggcaaacgtccgaaagtgcactgacaggcagaactcaccagtcacatcaccaggatcctctccccttgcccagagaagaaagccacagcctgacccactccagatcccacatctaagcctgccacccgtgcctcctcgcctggatctaattcagaaaggcatagttagatctccctgtggcagcccaacrggttcaccaaagtcttctccttgcatggtgagaaaacaagataaaccactcccagcaccacctcctcccttaagagatcctcctccaccgccacctgaaagacctccaccaatcccaccagacaatagactgagtagacacatccatcatgtggaaagcgtgccttccagagacccgccaatgcctcttgaagcatggtgccctcgggatgtgtttgggactaatcagcttgtgggatgtcgactcctaggggagggctctccaaaacctggaatcacagcragttcaaatgtcaatggaaggcacagtagagtgggctctgacccagtgcttatgcggaaacacagacgccatgatttgcctttagaaggagctaaggtcttttccaatggtcaccttggaagtgaagaatatgatgttcctccccggctttctcctcctcctccagttaccaccctcctccctagcataaagtgtactggtccrttagcaaattctctttcagagaaaacaagagacccagtagaggaagatgatgatgaatacaagattccttcatcccaccctgtttccctgaattcacaaccatctcattgtcataatgtaaaacctcctgttcggtcttgtgataatggtcactgtatgctgaatggaacacatggtccatcttcagagaagaaatcaaacatccctgacttaagcatatatttaaagggtacgtatagaatataatttcctttgtgatgtacatcttaatggtcagaatttaaaggcaaaatttcatgccattgtactgaaaatacattaaggttttgtgttatcctctaggagatgtttttgattcagcctctgatcccgtgccattaccacctgccaggcctccaactygggacaatccaaagcatggttcttcactcaacaggacgccctctgattatgatcttctcatccctccattaggttgaaacctttaaaaaagttttgaacaacccacccctccttcttttaatttcagaattttcagaattcagagttcagtataacacagactcactgggttgtgaatttgcctgaaatttgaatgggttctccaggtgccggtgactcccaagttcacgagaccattactccatgtagatgattaaggtagtagtgtagtagttgggcatcagtcaggttttaagcaagttgttttgtccatactaaatgtagtctaaaaacacatgagagctttgtgctctagtagttttgaagtgatgacttgaagtgttgagattttctttaagtataataattcttaataaatatgaacttgcttttcttgcagcatgagcaccagttccacttacgctaattaaattatgcaaaattaaatagttgtatgtagagaactgataataaattctgttttattctaatcattacaactgtaacacattc

SEQ ID NO: 1879 - DNA, 3256 bp, Homo sapiens
tggtcaacgcgatttgcttccaagggacggccaccagtcggcacaggaaaggggcagaggcagtgagttcagcgtgtggacgagggtcaacaagtttgggatcaagcggctgccgctcctccaaaagcgaccgaagcgcgagcagattacccctccgagccagtgtagtaaacacacttcagaaacgtgaggtgccggtggtcacgaggggagcgcgccctccaatgaggagccgggggcggggccgaggccgctgacgcggcggcggcggcagagtcacccgggcagcctcgggaccggtcaccggccggcaaccgtccagcggcctcgaccaccgcctctagcctccgttcccggtcctttctcccgggccgagagacagcgtcgccgacaggggctcattcccctccggttctcctcggtgactcacctcgggcgggccgttttgtctttaggggccgccttggtggggcgaggtttccgtgacgaatctcctggggccgtccgtgccggctcgggccgtcgtggcgrctcgagctcctggaacttgctyaggctccggaggtccgaggccctcgaagttatgcgtcgcctccaggcggttgcggcgggcgcgggctcctaaagggcgtcacacccggactccgccgactaggcaacctccattcatctttccactgcgcctccrgcgcccccgccttctccggtcccctcctcggagtcattttttcctgttycccctctgccgccctttcctcacgccccgggtgaggcaattctcttggaagcgaaggtgtcggctatgagccggagcctccttccttgaatttctccgtggaggacccgccgcgccccccggcatgggggtgaacgccgtgcactggttccgaaaggggctccggctccacgacaaccccgccctgaaggagtgcattcagggcgccgacaccatccgctgcgtctacatcctggacccctggttcgccggctcctccaatgtgggcatcaacaggtggcgatttttgcttcagtgtcttgaggatcttgatgccaatctacgaaaattaaactcccgtctgtttgtgattcgtggacaaccagcagatgtgtttcccaggcttttcaaggaatggaacattactaaactttcaattgagtatgattctgagccctttggaaaggaacgrgacgcagctattaagaaactggcaactgaagctggagtagaagtcattgtaagaatttcacatacattatatgacctagacaagatcatagaactcaatggtggacaaccgcctctaacttataaaagattccagactctcatcagcaaaatggaaccactagagataccagtagagacaattacttcagaagtgatagaaaagtgcacaactcctctgtctgatgaccatgatgagaaatatggagtcccttcactggaagagctaggttttgatacagatggcttatcctctgcagtgtggccaggcggagaaactgaagcacttactcgtttggaaaggcatttggaaagaaaagcttgggtggcaaattttgaaagacctcgaatgaatgcgaattctctgcttgcaagccctactggacttagtccttatctccgatttggttgtttgtcatgtcgactgttttacttcaaactaacagatctctacaaaaaggtaaagaagaacagttcccctcccctttccctttatgggcaactgttatggcgtgaatttttctatacagcagcaacaaataatccacgctttgataaaatggaaggaaaccctatctgtgttcagattccttgggataaaaatcctgaggctttagcmaaatgggcggaaggccggacaggctttccatggattgatgccatcatgacrcagcttcgtcaggagggttggattcatcatctagccaggcatgcagttgcttgcttcctgacacgaggggacctgtggattagttgggaagaaggaatgaaggtatttgaagaattattgcttgatgcagattggagcataaatgctggaagttggatgtggctgtcttgtagttccttttttcaacagttttttcactgctattgccctgttggttttggtaggagaacagatcccaatggagactatatcaggcgttatttgcctgtcctaagaggcttccctgcaaaatatatctatgatccctggaatgcaccagaaggtatccaaaaggtagccaaatgtttgataggagttaattatcctaaaccaatggtgaaccatgctgaggcaagccgtttgaatatcgaaaggatgaaacagatctatcagcagctttcacgatatagaggactaggtcttctggcatcagtaccttctaatcctaatgggaatggaggcttcatgggatattctgcagaaaatatcccaggttgtagcagcagtggaagttgctctcaagggagtggtattttacactatgctcatggcgacagtcagcaaactcacctgttgaagcaaggaagaagctccatgggcactggtctcagtggtgggaaacgtcctagtcaggaagaggacacacagagtattggtcctaaagtccagagacagagcactaattagaaaacattcaggaggaatactgttgcagctgaaattggtggggagttcaatacttttcaattaagttatttaaaaatattcttcattgatggaaagcagttacatattgaaatatgttgtttctaatgacatttctgtggtttttaactttttaatgaatttcacagagkacaattggtaatttgtatataaagaacttggcaagagaatttgcttaatgtaaatataaacagtcacaattagtatagacccatcgatatatttttgataatttttcatgtatggtaaagttaaaatgacaaattgatattctgatataaaactcaaagttttgaagtcagtgggaaaaaaggaggtttttagactttcttaaaagacgttaaaattttaggacagaattttcttgatgttgtttgatctaactttgcactctttgataataatgttttagataatgtgcgtaatccaaattggtattgtagcctctgttaacacagacagtatatgttttaaactttgatgtaaacctttttagacccaaacttgtggaagtatcatgtgttaagttctctgtctctgtttctttgttcatttattactaaaatgaacttgttattaaagtatatgcaaatatg

SEQ ID NO: 1880 - DNA, 3371 bp, Homo sapiens
tggtcaacgcgatttgcttccaagggacggccaccagtcggcacaggaaaggggcagaggcagtgagttcagcgtgtggacgagggtcaacaagtttgggatcaagcggctgccgctcctccaaaagcgaccgaagcgcgagcagattacccctccgagccagtgtagtaaacacacttcagaaacgtgaggtgccggtggtcacgaggggagcgcgccctccaatgaggagccgggggcggggccgaggccgctgacgcggcggcggcggcagagtcacccgggcagcctcgggaccggtcaccggccggcaaccgtccagcggcctcgaccaccgcctctagcctccgttcccggtcctttctcccgggccgagagacagcgtcgccgacaggggctcattcccctccggttctcctcggtgactcacctcgggcgggccgttttgtctttaggggccgccttggtggggcgaggtttccgtgacgaatctcctggggccgtccgtgccggctcgggccgtcgtggcgrctcgagctcctggaacttgctyaggctccggaggtccgaggccctcgaagttatgcgtcgcctccaggcggttgcggcgggcgcgggctcctaaagggcgtcacacccggactccgccgactaggcaacctccattcatctttccactgcgcctccrgcgcccccgccttctccggtcccctcctcggagtcattttttcctgttycccctctgccgccctttcctcacgccccgggtgaggcaattctcttggaagcgaaggtgtcggctatgagccggagcctccttccttgaatttctccgtggaggacccgccgcgccccccggcatgggggtgaacgccgtgcactggttccgaaaggggctccggctccacgacaaccccgccctgaaggagtgcattcagggcgccgacaccatccgctgcgtctacatcctggacccctggttcgccggctcctccaatgtgggcatcaacaggtggcgatttttgcttcagtgtcttgaggatcttgatgccaatctacgaaaattaaactcccgtctgtttgtgattcgtggacaaccagcagatgtgtttcccaggcttttcaaggaatggaacattactaaactttcaattgagtatgattctgagccctttggaaaggaacgrgacgcagctattaagaaactggcaactgaagctggagtagaagtcattgtaagaatttcacatacattatatgacctagacaagatcatagaactcaatggtggacaaccgcctctaacttataaaagattccagactctcatcagcaaaatggaaccactagagataccagtagagacaattacttcagaagtgatagaaaagtgcacaactcctctgtctgatgaccatgatgagaaatatggagtcccttcactggaagagctaggttttgatacagatggcttatcctctgcagtgtggccaggcggagaaactgaagcacttactcgtttggaaaggcatttggaaagaaaagcttgggtggcaaattttgaaagacctcgaatgaatgcgaattctctgcttgcaagccctactggacttagtccttatctccgatttggttgtttgtcatgtcgactgttttacttcaaactaacagatctctacaaaaaggtaaagaagaacagttcccctcccctttccctttatgggcaactgttatggcgtgaatttttctatacagcagcaacaaataatccacgctttgataaaatggaaggaaaccctatctgtgttcagattccttgggataaaaatcctgaggctttagcmaaatgggcggaaggccggacaggctttccatggattgatgccatcatgacrcagcttcgtcaggagggttggattcatcatctagccaggcatgcagttgcttgcttcctgacacgaggggacctgtggattagttgggaagaaggaatgaaggtatttgaagaattattgcttgatgcagattggagcataaatgctggaagttggatgtggctgtcttgtagttccttttttcaacagttttttcactgctattgccctgttggttttggtaggagaacagatcccaatggagactatatcaggcgttatttgcctgtcctaagaggcttccctgcaaaatatatctatgatccctggaatgcaccagaaggtatccaaaaggtagccaaatgtttgataggagttaattatcctaaaccaatggtgaaccatgctgaggcaagccgtttgaatatcgaaaggatgaaacagatctatcagcagctttcacgatatagaggactaggtcttctggcatcagtaccttctaatcctaatgggaatggaggcttcatgggatattctgcagaaaatatcccaggttgtagcagcagtggaagttgctctcaagggagtggtattttacactatgctcatggcgacagtcagcaaactcacctgttgaagcaaggaagaagctccatgggcactggtctcagtggtgggaaacgtcctagtcaggaagaggacacacagagtattggtcctaaagtccagagacagagcactaattaggtaaatattttagagctgtatttcttgctttrgaagagtatataattaacataaattaagataatttcaaaaatggagcaaatctctattttcaaaccagaaaatcttgaggcattaatttttaagcaatttttacaaactcagttaatttttggtcaagagacatgcatctgtactggagaaattgttgcaccagttttatattcatctgaaccaatgctctttaaattagagatgtttatgattttgtggtcaagttttttcttagaaaaagacaacttttttatttccttactatgtaactatgagtctaaaacaattaaagtggcctgtttattttagtgacattaatataatctttttatgaactttcccctaaatctttgcctcttaaatgttgataaatttcttttatctgttatgatgcttctaaaatctaaattatttccaatttgggaatagttcaaaattttttaaaatgctggcccttattagaagtatcagaaagccttgcctgcattcaatttaattggatttgggatgtcattttgtgatttaaattaatatgaaaaatatttatacgttggatttgccagttttttttttatgtcaacctaattagactataagtatcttgaagataaggtcaataaacactcatcacatttttgtcattgaattatttgcaatcaagctttacctagtttttttttcccccttaaatcacagaaaacattcaggaggaatact

SEQ ID NO: 1881 - DNA, 3225 bp, Homo sapiens
tggtcaacgcgatttgcttccaagggacggccaccagtcggcacaggaaaggggcagaggcagtgagttcagcgtgtggacgagggtcaacaagtttgggatcaagcggctgccgctcctccaaaagcgaccgaagcgcgagcagattacccctccgagccagtgtagtaaacacacttcagaaacgtgaggtgccggtggtcacgaggggagcgcgccctccaatgaggagccgggggcggggccgaggccgctgacgcggcggcggcggcagagtcacccgggcagcctcgggaccggtcaccggccggcaaccgtccagcggcctcgaccaccgcctctagcctccgttcccggtcctttctcccgggccgagagacagcgtcgccgacaggggctcattcccctccggttctcctcggtgactcacctcgggcgggccgttttgtctttaggggccgccttggtggggcgaggtttccgtgacgaatctcctggggccgtccgtgccggctcgggccgtcgtggcgrctcgagctcctggaacttgctyaggctccggaggtccgaggccctcgaagttatgcgtcgcctccaggcggttgcggcgggcgcgggctcctaaagggcgtcacacccggactccgccgactaggcaacctccattcatctttccactgcgcctccrgcgcccccgccttctccggtcccctcctcggagtcattttttcctgttycccctctgccgccctttcctcacgccccgggtgaggcaattctcttggaagcgaaggtgtcggctatgagccggagcctccttccttgaatttctccgtggaggacccgccgcgccccccggcatgggggtgaacgccgtgcactggttccgaaaggggctccggctccacgacaaccccgccctgaaggagtgcattcagggcgccgacaccatccgctgcgtctacatcctggacccctggttcgccggctcctccaatgtgggcatcaacaggtggcgatttttgcttcagtgtcttgaggatcttgatgccaatctacgaaaattaaactcccgtctgtttgtgattcgtggacaaccagcagatgtgtttcccaggcttttcaagtttaggaatggaacattactaaactttcaattgagtatgattctgagccctttggaaaggaacgrgacgcagctattaagaaactggcaactgaagctggagtagaagtcattgtaagaatttcacatacattatatgacctagacaagatcatagaactcaatggtggacaaccgcctctaacttataaaagattccagactctcatcagcaaaatggaaccactagagataccagtagagacaattacttcagaagtgatagaaaagtgcacaactcctctgtctgatgaccatgatgagaaatatggagtcccttcactggaagagctaggttttgatacagatggcttatcctctgcagtgtggccaggcggagaaactgaagcacttactcgtttggaaaggcatttggaaagaaaagcttgggtggcaaattttgaaagacctcgaatgaatgcgaattctctgcttgcaagccctactggacttagtccttatctccgatttggttgtttgtcatgtcgactgttttacttcaaactaacagatctctacaaaaaggtaaagaagaacagttcccctcccctttccctttatgggcaactgttatggcgtgaatttttctatacagcagcaacaaataatccacgctttgataaaatggaaggaaaccctatctgtgttcagattccttgggataaaaatcctgaggctttagcmaaatgggcggaaggccggacaggctttccatggattgatgccatcatgacrcagcttcgtcaggagggttggattcatcatctagccaggcatgcagttgcttgcttcctgacacgaggggacctgtggattagttgggaagaaggaatgaaggtatttgaagaattattgcttgatgcagattggagcataaatgctggaagttggatgtggctgtcttgtagttccttttttcaacagttttttcactgctattgccctgttggttttggtaggagaacagatcccaatggagactatatcaggcgttatttgcctgtcctaagaggcttccctgcaaaatatatctatgatccctggaatgcaccagaaggtatccaaaaggtagccaaatgtttgataggagttaattatcctaaaccaatggtgaaccatgctgaggcaagccgtttgaatatcgaaaggatgaaacagatctatcagcagctttcacgatatagaggactaggtcttctggcatcagtaccttctaatcctaatgggaatggaggcttcatgggatattctgcagaaaatatcccaggttgtagcagcagtggaagttgctctcaagggagtggtattttacactatgctcatggcgacagtcagcaaactcacctgttgaagcaaggaagaagctccatgggcactggtctcagtggtgggaaacgtcctagtcaggaagaggacacacagagtattggtcctaaagtccagagacagagcactaattaggtaaatattttagagctgtatttcttgctttrgaagagtatataattaacataaattaagataatttcaaaaatggagcaaatctctattttcaaaccagaaaatcttgaggcattaatttttaagcaatttttacaaactcagttaatttttggtcaagagacatgcatctgtactggagaaattgttgcaccagttttatattcatctgaaccaatgctctttaaattagagatgtttatgattttgtggtcaagttttttcttagaaaaagacaacttttttatttccttactatgtaactatgagtctaaaacaattaaagtggcctgtttattttagtgacattaatataatctttttatgaactttcccctaaatctttgcctcttaaatgttgataaatttcttttatctgttatgatgcttctaaaatctaaattatttccaatttgggaatagttcaaaattttttaaaatgctggcccttattagaagtatcagaaagccttgcctgcattcaatttaattggatttgggatgtcattttgtgatttaaattaatatgaaaaatatttatacgttggatttgccagttt

SEQ ID NO: 1882 - DNA, 2869 bp, Homo sapiens
tccagactgcaggccgcgcccaggccgcgcccaggctgcgccgcccgcctgcctcccgcgctgccgcgtcgccagtgctagcgctcctctccagcatgctgcggcggggcagccaggcgctccggcgcttctccactggccgggtttatttcaaaaacaagctgaagttggcactaattggccagagcctctttggacaagaagtctatagccacctccgcaaagagggccaccgagtagtaggggtgttcacagttccagacaaggatggaaaagctgaccctctggctttggctgcagagaaagatgggacccctgtgttcaagcttcctaaatggagggtcaagggcaagaccatcaaagaagtggcagaagcctacagatccgtgggtgcagagctaaatgtgctccctttctgcactcagttcattcccatggatataattgatagtccaaagcacggctctatcatttatcacccatccatcctgcccaggcacagaggagcctctgctatcaattggactctaattatgggagataagaaagctgggttttctgttttctgggctgatgatggcttggatacaggacccatccttcttcagagatcatgtgatgttgaacccaatgatacagtggatgcactttataatcggtttctttttcctgaaggaatcaaggccatggtagaagctgtccaactcatagctgatggaaaagctcctcgtataccccagccagaagaaggggcaacatatgaaggtatccagaaaaaggaaaatgctgagatttcttgggaccagtctgccgaagttttacataactggattcgaggtcatgataaagtccctggagcttggacagagataaatggacagatggtcactttctatggctcgacattactgaatagctctgtgcctcctggagaaccactggaaattaaaggtgccaagaagcctggtctcgttaccaaaaatggacttgttctttttggtaacgatggaaaagcactgacggtgagaaatctgcagtttgaagatggaaaaatgatccctgcctctcagtacttttcaacgggtgagacgtcagtggtagaactgacagctgaagaggtgaaagtggcagagaccatcaaggtcatctgggctggaattttaagcaatgtccccattattgaagactcaacagacttctttaaatctggagcaagctcaatggatgttgccaggctggttgaagagatcagacagaaatgtggtgggcttcagttgcagaatgaagatgtctatatggccaccaagtttgaaggctttatcyaaaaggtcgtgaggaaactgagaggagaagatcaagaggtggagctggttgtagattatatttcaaaggaggtcaatgaaatcatggtaaaaatgccataccagtgtttcataaatggacagttcacagatgcagacgatggaaagacttacgacactatcaacccaacagatggatctacaatatgcaaagtatcctacgcttctttggcggatgttgataaagcagtagcagcagcaaaagatgcttttgaaaacggtgaatggggaagaatgaatgcaagagaaagaggaagattgatgtatagacttgcagacctactggaagagaaccaagaagagctggcaactattgaagcccttgattcaggggctgtctataccttggccctgaagacacacattggaatgtctgtgcaaacattcagatattttgctggctggtgcgacaaaattcagggttctactattccaatcaaccaggcccgtccaaatcgcaatctgaccttcaccaagaaagagccactcggtgtctgtgccattattattccctggaactacccgctgatgatgctggcatggaagagtgctgcgtgtttggcagcaggcaataccttagtgctcaagccagcacaggtcacrcccttgactgctttgaagtttgcagaactgtctgtgaaagcaggctttccaaagggggtcatcaacatcattccaggctcaggtggcatagcaggacaacgtctgtctgaacatcctgacatccgcaaacttggtttcactggwtccactcctattggcaaacagatcatgaagagctgtgctgttagcaacttgaagaaagtttcccttgagcttggtggcaagtctccacttataatatttaatgactgtgaacttgacaaggctgtgcgaatgggcatgggagcagtatttttcaacaaaggagagaactgtattgctgctgggcggttgttcgtggaagaatccatccacgacgaatttgtgacaagagtggtagaagaaattaaaaagatgaaaattggtgatccacttgacagatccactgatcatgggccccaaaatcataaggctcatctggaaaagctgctgcaatactgtgaaactggagtgaaagaaggggccactttggtgtacgggggaagacaagtccaaaggccaggctttttcatggagccgaccgtgttcacagatgtggaagactacatgtacctcgccaaagaggaatcctttgggcctattatggtcatttctaaattccaaaatgggtaggttcttcagacacaatgtaacttaggttttgactagataagtcatttttcccctttgccactgtgctatatacacagcataagattaatgaacatgtaattttctaccataagaataattaacttaaataattagaagttacgcttttgctaaccatcgtagatcatagtatatttttgcttttcagcttcaattaatggccaacataatgggcttttagctgaataaattttagtttttctgcacttgacatt

SEQ ID NO: 1883 - DNA, 1806 bp, Homo sapiens
cggtggccgtcggcggaggggcggggcctgctacagcgtcgccggctgacgcgaatgacgctgcgccagtcaggccgcagccccgctgcttggcccgtcgggcccgccttggccggctcggcccgcccccggccctccctgcacggcctcccgtgcgcccctgtcagactgtggcggccggtcgcgcggtgcgctctccctccctgcccgcagcctggagaggcgcttcgtgctgcacacccccgcgttcctgccggcaccgcgcctgccctctgccgcgctccgccctgccgccgaccgcacgcccgccgcgggacatggcacacgcaccggcacgctgccccagcgcccggggctccggggacggcgagatgggcaagcccaggaacgtggcgctcatcaccggtatcacaggccaggatggttcctacctggctgagttcctgctggagaaaggctatgaggtccatggaattgtacggcggtccagttcatttaatacgggtcgaattgagcatctgtataagaatccccaggctcacattgaaggaaacatgaagttgcactatggcgatctcactgacagtacctgccttgtgaagatcattaatgaagtaaagcccacagagatctacaaccttggagcccagagccacgtcaaaatttcctttgacctcgctgagtacactgcggacgttgacggagttggcactctacgacttctagatgcagttaagacttgtggccttatcaactctgtgaagttctaccaagcctcaacaagtgaactttatgggaaagtgcaggaaataccccagaaggagaccacccctttctatccccggtcaccctatggggcagcaaaactctatgcctaytggattgtggtgaacttccgtgaggcgtataatctctttgcagtgaacggcattctcttcaatcatgagagtcccagaagaggagctaatttcgttactcgaaaaattagccggtcagtagctaagatttaccttggacaactggaatgtttcagtttgggaaatctggatgccaaacgagattggggccatgccaaggactatgtggaggctatgtggttgatgttgcagaatgaygagccggaggacttcgttatagctactggggaggtccatagtgtccgggaatttgtcgagaaatcattcttgcacattggaaaaaccattgtgtgggaaggaaagaatgaaaatgaagtgggcagatgtaaagagaccggcaaagttcacgtgactgtggatctcaagtactaccggccaactgaagtggactttctgcagggcgactgcaccaaagcgaaacagaagctgaactggaagccccgggtcgctttcgatgagctggtgagggagatggtgcacgccgacgtggagctcatgaggacaaaccccaatgcctgagcagcgcctcggagcccggcccgccctccggctacaatccccgcagagtctccggtgcagacgcgctgcggggatggggagcggcgtgccaatctgcgggtcccctgcggcccctgctgcygctgcgctgtcccggccgcaagagcggggccgccccgccgaggtttgtagcagccgggatgtgaccctccagggtttgggtcgctttgcgtttgtcgaagcctcctctgaatggctttgtgaaatcaagatgttttaatcacattcactttacttgaaattatgttgttacacaacaaattgtggggccttcaaattgtttttctcttttcatattaaaaatggtctttctgtgaactagcattcacag

SEQ ID NO: 1884 - DNA, 7311 bp, Homo sapiens
gttcgggggtcggcggaagatggcggccggcgaaaggagctggtgcctgtgcaagttgttgaggtttttttattcattattcttccctgggctcattgtatgtggaactttatgtgtgtgtttggtcattgtcctttggggaatcagactgctgctacagagaaagaaaaaattagtgtcaactagcaaaaatgggaaaaatcaaatggtgattgcattttttcatccatactgcaatgctggtggaggaggagaaagagttttatggtgtgctttaagagccctgcagaaaaaacggagtttcacacttgttgcccaggcaggagtgcagtgatgcagtctcggctctcagtctctcagggtatcctgaagcagtttatgttgtttataccggcgatgttaatgtcarcggtcaacagatactagaaggtgctttcagaagatttaacatcagattaattcacccagtgcagtttgtttttttaaggaaacgctatcttgtggaagattcactgtatcctcacttcacactgctgggccaaagtctaggatccatttttcttggctgggaagctctaatgcagtgtgttcctgatgtttacattgattcaatgggatacgcttttacgcttcctctgtttaagtatatagggggttgccaagttggaagctatgttcattatcctactatcagcaccgacatgctctctgtagtgaagaatcaaaatattggatttaataatgcagccttcattaccaggaatccttttctcagcaaagtaaagctcatctactactatttatttgcttttatttatggacttgttggttcttgcagtgatgtagtcatggtcaattcttcttggacactaaaccatattctctcactatggaaagttgggaattgcactaacattgtttatccaccttgtgatgtgcagacatttctggacattcccttacatgagaaaaagatgaccccaggacatttgctggtttctgttggccagtttaggccrgaaaagaatcatccattgcagatcagagcctttgctaaattgctgaataagaagatggttgagtcacctccttcgcttaaacttgtcctcattggaggktgtcgtaacaaagatgatgaacttagggtaaaccaactgagaaggctgtctgaggatttaggagttcaagaatatgtggaatttaaaataaacattccatttgatgaattaaagaattatttgtctgaagcaacaattggtctgcataccatgtggaacgrgcattttgggattggagttgtggagtgtatggcagctggcacaattatccttgcacacaattcggggggcccaaagcttgacattgtggttcctcacgaaggagatataactggctttctggctgagagtgaagaagactatgctgaaactatcgctcacattctttccatgtctgcagaaaagagactccaaatcagaaaaagtgctcgtgcatctgtaagcagattctctgatcaggaatttgaagtgacattcctatcatctgtggaaaagttatttaagtaatgccatatctgtaaaattaaagatattttatataaactggttaaacaccttcatatgtaaatatttttctaaattcaatctcatttgtcaaatcattttactttagaaaacagacaaaatttccttttagaataaaaggaagtgttgaaaagaaaatggatgactagccttcggcttccattcttggtatacmtgaragaggctggctgctgagatgaatgtgaaccaggttgcagagaatctggctttgagccaccaggaagaactagtggatttgccaaaaaactaccccttgagtgaaaatgaagatgagggggacagtgatggagagagaaagcatcaaaagcttctggaagcaatcatttcccttgatggaaagaataggcggaaattggctgagaggtctgaggctagtctgaaagtgtcagagttcagtgtcagttctgaaggatcaggagaaaagctggkccttgcagatctgcttgagcccgttaaaacttcatcttctttggccrctgtaaaaaagcaactgaatagagtcaaatcaaagaaggtggtggagttacctcttaacaaagaaaaaattgaacagatccacagagaagtagcattcagtaaaacctcacaggtcctctccaaatgggaccctatcatcctgaagaaccagcaggcagagcagctggtttttcccctggggaaggagcagccagccattgctcccattgaacatgcgctcagtggctggaaggcaagaactcccctggagcaggaaatttttaacctcctccataagaacaagcagccagtgacagatcctttactgactcccatggaaaaggcctctctccragccatgagcctrgaagaggcaaagatgcaccgagcagagcttcagagggctcgggctctgcagtcctactatgaggccaaggctcgaaragagaagaaaatcaaaagtaaaaagtatcacaaagtcgtgaagaaaggaaaggccaagaaagccytaaaagagtttgagcagctacagaaggttaatccarctgtggcaytrgaagaamtggaaaaaattgaaaatgccagaatgatggaaagaatgagccttaagcaccaaaacagtgggaaatgggccaagtcaaaggcaattatggccaaatatgacctggaggctcrccaagctatgcaggaacagttggccaagaacaaagaactgacacagaaactccaggtagcctctgagagtgaggaagaggagggaggcacagaagtggaagaactccttgtccctcatgtagcgaatgaagtgcagatgaatgtggacggaccgaatccctggatgttcaggagctgcaccagtgacaccaaagaggctgcaacacaggaggaccctgagcaagtgccagagcttgcagctcatgaggtttctgcaagtgaggcagaagaaagaccagtggcagaggaagaaattttgttgagagaatttgaggaaaggcaatcccttagaaaaagatctgagctcaaccaggatgctgagccagcaagcagtcaagaaacaaaagattctagcagccaggaggtgctgtccgaattgagggcactatctcagaaattgaaggaaaaacatcagtccaggaagcaaaaagcaagttcagaggggactgttccccaggtccagagagaggaacctgccccagaagaagcggaacccctattgctacagaggtcagagagagtacaaactctggaagagctagaagagctgggaaaagaagattgttttcaaaataaggagcttcccagacctgtgttagaaggacagcagtcagagaggaccccaaataatcggcctgatgcccctaaggagaagaaagagaaggagcaactgatcaacctacagaacttcctgaccacacagtctccttccgtgaggtctttggcagttcccacaataatagaggagctggaagatgaagaggagagagaccaaaggcagatgataaaggaagcttttgctggggatgatgtcatcagagatttcttgaaagagaagagggaagctgtggaggcgagtaagccaaaggacgtggacctgacactacctggctggggcgagtggggtggtgtgggcctaaagcccagtgccaagaaaagacgccagtttctcattaaagcccctgagggtcctccaagaaaagataagaatttgccaaatgtgattatcagtgagaagcgcaacatccacgcagcagctcatcaggtacaagtgcttccatatccatttacccaccatcggcaatttgaaaggaccatccagacccctataggatccacatggaacacccagagggctttccaaaagctgactactcccaaggtcgtcaccaagccaggccatatcattaagcccataaaagcagaggatgtgggctaccagtcttcctcaaggtcagacctgcctgtcatacagaggaatccaaaacgaatcaccacacgtcacaataaagaagaaaaactgtaggttgtgtagctggagaagtgacagtcaggggccctgattccacttcctttggtccagttttactctgctacagggtggattccaaaactggctcagyacattgcatgtagttragccacattttttaaaaaaagaaaatggatgaccattaattgactagcattttagaattgatcagacattagaacacagaaaaattctagtacatttaaattctaaacaatacagtggatgacccttttgaatatacctaatgatttccttaaaaaagaaattttaaacagacttgtttaatcgtgttctcaaagcatacagtcaagaggtgggactgactgatgctttataggtgtgtgtagggtggtagaggccaaggtgctgccagcaatcctttccatactaggtactggtgaaaattgtttttgtttatgctgtcrgcacatttgtgtgggtctctcattgtcccttaacagtgccgcatctcagcctggaagtcagctttaagtcattcaagagaacctcaggctgtttttctgacagtgatgatatgatatacagatacatccacagggtatctattaccagcataatgcattgtaagatggcaaggtggcattttgaaagagcgctgggcaagcagttagcacatctgggcctaccttcagcttcttcatttacaaacttctgaccttttgacactaaagctgctcctttatctttctgagtctcagattcttcatctgtaatctggagttgttaattccagtccttactaccttttagagttggaatgagatggaaagtagatgaaactactttgaaaattacgacagttaagggctgggtgcggtgtctcacacctgtaatcccagcactttgggaggccgagatgggtggatcatgaggtcagcagttgagaccagcctgaacaacatggtgaaaccctgtctgtactaaaaatacaaaaaaattagctgggcctggtggcaggcacctgtaatcccagctacttgggagactgaggcaggagaattgcttgaaactggaaggcagaggttgcagtgagccaagattgtgccactgcactctagcctgggcaataagcaaaactccatctcaaaaaagaaaaaaaggaaaaagaaaattatgagamttacttaaaggtaacatcacatactaaatgtcttctataatcctatatttattaatgcattacaactctgtagattgttagttactaggccagtagctaggaattggtataaatttaatgcaccttctatcctgaataactagcatggaaaagtgaatatatgtgtgagcagatatggctataaagacctatagcttttgcactttatgcatatataatcaatcctttctagttcagtgaattgaccccatccacaggctgattcatctttgtgttaaggggcaaatgaaacggtatattatttctttgcagtctcctctcagtcattcatcaatgtggccagcttatctactcccaattatgttgttgatacatctccaagccatctgtcatcagatcaaaaagcagcaaacagagggtcagtcacaggatgttctgacacaccattgtaactttttgttagagatgatcccatttagaaaaagactggtagaaattggagtgaaaggaaccctacagattagcccagttctctcttattttcagctttacagacaagaacaatttaaatctaaagaatttagtagattccttcagtgtcacaaagctgtttcatgaaagaatcaagattataacctggatattctgactcctggcccagtgctttttcttactttgtagctacactttgaagtaagattcaaactgttatccactcaattgccttattcctgaggatgtagtgaaggaagaaaaagttttctggaattccgtaaaytatattttaagcttatttcttcaaaattattttcatatatcacagatatatcattggaagatataatttgcatatatgttcattatcagtgttcctaatttggtattacatgtattctatttttttctgaatgatagcatgaaaagtgtcaaagtggtttgtccgctagcgtctgtctgcagaactttcaggatgactattaattcctctcagatgtcatttttgagtggtccaagcctgctgttttgaacccacagcagtggagatttgtattcttatttacagttgtgtactataaagtgtgtgttacataggttttgtgtaataattatttgtaaatattatttagatttgtatttagacatgatttatatctaatatagatacaaagtctgtgtctaaatattatttaaaraagtgatttttcattytcttggattctttccagtgtggtgccttttatatgcctcacatagtctccttgttctcctactaatattcccaagctccatatgccaattaaagaagaaacaaaaataaaagtttgtcttgcttgtgaaacattaagaagaggctgtcaggtttaataaactttttaatgaatatttcagacataacaaaaaactgcagagcttcgtacacttgatttaaataattcttgarggattttataaggtcatcttatagacaaaattawgagamaccagtgtggttatcaatgctttcagaatacttgtgtttatgtaaatataccccagagtccaaaactctgatatattcatatatattcacaatgagaggatgtctgtgccaaatctgtcaatcagtacaatagaaaagttaattatataactacaacacgaaacacaaatttttagaagcaaattatgtcctgtaatttacccccctccccgctgctcctctgctaactcattttcctcttttcccactctaaatgtaaggcaacccttggctttggagaagcatctgttccaatattctggtgctatgtgctcagttgtactatatgcaaatgttactagacacagaggaggtcaaagtgttgatacacttattgctaccatttacagaatgatcaatttgatagctatcatacatggctagcaagacactgatttttctaataaaaaaatttttaatgcatacaggtctggtgaacagtttcaatttaacggatgaggccaaggctaaagccagagtaaagtaatcagagccatgcctcaggaacacgatttagctaatagtgtgtgtaaaatgggtaaggtctagaattagggactaa

SEQ ID NO: 1885 - DNA, 6664 bp, Homo sapiens
gttcgggggtcggcggaagatggcggccggcgaaaggagctggtgcctgtgcaagttgttgaggtttttttattcattattcttccctgggctcattgtatgtggaactttatgtgtgtgtttggtcattgtcctttggggaatcagactgctgctacagagaaagaaaaaattagtgtcaactagcaaaaatgggaaaaatcaaatggtgattgcattttttcatccatactgcaatgctggtggaggaggagaaagagttttatggtgtgctttaagagccctgcagaaaaaacatttctggacattcccttacatgagaaaaagatgaccccaggacatttgctggtttctgttggccagtttaggccrgaaaagaatcatccattgcagatcagagcctttgctaaattgctgaataagaagatggttgagtcacctccttcgcttaaacttgtcctcattggaggktgtcgtaacaaagatgatgaacttagggtaaaccaactgagaaggctgtctgaggatttaggagttcaagaatatgtggaatttaaaataaacattccatttgatgaattaaagaattatttgtctgaagcaacaattggtctgcataccatgtggaacgrgcattttgggattggagttgtggagtgtatggcagctggcacaattatccttgcacacaattcggggggcccaaagcttgacattgtggttcctcacgaaggagatataactggctttctggctgagagtgaagaagactatgctgaaactatcgctcacattctttccatgtctgcagaaaagagactccaaatcagaaaaagtgctcgtgcatctgtaagcagattctctgatcaggaatttgaagtgacattcctatcatctgtggaaaagttatttaagtaatgccatatctgtaaaattaaagatattttatataaactggttaaacaccttcatatgtaaatatttttctaaattcaatctcatttgtcaaatcattttactttagaaaacagacaaaatttccttttagaataaaaggaagtgttgaaaagaaaatggatgactagccttcggcttccattcttggtatacmtgaragaggctggctgctgagatgaatgtgaaccaggttgcagagaatctggctttgagccaccaggaagaactagtggatttgccaaaaaactaccccttgagtgaaaatgaagatgagggggacagtgatggagagagaaagcatcaaaagcttctggaagcaatcatttcccttgatggaaagaataggcggaaattggctgagaggtctgaggctagtctgaaagtgtcagagttcagtgtcagttctgaaggatcaggagaaaagctggkccttgcagatctgcttgagcccgttaaaacttcatcttctttggccrctgtaaaaaagcaactgaatagagtcaaatcaaagaaggtggtggagttacctcttaacaaagaaaaaattgaacagatccacagagaagtagcattcagtaaaacctcacaggtcctctccaaatgggaccctatcatcctgaagaaccagcaggcagagcagctggtttttcccctggggaaggagcagccagccattgctcccattgaacatgcgctcagtggctggaaggcaagaactcccctggagcaggaaatttttaacctcctccataagaacaagcagccagtgacagatcctttactgactcccatggaaaaggcctctctccragccatgagcctrgaagaggcaaagatgcaccgagcagagcttcagagggctcgggctctgcagtcctactatgaggccaaggctcgaaragagaagaaaatcaaaagtaaaaagtatcacaaagtcgtgaagaaaggaaaggccaagaaagccytaaaagagtttgagcagctacagaaggttaatccarctgtggcaytrgaagaamtggaaaaaattgaaaatgccagaatgatggaaagaatgagccttaagcaccaaaacagtgggaaatgggccaagtcaaaggcaattatggccaaatatgacctggaggctcrccaagctatgcaggaacagttggccaagaacaaagaactgacacagaaactccaggtagcctctgagagtgaggaagaggagggaggcacagaagtggaagaactccttgtccctcatgtagcgaatgaagtgcagatgaatgtggacggaccgaatccctggatgttcaggagctgcaccagtgacaccaaagaggctgcaacacaggaggaccctgagcaagtgccagagcttgcagctcatgaggtttctgcaagtgaggcagaagaaagaccagtggcagaggaagaaattttgttgagagaatttgaggaaaggcaatcccttagaaaaagatctgagctcaaccaggatgctgagccagcaagcagtcaagaaacaaaagattctagcagccaggaggtgctgtccgaattgagggcactatctcagaaattgaaggaaaaacatcagtccaggaagcaaaaagcaagttcagaggggactgttccccaggtccagagagaggaacctgccccagaagaagcggaacccctattgctacagaggtcagagagagtacaaactctggaagagctagaagagctgggaaaagaagattgttttcaaaataaggagcttcccagacctgtgttagaaggacagcagtcagagaggaccccaaataatcggcctgatgcccctaaggagaagaaagagaaggagcaactgatcaacctacagaacttcctgaccacacagtctccttccgtgaggtctttggcagttcccacaataatagaggagctggaagatgaagaggagagagaccaaaggcagatgataaaggaagcttttgctggggatgatgtcatcagagatttcttgaaagagaagagggaagctgtggaggcgagtaagccaaaggacgtggacctgacactacctggctggggcgagtggggtggtgtgggcctaaagcccagtgccaagaaaagacgccagtttctcattaaagcccctgagggtcctccaagaaaagataagaatttgccaaatgtgattatcagtgagaagcgcaacatccacgcagcagctcatcaggtacaagtgcttccatatccatttacccaccatcggcaatttgaaaggaccatccagacccctataggatccacatggaacacccagagggctttccaaaagctgactactcccaaggtcgtcaccaagccaggccatatcattaagcccataaaagcagaggatgtgggctaccagtcttcctcaaggtcagacctgcctgtcatacagaggaatccaaaacgaatcaccacacgtcacaataaagaagaaaaactgtaggttgtgtagctggagaagtgacagtcaggggccctgattccacttcctttggtccagttttactctgctacagggtggattccaaaactggctcagyacattgcatgtagttragccacattttttaaaaaaagaaaatggatgaccattaattgactagcattttagaattgatcagacattagaacacagaaaaattctagtacatttaaattctaaacaatacagtggatgacccttttgaatatacctaatgatttccttaaaaaagaaattttaaacagacttgtttaatcgtgttctcaaagcatacagtcaagaggtgggactgactgatgctttataggtgtgtgtagggtggtagaggccaaggtgctgccagcaatcctttccatactaggtactggtgaaaattgtttttgtttatgctgtcrgcacatttgtgtgggtctctcattgtcccttaacagtgccgcatctcagcctggaagtcagctttaagtcattcaagagaacctcaggctgtttttctgacagtgatgatatgatatacagatacatccacagggtatctattaccagcataatgcattgtaagatggcaaggtggcattttgaaagagcgctgggcaagcagttagcacatctgggcctaccttcagcttcttcatttacaaacttctgaccttttgacactaaagctgctcctttatctttctgagtctcagattcttcatctgtaatctggagttgttaattccagtccttactaccttttagagttggaatgagatggaaagtagatgaaactactttgaaaattacgacagttaagggctgggtgcggtgtctcacacctgtaatcccagcactttgggaggccgagatgggtggatcatgaggtcagcagttgagaccagcctgaacaacatggtgaaaccctgtctgtactaaaaatacaaaaaaattagctgggcctggtggcaggcacctgtaatcccagctacttgggagactgaggcaggagaattgcttgaaactggaaggcagaggttgcagtgagccaagattgtgccactgcactctagcctgggcaataagcaaaactccatctcaaaaaagaaaaaaaggaaaaagaaaattatgagamttacttaaaggtaacatcacatactaaatgtcttctataatcctatatttattaatgcattacaactctgtagattgttagttactaggccagtagctaggaattggtataaatttaatgcaccttctatcctgaataactagcatggaaaagtgaatatatgtgtgagcagatatggctataaagacctatagcttttgcactttatgcatatataatcaatcctttctagttcagtgaattgaccccatccacaggctgattcatctttgtgttaaggggcaaatgaaacggtatattatttctttgcagtctcctctcagtcattcatcaatgtggccagcttatctactcccaattatgttgttgatacatctccaagccatctgtcatcagatcaaaaagcagcaaacagagggtcagtcacaggatgttctgacacaccattgtaactttttgttagagatgatcccatttagaaaaagactggtagaaattggagtgaaaggaaccctacagattagcccagttctctcttattttcagctttacagacaagaacaatttaaatctaaagaatttagtagattccttcagtgtcacaaagctgtttcatgaaagaatcaagattataacctggatattctgactcctggcccagtgctttttcttactttgtagctacactttgaagtaagattcaaactgttatccactcaattgccttattcctgaggatgtagtgaaggaagaaaaagttttctggaattccgtaaaytatattttaagcttatttcttcaaaattattttcatatatcacagatatatcattggaagatataatttgcatatatgttcattatcagtgttcctaatttggtattacatgtattctatttttttctgaatgatagcatgaaaagtgtcaaagtggtttgtccgctagcgtctgtctgcagaactttcaggatgactattaattcctctcagatgtcatttttgagtggtccaagcctgctgttttgaacccacagcagtggagatttgtattcttatttacagttgtgtactataaagtgtgtgttacataggttttgtgtaataattatttgtaaatattatttagatttgtatttagacatgatttatatctaatatagatacaaagtctgtgtctaaatattatttaaaraagtgatttttcattytcttggattctttccagtgtggtgccttttatatgcctcacatagtctccttgttctcctactaatattcccaagctccatatgccaattaaagaagaaacaaaaataaaagtttgtcttgcttgtgaaacattaagaagaggctgtcaggtttaataaactttttaatgaatatttcagacataacaaaaaactgcagagcttcgtacacttgatttaaataattcttgarggattttataaggtcatcttatagacaaaattawgagamaccagtgtggttatcaatgctttcagaatacttgtgtttatgtaaatataccccagagtccaaaactctgatatattcatatatattcacaatgagaggatgtctgtgccaaatctgtcaatcagtacaatagaaaagttaattatataactacaacacgaaacacaaatttttagaagcaaattatgtcctgtaatttacccccctccccgctgctcctctgctaactcattttcctcttttcccactctaaatgtaaggcaacccttggctttggagaagcatctgttccaatattctggtgctatgtgctcagttgtactatatgcaaatgttactagacacagaggaggtcaaagtgttgatacacttattgctaccatttacagaatgatcaatttgatagctatcatacatggctagcaagacactgatttttctaataaaaaaatttttaatgcatacaggtctggtgaacagtttcaatttaacggatgaggccaaggctaaagccagagtaaagtaatcagagccatgcctcaggaacacgatttagctaatagtgtgtgtaaaatgggtaaggtctagaattagggactaa

SEQ ID NO: 1886 - DNA, 6081 bp, Homo sapiens
gttcgggggtcggcggaagatggcggccggcgaaaggagctggtgcctgtgcaagttgttgaggagttgtggagtgtatggcagctggcacaattatccttgcacacaattcggggggcccaaagcttgacattgtggttcctcacgaaggagatataactggctttctggctgagagtgaagaagactatgctgaaactatcgctcacattctttccatgtctgcagaaaagagactccaaatcagaaaaagtgctcgtgcatctgtaagcagattctctgatcaggaatttgaagtgacattcctatcatctgtggaaaagttatttaagtaatgccatatctgtaaaattaaagatattttatataaactggttaaacaccttcatatgtaaatatttttctaaattcaatctcatttgtcaaatcattttactttagaaaacagacaaaatttccttttagaataaaaggaagtgttgaaaagaaaatggatgactagccttcggcttccattcttggtatacmtgaragaggctggctgctgagatgaatgtgaaccaggttgcagagaatctggctttgagccaccaggaagaactagtggatttgccaaaaaactaccccttgagtgaaaatgaagatgagggggacagtgatggagagagaaagcatcaaaagcttctggaagcaatcatttcccttgatggaaagaataggcggaaattggctgagaggtctgaggctagtctgaaagtgtcagagttcagtgtcagttctgaaggatcaggagaaaagctggkccttgcagatctgcttgagcccgttaaaacttcatcttctttggccrctgtaaaaaagcaactgaatagagtcaaatcaaagaaggtggtggagttacctcttaacaaagaaaaaattgaacagatccacagagaagtagcattcagtaaaacctcacaggtcctctccaaatgggaccctatcatcctgaagaaccagcaggcagagcagctggtttttcccctggggaaggagcagccagccattgctcccattgaacatgcgctcagtggctggaaggcaagaactcccctggagcaggaaatttttaacctcctccataagaacaagcagccagtgacagatcctttactgactcccatggaaaaggcctctctccragccatgagcctrgaagaggcaaagatgcaccgagcagagcttcagagggctcgggctctgcagtcctactatgaggccaaggctcgaaragagaagaaaatcaaaagtaaaaagtatcacaaagtcgtgaagaaaggaaaggccaagaaagccytaaaagagtttgagcagctacagaaggttaatccarctgtggcaytrgaagaamtggaaaaaattgaaaatgccagaatgatggaaagaatgagccttaagcaccaaaacagtgggaaatgggccaagtcaaaggcaattatggccaaatatgacctggaggctcrccaagctatgcaggaacagttggccaagaacaaagaactgacacagaaactccaggtagcctctgagagtgaggaagaggagggaggcacagaagtggaagaactccttgtccctcatgtagcgaatgaagtgcagatgaatgtggacggaccgaatccctggatgttcaggagctgcaccagtgacaccaaagaggctgcaacacaggaggaccctgagcaagtgccagagcttgcagctcatgaggtttctgcaagtgaggcagaagaaagaccagtggcagaggaagaaattttgttgagagaatttgaggaaaggcaatcccttagaaaaagatctgagctcaaccaggatgctgagccagcaagcagtcaagaaacaaaagattctagcagccaggaggtgctgtccgaattgagggcactatctcagaaattgaaggaaaaacatcagtccaggaagcaaaaagcaagttcagaggggactgttccccaggtccagagagaggaacctgccccagaagaagcggaacccctattgctacagaggtcagagagagtacaaactctggaagagctagaagagctgggaaaagaagattgttttcaaaataaggagcttcccagacctgtgttagaaggacagcagtcagagaggaccccaaataatcggcctgatgcccctaaggagaagaaagagaaggagcaactgatcaacctacagaacttcctgaccacacagtctccttccgtgaggtctttggcagttcccacaataatagaggagctggaagatgaagaggagagagaccaaaggcagatgataaaggaagcttttgctggggatgatgtcatcagagatttcttgaaagagaagagggaagctgtggaggcgagtaagccaaaggacgtggacctgacactacctggctggggcgagtggggtggtgtgggcctaaagcccagtgccaagaaaagacgccagtttctcattaaagcccctgagggtcctccaagaaaagataagaatttgccaaatgtgattatcagtgagaagcgcaacatccacgcagcagctcatcaggtacaagtgcttccatatccatttacccaccatcggcaatttgaaaggaccatccagacccctataggatccacatggaacacccagagggctttccaaaagctgactactcccaaggtcgtcaccaagccaggccatatcattaagcccataaaagcagaggatgtgggctaccagtcttcctcaaggtcagacctgcctgtcatacagaggaatccaaaacgaatcaccacacgtcacaataaagaagaaaaactgtaggttgtgtagctggagaagtgacagtcaggggccctgattccacttcctttggtccagttttactctgctacagggtggattccaaaactggctcagyacattgcatgtagttragccacattttttaaaaaaagaaaatggatgaccattaattgactagcattttagaattgatcagacattagaacacagaaaaattctagtacatttaaattctaaacaatacagtggatgacccttttgaatatacctaatgatttccttaaaaaagaaattttaaacagacttgtttaatcgtgttctcaaagcatacagtcaagaggtgggactgactgatgctttataggtgtgtgtagggtggtagaggccaaggtgctgccagcaatcctttccatactaggtactggtgaaaattgtttttgtttatgctgtcrgcacatttgtgtgggtctctcattgtcccttaacagtgccgcatctcagcctggaagtcagctttaagtcattcaagagaacctcaggctgtttttctgacagtgatgatatgatatacagatacatccacagggtatctattaccagcataatgcattgtaagatggcaaggtggcattttgaaagagcgctgggcaagcagttagcacatctgggcctaccttcagcttcttcatttacaaacttctgaccttttgacactaaagctgctcctttatctttctgagtctcagattcttcatctgtaatctggagttgttaattccagtccttactaccttttagagttggaatgagatggaaagtagatgaaactactttgaaaattacgacagttaagggctgggtgcggtgtctcacacctgtaatcccagcactttgggaggccgagatgggtggatcatgaggtcagcagttgagaccagcctgaacaacatggtgaaaccctgtctgtactaaaaatacaaaaaaattagctgggcctggtggcaggcacctgtaatcccagctacttgggagactgaggcaggagaattgcttgaaactggaaggcagaggttgcagtgagccaagattgtgccactgcactctagcctgggcaataagcaaaactccatctcaaaaaagaaaaaaaggaaaaagaaaattatgagamttacttaaaggtaacatcacatactaaatgtcttctataatcctatatttattaatgcattacaactctgtagattgttagttactaggccagtagctaggaattggtataaatttaatgcaccttctatcctgaataactagcatggaaaagtgaatatatgtgtgagcagatatggctataaagacctatagcttttgcactttatgcatatataatcaatcctttctagttcagtgaattgaccccatccacaggctgattcatctttgtgttaaggggcaaatgaaacggtatattatttctttgcagtctcctctcagtcattcatcaatgtggccagcttatctactcccaattatgttgttgatacatctccaagccatctgtcatcagatcaaaaagcagcaaacagagggtcagtcacaggatgttctgacacaccattgtaactttttgttagagatgatcccatttagaaaaagactggtagaaattggagtgaaaggaaccctacagattagcccagttctctcttattttcagctttacagacaagaacaatttaaatctaaagaatttagtagattccttcagtgtcacaaagctgtttcatgaaagaatcaagattataacctggatattctgactcctggcccagtgctttttcttactttgtagctacactttgaagtaagattcaaactgttatccactcaattgccttattcctgaggatgtagtgaaggaagaaaaagttttctggaattccgtaaaytatattttaagcttatttcttcaaaattattttcatatatcacagatatatcattggaagatataatttgcatatatgttcattatcagtgttcctaatttggtattacatgtattctatttttttctgaatgatagcatgaaaagtgtcaaagtggtttgtccgctagcgtctgtctgcagaactttcaggatgactattaattcctctcagatgtcatttttgagtggtccaagcctgctgttttgaacccacagcagtggagatttgtattcttatttacagttgtgtactataaagtgtgtgttacataggttttgtgtaataattatttgtaaatattatttagatttgtatttagacatgatttatatctaatatagatacaaagtctgtgtctaaatattatttaaaraagtgatttttcattytcttggattctttccagtgtggtgccttttatatgcctcacatagtctccttgttctcctactaatattcccaagctccatatgccaattaaagaagaaacaaaaataaaagtttgtcttgcttgtgaaacattaagaagaggctgtcaggtttaataaactttttaatgaatatttcagacataacaaaaaactgcagagcttcgtacacttgatttaaataattcttgarggattttataaggtcatcttatagacaaaattawgagamaccagtgtggttatcaatgctttcagaatacttgtgtttatgtaaatataccccagagtccaaaactctgatatattcatatatattcacaatgagaggatgtctgtgccaaatctgtcaatcagtacaatagaaaagttaattatataactacaacacgaaacacaaatttttagaagcaaattatgtcctgtaatttacccccctccccgctgctcctctgctaactcattttcctcttttcccactctaaatgtaaggcaacccttggctttggagaagcatctgttccaatattctggtgctatgtgctcagttgtactatatgcaaatgttactagacacagaggaggtcaaagtgttgatacacttattgctaccatttacagaatgatcaatttgatagctatcatacatggctagcaagacactgatttttctaataaaaaaatttttaatgcatacaggtctggtgaacagtttcaatttaacggatgaggccaaggctaaagccagagtaaagtaatcagagccatgcctcaggaacacgatttagctaatagtgtgtgtaaaatgggtaaggtctagaattagggactaa

SEQ ID NO: 1887 - DNA, 7244 bp, Homo sapiens
gttcgggggtcggcggaagatggcggccggcgaaaggagctggtgcctgtgcaagttgttgaggtttttttattcattattcttccctgggctcattgtatgtggaactttatgtgtgtgtttggtcattgtcctttggggaatcagactgctgctacagagaaagaaaaaattagtgtcaactagcaaaaatgggaaaaatcaaatggtgattgcattttttcatccatactgcaatgctggtggaggaggagaaagagttttatggtgtgctttaagagccctgcagaaaaagtatcctgaagcagtttatgttgtttataccggcgatgttaatgtcarcggtcaacagatactagaaggtgctttcagaagatttaacatcagattaattcacccagtgcagtttgtttttttaaggaaacgctatcttgtggaagattcactgtatcctcacttcacactgctgggccaaagtctaggatccatttttcttggctgggaagctctaatgcagtgtgttcctgatgtttacattgattcaatgggatacgcttttacgcttcctctgtttaagtatatagggggttgccaagttggaagctatgttcattatcctactatcagcaccgacatgctctctgtagtgaagaatcaaaatattggatttaataatgcagccttcattaccaggaatccttttctcagcaaagtaaagctcatctactactatttatttgcttttatttatggacttgttggttcttgcagtgatgtagtcatggtcaattcttcttggacactaaaccatattctctcactatggaaagttgggaattgcactaacattgtttatccaccttgtgatgtgcagacatttctggacattcccttacatgagaaaaagatgaccccaggacatttgctggtttctgttggccagtttaggccrgaaaagaatcatccattgcagatcagagcctttgctaaattgctgaataagaagatggttgagtcacctccttcgcttaaacttgtcctcattggaggktgtcgtaacaaagatgatgaacttagggtaaaccaactgagaaggctgtctgaggatttaggagttcaagaatatgtggaatttaaaataaacattccatttgatgaattaaagaattatttgtctgaagcaacaattggtctgcataccatgtggaacgrgcattttgggattggagttgtggagtgtatggcagctggcacaattatccttgcacacaattcggggggcccaaagcttgacattgtggttcctcacgaaggagatataactggctttctggctgagagtgaagaagactatgctgaaactatcgctcacattctttccatgtctgcagaaaagagactccaaatcagaaaaagtgctcgtgcatctgtaagcagattctctgatcaggaatttgaagtgacattcctatcatctgtggaaaagttatttaagtaatgccatatctgtaaaattaaagatattttatataaactggttaaacaccttcatatgtaaatatttttctaaattcaatctcatttgtcaaatcattttactttagaaaacagacaaaatttccttttagaataaaaggaagtgttgaaaagaaaatggatgactagccttcggcttccattcttggtatacmtgaragaggctggctgctgagatgaatgtgaaccaggttgcagagaatctggctttgagccaccaggaagaactagtggatttgccaaaaaactaccccttgagtgaaaatgaagatgagggggacagtgatggagagagaaagcatcaaaagcttctggaagcaatcatttcccttgatggaaagaataggcggaaattggctgagaggtctgaggctagtctgaaagtgtcagagttcagtgtcagttctgaaggatcaggagaaaagctggkccttgcagatctgcttgagcccgttaaaacttcatcttctttggccrctgtaaaaaagcaactgaatagagtcaaatcaaagaaggtggtggagttacctcttaacaaagaaaaaattgaacagatccacagagaagtagcattcagtaaaacctcacaggtcctctccaaatgggaccctatcatcctgaagaaccagcaggcagagcagctggtttttcccctggggaaggagcagccagccattgctcccattgaacatgcgctcagtggctggaaggcaagaactcccctggagcaggaaatttttaacctcctccataagaacaagcagccagtgacagatcctttactgactcccatggaaaaggcctctctccragccatgagcctrgaagaggcaaagatgcaccgagcagagcttcagagggctcgggctctgcagtcctactatgaggccaaggctcgaaragagaagaaaatcaaaagtaaaaagtatcacaaagtcgtgaagaaaggaaaggccaagaaagccytaaaagagtttgagcagctacagaaggttaatccarctgtggcaytrgaagaamtggaaaaaattgaaaatgccagaatgatggaaagaatgagccttaagcaccaaaacagtgggaaatgggccaagtcaaaggcaattatggccaaatatgacctggaggctcrccaagctatgcaggaacagttggccaagaacaaagaactgacacagaaactccaggtagcctctgagagtgaggaagaggagggaggcacagaagtggaagaactccttgtccctcatgtagcgaatgaagtgcagatgaatgtggacggaccgaatccctggatgttcaggagctgcaccagtgacaccaaagaggctgcaacacaggaggaccctgagcaagtgccagagcttgcagctcatgaggtttctgcaagtgaggcagaagaaagaccagtggcagaggaagaaattttgttgagagaatttgaggaaaggcaatcccttagaaaaagatctgagctcaaccaggatgctgagccagcaagcagtcaagaaacaaaagattctagcagccaggaggtgctgtccgaattgagggcactatctcagaaattgaaggaaaaacatcagtccaggaagcaaaaagcaagttcagaggggactgttccccaggtccagagagaggaacctgccccagaagaagcggaacccctattgctacagaggtcagagagagtacaaactctggaagagctagaagagctgggaaaagaagattgttttcaaaataaggagcttcccagacctgtgttagaaggacagcagtcagagaggaccccaaataatcggcctgatgcccctaaggagaagaaagagaaggagcaactgatcaacctacagaacttcctgaccacacagtctccttccgtgaggtctttggcagttcccacaataatagaggagctggaagatgaagaggagagagaccaaaggcagatgataaaggaagcttttgctggggatgatgtcatcagagatttcttgaaagagaagagggaagctgtggaggcgagtaagccaaaggacgtggacctgacactacctggctggggcgagtggggtggtgtgggcctaaagcccagtgccaagaaaagacgccagtttctcattaaagcccctgagggtcctccaagaaaagataagaatttgccaaatgtgattatcagtgagaagcgcaacatccacgcagcagctcatcaggtacaagtgcttccatatccatttacccaccatcggcaatttgaaaggaccatccagacccctataggatccacatggaacacccagagggctttccaaaagctgactactcccaaggtcgtcaccaagccaggccatatcattaagcccataaaagcagaggatgtgggctaccagtcttcctcaaggtcagacctgcctgtcatacagaggaatccaaaacgaatcaccacacgtcacaataaagaagaaaaactgtaggttgtgtagctggagaagtgacagtcaggggccctgattccacttcctttggtccagttttactctgctacagggtggattccaaaactggctcagyacattgcatgtagttragccacattttttaaaaaaagaaaatggatgaccattaattgactagcattttagaattgatcagacattagaacacagaaaaattctagtacatttaaattctaaacaatacagtggatgacccttttgaatatacctaatgatttccttaaaaaagaaattttaaacagacttgtttaatcgtgttctcaaagcatacagtcaagaggtgggactgactgatgctttataggtgtgtgtagggtggtagaggccaaggtgctgccagcaatcctttccatactaggtactggtgaaaattgtttttgtttatgctgtcrgcacatttgtgtgggtctctcattgtcccttaacagtgccgcatctcagcctggaagtcagctttaagtcattcaagagaacctcaggctgtttttctgacagtgatgatatgatatacagatacatccacagggtatctattaccagcataatgcattgtaagatggcaaggtggcattttgaaagagcgctgggcaagcagttagcacatctgggcctaccttcagcttcttcatttacaaacttctgaccttttgacactaaagctgctcctttatctttctgagtctcagattcttcatctgtaatctggagttgttaattccagtccttactaccttttagagttggaatgagatggaaagtagatgaaactactttgaaaattacgacagttaagggctgggtgcggtgtctcacacctgtaatcccagcactttgggaggccgagatgggtggatcatgaggtcagcagttgagaccagcctgaacaacatggtgaaaccctgtctgtactaaaaatacaaaaaaattagctgggcctggtggcaggcacctgtaatcccagctacttgggagactgaggcaggagaattgcttgaaactggaaggcagaggttgcagtgagccaagattgtgccactgcactctagcctgggcaataagcaaaactccatctcaaaaaagaaaaaaaggaaaaagaaaattatgagamttacttaaaggtaacatcacatactaaatgtcttctataatcctatatttattaatgcattacaactctgtagattgttagttactaggccagtagctaggaattggtataaatttaatgcaccttctatcctgaataactagcatggaaaagtgaatatatgtgtgagcagatatggctataaagacctatagcttttgcactttatgcatatataatcaatcctttctagttcagtgaattgaccccatccacaggctgattcatctttgtgttaaggggcaaatgaaacggtatattatttctttgcagtctcctctcagtcattcatcaatgtggccagcttatctactcccaattatgttgttgatacatctccaagccatctgtcatcagatcaaaaagcagcaaacagagggtcagtcacaggatgttctgacacaccattgtaactttttgttagagatgatcccatttagaaaaagactggtagaaattggagtgaaaggaaccctacagattagcccagttctctcttattttcagctttacagacaagaacaatttaaatctaaagaatttagtagattccttcagtgtcacaaagctgtttcatgaaagaatcaagattataacctggatattctgactcctggcccagtgctttttcttactttgtagctacactttgaagtaagattcaaactgttatccactcaattgccttattcctgaggatgtagtgaaggaagaaaaagttttctggaattccgtaaaytatattttaagcttatttcttcaaaattattttcatatatcacagatatatcattggaagatataatttgcatatatgttcattatcagtgttcctaatttggtattacatgtattctatttttttctgaatgatagcatgaaaagtgtcaaagtggtttgtccgctagcgtctgtctgcagaactttcaggatgactattaattcctctcagatgtcatttttgagtggtccaagcctgctgttttgaacccacagcagtggagatttgtattcttatttacagttgtgtactataaagtgtgtgttacataggttttgtgtaataattatttgtaaatattatttagatttgtatttagacatgatttatatctaatatagatacaaagtctgtgtctaaatattatttaaaraagtgatttttcattytcttggattctttccagtgtggtgccttttatatgcctcacatagtctccttgttctcctactaatattcccaagctccatatgccaattaaagaagaaacaaaaataaaagtttgtcttgcttgtgaaacattaagaagaggctgtcaggtttaataaactttttaatgaatatttcagacataacaaaaaactgcagagcttcgtacacttgatttaaataattcttgarggattttataaggtcatcttatagacaaaattawgagamaccagtgtggttatcaatgctttcagaatacttgtgtttatgtaaatataccccagagtccaaaactctgatatattcatatatattcacaatgagaggatgtctgtgccaaatctgtcaatcagtacaatagaaaagttaattatataactacaacacgaaacacaaatttttagaagcaaattatgtcctgtaatttacccccctccccgctgctcctctgctaactcattttcctcttttcccactctaaatgtaaggcaacccttggctttggagaagcatctgttccaatattctggtgctatgtgctcagttgtactatatgcaaatgttactagacacagaggaggtcaaagtgttgatacacttattgctaccatttacagaatgatcaatttgatagctatcatacatggctagcaagacactgatttttctaataaaaaaatttttaatgcatacaggtctggtgaacagtttcaatttaacggatgaggccaaggctaaagccagagtaaagtaatcagagccatgcctcaggaacacgatttagctaatagtgtgtgtaaaatgggtaaggtctagaattagggactaa

SEQ ID NO: 1888 - DNA, 6089 bp, Homo sapiens
aagtagaagcaaaagtcagactatgagcaaaaatcaaaagtcaagcactcagaagtgaacaagtagagttggagttgtggagtgtatggcagctggcacaattatccttgcacacaattcggggggcccaaagcttgacattgtggttcctcacgaaggagatataactggctttctggctgagagtgaagaagactatgctgaaactatcgctcacattctttccatgtctgcagaaaagagactccaaatcagaaaaagtgctcgtgcatctgtaagcagattctctgatcaggaatttgaagtgacattcctatcatctgtggaaaagttatttaagtaatgccatatctgtaaaattaaagatattttatataaactggttaaacaccttcatatgtaaatatttttctaaattcaatctcatttgtcaaatcattttactttagaaaacagacaaaatttccttttagaataaaaggaagtgttgaaaagaaaatggatgactagccttcggcttccattcttggtatacmtgaragaggctggctgctgagatgaatgtgaaccaggttgcagagaatctggctttgagccaccaggaagaactagtggatttgccaaaaaactaccccttgagtgaaaatgaagatgagggggacagtgatggagagagaaagcatcaaaagcttctggaagcaatcatttcccttgatggaaagaataggcggaaattggctgagaggtctgaggctagtctgaaagtgtcagagttcagtgtcagttctgaaggatcaggagaaaagctggkccttgcagatctgcttgagcccgttaaaacttcatcttctttggccrctgtaaaaaagcaactgaatagagtcaaatcaaagaaggtggtggagttacctcttaacaaagaaaaaattgaacagatccacagagaagtagcattcagtaaaacctcacaggtcctctccaaatgggaccctatcatcctgaagaaccagcaggcagagcagctggtttttcccctggggaaggagcagccagccattgctcccattgaacatgcgctcagtggctggaaggcaagaactcccctggagcaggaaatttttaacctcctccataagaacaagcagccagtgacagatcctttactgactcccatggaaaaggcctctctccragccatgagcctrgaagaggcaaagatgcaccgagcagagcttcagagggctcgggctctgcagtcctactatgaggccaaggctcgaaragagaagaaaatcaaaagtaaaaagtatcacaaagtcgtgaagaaaggaaaggccaagaaagccytaaaagagtttgagcagctacagaaggttaatccarctgtggcaytrgaagaamtggaaaaaattgaaaatgccagaatgatggaaagaatgagccttaagcaccaaaacagtgggaaatgggccaagtcaaaggcaattatggccaaatatgacctggaggctcrccaagctatgcaggaacagttggccaagaacaaagaactgacacagaaactccaggtagcctctgagagtgaggaagaggagggaggcacagaagtggaagaactccttgtccctcatgtagcgaatgaagtgcagatgaatgtggacggaccgaatccctggatgttcaggagctgcaccagtgacaccaaagaggctgcaacacaggaggaccctgagcaagtgccagagcttgcagctcatgaggtttctgcaagtgaggcagaagaaagaccagtggcagaggaagaaattttgttgagagaatttgaggaaaggcaatcccttagaaaaagatctgagctcaaccaggatgctgagccagcaagcagtcaagaaacaaaagattctagcagccaggaggtgctgtccgaattgagggcactatctcagaaattgaaggaaaaacatcagtccaggaagcaaaaagcaagttcagaggggactgttccccaggtccagagagaggaacctgccccagaagaagcggaacccctattgctacagaggtcagagagagtacaaactctggaagagctagaagagctgggaaaagaagattgttttcaaaataaggagcttcccagacctgtgttagaaggacagcagtcagagaggaccccaaataatcggcctgatgcccctaaggagaagaaagagaaggagcaactgatcaacctacagaacttcctgaccacacagtctccttccgtgaggtctttggcagttcccacaataatagaggagctggaagatgaagaggagagagaccaaaggcagatgataaaggaagcttttgctggggatgatgtcatcagagatttcttgaaagagaagagggaagctgtggaggcgagtaagccaaaggacgtggacctgacactacctggctggggcgagtggggtggtgtgggcctaaagcccagtgccaagaaaagacgccagtttctcattaaagcccctgagggtcctccaagaaaagataagaatttgccaaatgtgattatcagtgagaagcgcaacatccacgcagcagctcatcaggtacaagtgcttccatatccatttacccaccatcggcaatttgaaaggaccatccagacccctataggatccacatggaacacccagagggctttccaaaagctgactactcccaaggtcgtcaccaagccaggccatatcattaagcccataaaagcagaggatgtgggctaccagtcttcctcaaggtcagacctgcctgtcatacagaggaatccaaaacgaatcaccacacgtcacaataaagaagaaaaactgtaggttgtgtagctggagaagtgacagtcaggggccctgattccacttcctttggtccagttttactctgctacagggtggattccaaaactggctcagyacattgcatgtagttragccacattttttaaaaaaagaaaatggatgaccattaattgactagcattttagaattgatcagacattagaacacagaaaaattctagtacatttaaattctaaacaatacagtggatgacccttttgaatatacctaatgatttccttaaaaaagaaattttaaacagacttgtttaatcgtgttctcaaagcatacagtcaagaggtgggactgactgatgctttataggtgtgtgtagggtggtagaggccaaggtgctgccagcaatcctttccatactaggtactggtgaaaattgtttttgtttatgctgtcrgcacatttgtgtgggtctctcattgtcccttaacagtgccgcatctcagcctggaagtcagctttaagtcattcaagagaacctcaggctgtttttctgacagtgatgatatgatatacagatacatccacagggtatctattaccagcataatgcattgtaagatggcaaggtggcattttgaaagagcgctgggcaagcagttagcacatctgggcctaccttcagcttcttcatttacaaacttctgaccttttgacactaaagctgctcctttatctttctgagtctcagattcttcatctgtaatctggagttgttaattccagtccttactaccttttagagttggaatgagatggaaagtagatgaaactactttgaaaattacgacagttaagggctgggtgcggtgtctcacacctgtaatcccagcactttgggaggccgagatgggtggatcatgaggtcagcagttgagaccagcctgaacaacatggtgaaaccctgtctgtactaaaaatacaaaaaaattagctgggcctggtggcaggcacctgtaatcccagctacttgggagactgaggcaggagaattgcttgaaactggaaggcagaggttgcagtgagccaagattgtgccactgcactctagcctgggcaataagcaaaactccatctcaaaaaagaaaaaaaggaaaaagaaaattatgagamttacttaaaggtaacatcacatactaaatgtcttctataatcctatatttattaatgcattacaactctgtagattgttagttactaggccagtagctaggaattggtataaatttaatgcaccttctatcctgaataactagcatggaaaagtgaatatatgtgtgagcagatatggctataaagacctatagcttttgcactttatgcatatataatcaatcctttctagttcagtgaattgaccccatccacaggctgattcatctttgtgttaaggggcaaatgaaacggtatattatttctttgcagtctcctctcagtcattcatcaatgtggccagcttatctactcccaattatgttgttgatacatctccaagccatctgtcatcagatcaaaaagcagcaaacagagggtcagtcacaggatgttctgacacaccattgtaactttttgttagagatgatcccatttagaaaaagactggtagaaattggagtgaaaggaaccctacagattagcccagttctctcttattttcagctttacagacaagaacaatttaaatctaaagaatttagtagattccttcagtgtcacaaagctgtttcatgaaagaatcaagattataacctggatattctgactcctggcccagtgctttttcttactttgtagctacactttgaagtaagattcaaactgttatccactcaattgccttattcctgaggatgtagtgaaggaagaaaaagttttctggaattccgtaaaytatattttaagcttatttcttcaaaattattttcatatatcacagatatatcattggaagatataatttgcatatatgttcattatcagtgttcctaatttggtattacatgtattctatttttttctgaatgatagcatgaaaagtgtcaaagtggtttgtccgctagcgtctgtctgcagaactttcaggatgactattaattcctctcagatgtcatttttgagtggtccaagcctgctgttttgaacccacagcagtggagatttgtattcttatttacagttgtgtactataaagtgtgtgttacataggttttgtgtaataattatttgtaaatattatttagatttgtatttagacatgatttatatctaatatagatacaaagtctgtgtctaaatattatttaaaraagtgatttttcattytcttggattctttccagtgtggtgccttttatatgcctcacatagtctccttgttctcctactaatattcccaagctccatatgccaattaaagaagaaacaaaaataaaagtttgtcttgcttgtgaaacattaagaagaggctgtcaggtttaataaactttttaatgaatatttcagacataacaaaaaactgcagagcttcgtacacttgatttaaataattcttgarggattttataaggtcatcttatagacaaaattawgagamaccagtgtggttatcaatgctttcagaatacttgtgtttatgtaaatataccccagagtccaaaactctgatatattcatatatattcacaatgagaggatgtctgtgccaaatctgtcaatcagtacaatagaaaagttaattatataactacaacacgaaacacaaatttttagaagcaaattatgtcctgtaatttacccccctccccgctgctcctctgctaactcattttcctcttttcccactctaaatgtaaggcaacccttggctttggagaagcatctgttccaatattctggtgctatgtgctcagttgtactatatgcaaatgttactagacacagaggaggtcaaagtgttgatacacttattgctaccatttacagaatgatcaatttgatagctatcatacatggctagcaagacactgatttttctaataaaaaaatttttaatgcatacaggtctggtgaacagtttcaatttaacggatgaggccaaggctaaagccagagtaaagtaatcagagccatgcctcaggaacacgatttagctaatagtgtgtgtaaaatgggtaaggtctagaattagggactaa

SEQ ID NO: 1889 - DNA, 5614 bp, Homo sapiens
gactcggcgccagtcccgctccgcgccgcgccgctccgctccggctcgggctccggctcgcctcgggctgggctcgggctccgggggcggcgtcccccgcgccgggccccgggacgggcggcgacgctccaaccatggcccgtgcccaggcgctcgtgctggcactcaccttccagctctgcgcgccggagaccgagactccggcagctggctgcaccttcgaggaggcaagtgacccagcagtgccctgcgagtacagccaggcccagtacgatgacttccagtgggagcaagtgcgaatccaccctggcamccgggcacctgcggacctgccccacggctcctacttgatggtcaacacttcccagcatgccccaggccagcgagcccatgtcatcttccagagcctgagcgagaatgatacccactgtgtgcagttcagctacttcctrtacagccgggacgggcacagcccgggcaccctgggcgtctacgtgcgcgttaatgggggccccctgggcagtgctgtgtggaatatgactggatcccacggccgtcagtggcaccaggctgagctggctgtcagcactttctggcccaatgaatatcaggtgctgtttgaggccctcatctccccagaccgcaggggctacatgggcctagatgacatcctgcttctcagctacccctgcgcaaaggccccacacttctcccgcctgggcgacgtggaggtcaacgcgggccagaacgcgtcgttccagtgcatggccgcgggcagagcggccgaggccgaacgcttcctcttgcaacggcagagcggggcgctggtgccggcggcgggcgtgcggcacatcagccaccggcgcttcctggccactttcccgctggctgccgtgagccgcgccgagcaggacctgtaccgctgtgtgtcccaggccccgcgcggcgcgggcgtctctaacttcgcggagctcatcgtcaaggagcccccaactcccatcgcgcccccacagctgctgcgtgctggccccacctacctcatcatccagctcaacaccaactccatcattggcgacgggccgatcgtgcgcaaggagattgagtaccgcatggcgcgcgggccctgggctgaggtgcacgccgtcagcctgcagacctacaagctgtggcacctcgaccccgacacagagtatgagatcagcgtgctgctcacgcgtcccggagacggcggcactggccgccctgggccacccctcatcagccgcaccaaatgcgcagagcccatgagggcccccaaaggcctggcttttgctgagatccaggcccgtcagctgaccctgcagtgggaaccactgggctacaacgtgacgcgttgccacacctatactgtgtcgctgtgctatcactacaccctgggcagcagccacaaccagaccatccgagagtgtgtgaagacagagcaaggtgtcagccgctacaccatcaagaacctgctgccctatcggaacgttcacgtgaggcttgtcctcactaaccctgaggggckcaaagagggcaaggaggtcactttccagacggatgaggatgtgcccagtgggattgcagcygagtccctgaccttcactccactggaggacatgatcttcctcaagtgggaggagccccaggagcccaatggtctcatcacccagtatgagatcagctaccagagcatcgagtcatcagacccggcagtgaacgtgccaggcccacgacgtaccatctccaagctccgcaatgagacctaccatgtcttctccaacctgcacccaggcaccacctacctgttctccgtgcgggcccgcacaggcaaaggcttcggccaggcggcactcactgagataaccactaacatctctgctcccagctttgattatgccgacatgccgtcacccctgggcgagtctgagaacaccatcaccgtgctgctgaggccggcacagggccgcggtgcgcccatcagtgtgtaccaggtgattgtggaggaggagcgggcgcggaggctgcggcgggagcsaggtggacaggactgcttcccagtgccattgaccttcgaggcggcgctggcccgaggcctggtgcactacttcggggccgaactggcggccagcagtctacctgaggccatgccctttaccgtgggtgacaaccagacctaccgaggcttctggaacccaccacttgagcctaggaaggcctatctcatctacttccaggcagcaagccacctgaagggggagacccggctgaattgcatccgcattgccaggaaagctgcctgcaaggaaagcaagcggcccctggaggtgtcccagagatcggaggagatggggcttatcctgggcatctgtgcaggggggcttgctgtcctcatccttctcctgggtgccatcattgtcatcatccgcaaagggagagaccactatgcctactcctactacccgaagccggtgaacatgaccaaggccaccgtcaactaccgccaggagaagacacacatgatgagcgccgtggaccgcagcttcacagaccagagcaccctgcaggaggacgagcggctgggcctgtccttcatggacacccatggctacagcacccggggagaccagcgcagcggtgggktcactgaggccagcagcctcctggggggctccccgaggcgtccctgtggccggaagggctccccataycacacggggcagctgcaccctgcggtgcgtgtcgcagaccttctgcagcacatcaaccagatgaagacggccgagggttacggcttcaagcaggagtaygagagcttctttgaaggctgggacgccacaaagaagaaagacaaggtcaagggcagccggcaggagccaatgcctgcctatgatcggcaccgagtgaaactgcacccgatgctgggagaccccartgccgactacattaatgccaactacatagatggttaccacaggtcaaaccacttcatagccactcaagggccgaagcctgagatggtctatgacttctggcgtatggtgtggcaggagcactgttccagcatcgtcatgatcaccaagctggtcgaggtgggcagggtgaaatgctcacggtactggccggaggactcagacacctacggggacatcaagattatgctggtgaagacagagamcctggctgagtatgtcgtgcgcacttttgccctggagcggagaggctactctgcccggcacgaggtccgccagttccacttcacagcgtggccagagcatggcgtcccctaccatgccacggggctgctggctttcatccggcgcgtgaaggcctccaccccacctgatgccgggcccattgtcatccactgcagcgcgggcaccggccgcacaggttgctatatcgtcctggatgtgatgctggacatggcagagtgtgagggygtcgtggacatttacaactgtgtgaagactctctgctcccggcgtgtcaacatgatccagactgaggagcagtacatcttcattcatgatgcaatcctggaggcctgcctgtgtggggagaccaccatccctgtcagtgagttcaaggccacctacaaggagatgatccgcattgatcctcagagtaattcctcccagctgcgggaagagttccagacgctgaactckgtcaccccgccgctggacgtggaggagtgcagcatcgccctgttgccccggaaccgygacaagaaccgcagcatggacgtcctgccgcccgaccgctgcctgcccttcctcatctccactgatggggactccaacaactacattaatgcagccctgactgacagctacacacggagtgcggccttcatcgtgaccctgcacccgctgcagagcaccacgcccgacttctggcggctggtctacgattacgggtgcacctccatcgtcatgctcaaccagctgaaccagtccaactccgcctggccctgcctgcagtactggccagagccaggccggcagcaatatggcctcatggaggtggagtttatgtcgggcacagctgatgaagacttagtggctcgagtcttccgggtgcagaacatctctcggttgcaggaggggcacctgctggtgcggcacttccagttcctgcgctggtctgcataccgggacacacctgactccaagaaggccttcttgcacctgctggctgaggtggacaagtggcaggccgagagtggggatgggcgcaccatcgtgcactgcctaaacgggggaggacgcagcggcaccttctgcgcctgcgccacggtcctggagatgatccgctgccacaacttggtggacgttttctttgctgccaaaaccctccggaactacaaacccaacatggtggagaccatggatcagtaccacttttgctacgatgtggccctggagtacttggaggggctggagtcaagatagcggggccctggcctggggcacccactgcacactcagggccagacccaccatcctggactggcgaggaagatcagtgcctcctgctctgcccaaacacactcccatggggcaagcactggagtggatgctgggctatcttgctcccccttccacygtgggcagggcctttcgcttgtcccatgggcgggtggtgggccaaggaggagcttagcaagtctgcagcccagccccacctccatagggtcctgcaggcctgtgctgagaggcctggtgctgcctggcagagtgacaaaggctcaggacggctggctctgggggactcaggccaagccccttggcaccatcctggcttttggcagggatgagtgaggccctgcagagagcatcccaggccaaggttcccactcagcctgccccctctgcatgtgggtagaggatgtactgggacttggcatttaggattccatctggcccagcccctgaaggtcctggggaagcaggwctcaattctgaatagccagtggggcacactgactgtcctccccaggggaactgcagcgccctcctccccactgccccctgcagcccctgagatattttgctcactatccctccccacttgcttccctgatatgtgctctgagcttccctgaaccaggatctgcctattactgctgtgccccatggggggctccttccctgcctgacccactgttgcagaatgaagtcacctcgcccccctcttcctttaatcttcaggcctcactggcctgtcctgctcagcttgggccagtgacaatctgcaaggctgaacaacagcccctggggttgaggcccctgtggctcctggtcaggctgcccgttgtggggaggggcagtgttagagcagggctggtcataccctctggagttcagaggaagaggtaggaccagtgcttttttgtttcttttgttatttttggttgggtgggtgggaaggtctctttaaaatggggcaggccacacccccattccgtgcctcaatttccccatctgtaaactgtagatatgactactgacctacctcgcagggggctgtggggaggcataagctgatgtttgtaaagcgctttgtaaataaacgtgctctctgaatgcca

SEQ ID NO: 1890 - DNA, 5584 bp, Homo sapiens
gactcggcgccagtcccgctccgcgccgcgccgctccgctccggctcgggctccggctcgcctcgggctgggctcgggctccgggggcggcgtcccccgcgccgggccccgggacgggcggcgacgctccaaccatggcccgtgcccaggcgctcgtgctggcactcaccttccagctctgcgcgccggagaccgagactccggcagctggctgcaccttcgaggaggcaagtgacccagcagtgccctgcgagtacagccaggcccagtacgatgacttccagtgggagcaagtgcgaatccaccctggcamccgggcacctgcggacctgccccacggctcctacttgatggtcaacacttcccagcatgccccaggccagcgagcccatgtcatcttccagagcctgagcgagaatgatacccactgtgtgcagttcagctacttcctrtacagccgggacgggcacagcccgggcaccctgggcgtctacgtgcgcgttaatgggggccccctgggcagtgctgtgtggaatatgactggatcccacggccgtcagtggcaccaggctgagctggctgtcagcactttctggcccaatgaatatcaggtgctgtttgaggccctcatctccccagaccgcaggggctacatgggcctagatgacatcctgcttctcagctacccctgcgcaaaggccccacacttctcccgcctgggcgacgtggaggtcaacgcgggccagaacgcgtcgttccagtgcatggccgcgggcagagcggccgaggccgaacgcttcctcttgcaacggcagagcggggcgctggtgccggcggcgggcgtgcggcacatcagccaccggcgcttcctggccactttcccgctggctgccgtgagccgcgccgagcaggacctgtaccgctgtgtgtcccaggccccgcgcggcgcgggcgtctctaacttcgcggagctcatcgtcaaggagcccccaactcccatcgcgcccccacagctgctgcgtgctggccccacctacctcatcatccagctcaacaccaactccatcattggcgacgggccgatcgtgcgcaaggagattgagtaccgcatggcgcgcgggccctgggctgaggtgcacgccgtcagcctgcagacctacaagctgtggcacctcgaccccgacacagagtatgagatcagcgtgctgctcacgcgtcccggagacggcggcactggccgccctgggccacccctcatcagccgcaccaaatgcgcagagcccatgagggcccccaaaggcctggcttttgctgagatccaggcccgtcagctgaccctgcagtgggaaccactgggctacaacgtgacgcgttgccacacctatactgtgtcgctgtgctatcactacaccctgggcagcagccacaaccagaccatccgagagtgtgtgaagacagagcaaggtgtcagccgctacaccatcaagaacctgctgccctatcggaacgttcacgtgaggcttgtcctcactaaccctgaggggckcaaagagggcaaggaggtcactttccagacggatgaggatgtgcccagtgggattgcagcygagtccctgaccttcactccactggaggacatgatcttcctcaagtgggaggagccccaggagcccaatggtctcatcacccagtatgagatcagctaccagagcatcgagtcatcagacccggcagtgaacgtgccaggcccacgacgtaccatctccaagctccgcaatgagacctaccatgtcttctccaacctgcacccaggcaccacctacctgttctccgtgcgggcccgcacaggcaaaggcttcggccaggcggcactcactgagataaccactaacatctctgctcccagctttgattatgccgacatgccgtcacccctgggcgagtctgagaacaccatcaccgtgctgctgaggccggcacagggccgcggtgcgcccatcagtgtgtaccaggtgattgtggaggaggagcgggcgcggaggctgcggcgggagcsaggtggacaggactgcttcccagtgccattgaccttcgaggcggcgctggcccgaggcctggtgcactacttcggggccgaactggcggccagcagtctacctgaggccatgccctttaccgtgggtgacaaccagacctaccgaggcttctggaacccaccacttgagcctaggaaggcctatctcatctacttccaggcagcaagccacctgaagggggagacccggctgaattgcatccgcattgccaggaaagctgcctgcaaggaaagcaagcggcccctggaggtgtcccagagatcggaggagatggggcttatcctgggcatctgtgcaggggggcttgctgtcctcatccttctcctgggtgccatcattgtcatcatccgcaaagggaagccggtgaacatgaccaaggccaccgtcaactaccgccaggagaagacacacatgatgagcgccgtggaccgcagcttcacagaccagagcaccctgcaggaggacgagcggctgggcctgtccttcatggacacccatggctacagcacccggggagaccagcgcagcggtgggktcactgaggccagcagcctcctggggggctccccgaggcgtccctgtggccggaagggctccccataycacacggggcagctgcaccctgcggtgcgtgtcgcagaccttctgcagcacatcaaccagatgaagacggccgagggttacggcttcaagcaggagtaygagagcttctttgaaggctgggacgccacaaagaagaaagacaaggtcaagggcagccggcaggagccaatgcctgcctatgatcggcaccgagtgaaactgcacccgatgctgggagaccccartgccgactacattaatgccaactacatagatggttaccacaggtcaaaccacttcatagccactcaagggccgaagcctgagatggtctatgacttctggcgtatggtgtggcaggagcactgttccagcatcgtcatgatcaccaagctggtcgaggtgggcagggtgaaatgctcacggtactggccggaggactcagacacctacggggacatcaagattatgctggtgaagacagagamcctggctgagtatgtcgtgcgcacttttgccctggagcggagaggctactctgcccggcacgaggtccgccagttccacttcacagcgtggccagagcatggcgtcccctaccatgccacggggctgctggctttcatccggcgcgtgaaggcctccaccccacctgatgccgggcccattgtcatccactgcagcgcgggcaccggccgcacaggttgctatatcgtcctggatgtgatgctggacatggcagagtgtgagggygtcgtggacatttacaactgtgtgaagactctctgctcccggcgtgtcaacatgatccagactgaggagcagtacatcttcattcatgatgcaatcctggaggcctgcctgtgtggggagaccaccatccctgtcagtgagttcaaggccacctacaaggagatgatccgcattgatcctcagagtaattcctcccagctgcgggaagagttccagacgctgaactckgtcaccccgccgctggacgtggaggagtgcagcatcgccctgttgccccggaaccgygacaagaaccgcagcatggacgtcctgccgcccgaccgctgcctgcccttcctcatctccactgatggggactccaacaactacattaatgcagccctgactgacagctacacacggagtgcggccttcatcgtgaccctgcacccgctgcagagcaccacgcccgacttctggcggctggtctacgattacgggtgcacctccatcgtcatgctcaaccagctgaaccagtccaactccgcctggccctgcctgcagtactggccagagccaggccggcagcaatatggcctcatggaggtggagtttatgtcgggcacagctgatgaagacttagtggctcgagtcttccgggtgcagaacatctctcggttgcaggaggggcacctgctggtgcggcacttccagttcctgcgctggtctgcataccgggacacacctgactccaagaaggccttcttgcacctgctggctgaggtggacaagtggcaggccgagagtggggatgggcgcaccatcgtgcactgcctaaacgggggaggacgcagcggcaccttctgcgcctgcgccacggtcctggagatgatccgctgccacaacttggtggacgttttctttgctgccaaaaccctccggaactacaaacccaacatggtggagaccatggatcagtaccacttttgctacgatgtggccctggagtacttggaggggctggagtcaagatagcggggccctggcctggggcacccactgcacactcagggccagacccaccatcctggactggcgaggaagatcagtgcctcctgctctgcccaaacacactcccatggggcaagcactggagtggatgctgggctatcttgctcccccttccacygtgggcagggcctttcgcttgtcccatgggcgggtggtgggccaaggaggagcttagcaagtctgcagcccagccccacctccatagggtcctgcaggcctgtgctgagaggcctggtgctgcctggcagagtgacaaaggctcaggacggctggctctgggggactcaggccaagccccttggcaccatcctggcttttggcagggatgagtgaggccctgcagagagcatcccaggccaaggttcccactcagcctgccccctctgcatgtgggtagaggatgtactgggacttggcatttaggattccatctggcccagcccctgaaggtcctggggaagcaggwctcaattctgaatagccagtggggcacactgactgtcctccccaggggaactgcagcgccctcctccccactgccccctgcagcccctgagatattttgctcactatccctccccacttgcttccctgatatgtgctctgagcttccctgaaccaggatctgcctattactgctgtgccccatggggggctccttccctgcctgacccactgttgcagaatgaagtcacctcgcccccctcttcctttaatcttcaggcctcactggcctgtcctgctcagcttgggccagtgacaatctgcaaggctgaacaacagcccctggggttgaggcccctgtggctcctggtcaggctgcccgttgtggggaggggcagtgttagagcagggctggtcataccctctggagttcagaggaagaggtaggaccagtgcttttttgtttcttttgttatttttggttgggtgggtgggaaggtctctttaaaatggggcaggccacacccccattccgtgcctcaatttccccatctgtaaactgtagatatgactactgacctacctcgcagggggctgtggggaggcataagctgatgtttgtaaagcgctttgtaaataaacgtgctctctgaatgcca

SEQ ID NO: 1891 - DNA, 5588 bp, Homo sapiens
gactcggcgccagtcccgctccgcgccgcgccgctccgctccggctcgggctccggctcgcctcgggctgggctcgggctccgggggcggcgtcccccgcgccgggccccgggacgggcggcgacgctccaaccatggcccgtgcccaggcgctcgtgctggcactcaccttccagctctgcgcgccggagaccgagactccggcagctggctgcaccttcgaggaggcaagtgacccagcagtgccctgcgagtacagccaggcccagtacgatgacttccagtgggagcaagtgcgaatccaccctggcamccgggcacctgcggacctgccccacggctcctacttgatggtcaacacttcccagcatgccccaggccagcgagcccatgtcatcttccagagcctgagcgagaatgatacccactgtgtgcagttcagctacttcctrtacagccgggacgggcacagcccgggcaccctgggcgtctacgtgcgcgttaatgggggccccctgggcagtgctgtgtggaatatgactggatcccacggccgtcagtggcaccaggctgagctggctgtcagcactttctggcccaatgaatatcaggtgctgtttgaggccctcatctccccagaccgcaggggctacatgggcctagatgacatcctgcttctcagctacccctgcgcaaaggccccacacttctcccgcctgggcgacgtggaggtcaacgcgggccagaacgcgtcgttccagtgcatggccgcgggcagagcggccgaggccgaacgcttcctcttgcaacggcagagcggggcgctggtgccggcggcgggcgtgcggcacatcagccaccggcgcttcctggccactttcccgctggctgccgtgagccgcgccgagcaggacctgtaccgctgtgtgtcccaggccccgcgcggcgcgggcgtctctaacttcgcggagctcatcgtcaaggagcccccaactcccatcgcgcccccacagctgctgcgtgctggccccacctacctcatcatccagctcaacaccaactccatcattggcgacgggccgatcgtgcgcaaggagattgagtaccgcatggcgcgcgggccctgggctgaggtgcacgccgtcagcctgcagacctacaagctgtggcacctcgaccccgacacagagtatgagatcagcgtgctgctcacgcgtcccggagacggcggcactggccgccctgggccacccctcatcagccgcaccaaatgcgcagagcccatgagggcccccaaaggcctggcttttgctgagatccaggcccgtcagctgaccctgcagtgggaaccactgggctacaacgtgacgcgttgccacacctatactgtgtcgctgtgctatcactacaccctgggcagcagccacaaccagaccatccgagagtgtgtgaagacagagcaaggtgtcagccgctacaccatcaagaacctgctgccctatcggaacgttcacgtgaggcttgtcctcactaaccctgaggggckcaaagagggcaaggaggtcactttccagacggatgaggatgtgcccagtgggattgcagcygagtccctgaccttcactccactggaggacatgatcttcctcaagtgggaggagccccaggagcccaatggtctcatcacccagtatgagatcagctaccagagcatcgagtcatcagacccggcagtgaacgtgccaggcccacgacgtaccatctccaagctccgcaatgagacctaccatgtcttctccaacctgcacccaggcaccacctacctgttctccgtgcgggcccgcacaggcaaaggcttcggccaggcggcactcactgagataaccactaacatctctgctcccagctttgattatgccgacatgccgtcacccctgggcgagtctgagaacaccatcaccgtgctgctgaggccggcacagggccgcggtgcgcccatcagtgtgtaccaggtgattgtggaggaggagcgggcgcggaggctgcggcgggagcsaggtggacaggactgcttcccagtgccattgaccttcgaggcggcgctggcccgaggcctggtgcactacttcggggccgaactggcggccagcagtctacctgaggccatgccctttaccgtgggtgacaaccagacctaccgaggcttctggaacccaccacttgagcctaggaaggcctatctcatctacttccaggcagcaagccacctgaagggggagacccggctgaattgcatccgcattgccaggaaagctgcctgcaaggaaagcaagcggcccctggaggtgtcccagagatcggaggagatggggcttatcctgggcatctgtgcaggggggcttgctgtcctcatccttctcctgggtgccatcattgtcatcatccgcaaagggaagccggtgaacatgaccaaggccaccgtcaactaccgccaggagaagacacacatgatgagcgccgtggaccgcagcttcacagaccagagcaccctgcaggaggacgagcggctgggcctgtccttcatggacacccatggctacagcacccggggagaccagcgcagcggtgggktcactgaggccagcagcctcctggggggctccccgaggcgtccctgtggccggaagggctccccataycacacggggcagctgcaccctgcggtgcgtgtcgcagaccttctgcagcacatcaaccagatgaagacggccgagggttacggcttcaagcaggagtaygagagcttctttgaaggctgggacgccacaaagaagaaagacaaggtcaagggcagccggcaggagccaatgcctgcctatgatcggcaccgagtgaaactgcacccgatgctgggagaccccartgccgactacattaatgccaactacatagatgtgattccagggttaccacaggtcaaaccacttcatagccactcaagggccgaagcctgagatggtctatgacttctggcgtatggtgtggcaggagcactgttccagcatcgtcatgatcaccaagctggtcgaggtgggcagggtgaaatgctcacggtactggccggaggactcagacacctacggggacatcaagattatgctggtgaagacagagamcctggctgagtatgtcgtgcgcacttttgccctggagcggagaggctactctgcccggcacgaggtccgccagttccacttcacagcgtggccagagcatggcgtcccctaccatgccacggggctgctggctttcatccggcgcgtgaaggcctccaccccacctgatgccgggcccattgtcatccactgcagcgcgggcaccggccgcacaggttgctatatcgtcctggatgtgatgctggacatggcagagtgtgagggygtcgtggacatttacaactgtgtgaagactctctgctcccggcgtgtcaacatgatccagactgaggagcagtacatcttcattcatgatgcaatcctggaggcctgcctgtgtggggagaccaccatccctgtcagtgagttcaaggccacctacaaggagatgatccgcattgatcctcagagtaattcctcccagctgcgggaagagttccagacgctgaactckgtcaccccgccgctggacgtggaggagtgcagcatcgccctgttgccccggaaccgygacaagaaccgcagcatggacgtcctgccgcccgaccgctgcctgcccttcctcatctccactgatggggactccaacaactacattaatgcagccctgactgacagctacacacggagtgcggccttcatcgtgaccctgcacccgctgcagagcaccacgcccgacttctggcggctggtctacgattacgggtgcacctccatcgtcatgctcaaccagctgaaccagtccaactccgcctggccctgcctgcagtactggccagagccaggccggcagcaatatggcctcatggaggtggagtttatgtcgggcacagctgatgaagacttagtggctcgagtcttccgggtgcagaacatctctcgggaggggcacctgctggtgcggcacttccagttcctgcgctggtctgcataccgggacacacctgactccaagaaggccttcttgcacctgctggctgaggtggacaagtggcaggccgagagtggggatgggcgcaccatcgtgcactgcctaaacgggggaggacgcagcggcaccttctgcgcctgcgccacggtcctggagatgatccgctgccacaacttggtggacgttttctttgctgccaaaaccctccggaactacaaacccaacatggtggagaccatggatcagtaccacttttgctacgatgtggccctggagtacttggaggggctggagtcaagatagcggggccctggcctggggcacccactgcacactcagggccagacccaccatcctggactggcgaggaagatcagtgcctcctgctctgcccaaacacactcccatggggcaagcactggagtggatgctgggctatcttgctcccccttccacygtgggcagggcctttcgcttgtcccatgggcgggtggtgggccaaggaggagcttagcaagtctgcagcccagccccacctccatagggtcctgcaggcctgtgctgagaggcctggtgctgcctggcagagtgacaaaggctcaggacggctggctctgggggactcaggccaagccccttggcaccatcctggcttttggcagggatgagtgaggccctgcagagagcatcccaggccaaggttcccactcagcctgccccctctgcatgtgggtagaggatgtactgggacttggcatttaggattccatctggcccagcccctgaaggtcctggggaagcaggwctcaattctgaatagccagtggggcacactgactgtcctccccaggggaactgcagcgccctcctccccactgccccctgcagcccctgagatattttgctcactatccctccccacttgcttccctgatatgtgctctgagcttccctgaaccaggatctgcctattactgctgtgccccatggggggctccttccctgcctgacccactgttgcagaatgaagtcacctcgcccccctcttcctttaatcttcaggcctcactggcctgtcctgctcagcttgggccagtgacaatctgcaaggctgaacaacagcccctggggttgaggcccctgtggctcctggtcaggctgcccgttgtggggaggggcagtgttagagcagggctggtcataccctctggagttcagaggaagaggtaggaccagtgcttttttgtttcttttgttatttttggttgggtgggtgggaaggtctctttaaaatggggcaggccacacccccattccgtgcctcaatttccccatctgtaaactgtagatatgactactgacctacctcgcagggggctgtggggaggcataagctgatgtttgtaaagcgctttgtaaataaacgtgctctctgaatgcca

SEQ ID NO: 1892 - DNA, 2539 bp, Homo sapiens
ggatcagcccaaaggtaggctcaggctccgacggtggccsgcgggggtcacgaggcttcgtagtggaggaacgggtttggcgtgtgrgacgcagctgcctctgtactggggagtmacggagtggccgggctccagggacatggcggcggcctctgcggtgtcggtgctgctggtggcggcggagaggaaccggtggcatcgtctcccgagcctgctcctgccgccgaggacatgggtgtggaggcaaagaaccatgaagtacacaacagccacaggaagaaacattaccaaggtcctcattgcaaacagaggagaaattgcctgcagggtgatgcgcacagccaaaaaactgggtgtacagactgtggcggtttatagtgaggctgacagaaattccatgcatgtagatatggcagatgaagcatattccatcggccccgctccctcccagcagagctacctatctatggagaaaatcattcaagtggccaagacctctgctgcacaggctatccatccaggatgcggttttctttcagaaaacatggaatttgctgaactttgtaagcaagaaggaattatttttataggccctcctccatctgcaattagagacatgggtataaagagcacatccaaatccataatggctgctgctggagtacctgttgtggagggttatcatggtgaggaccaatcagaccagtgcctgaaggaacacgccaggagaattggctatcctgtcatgattaaagccgtccggggtggaggaggaaaaggaatgaggattgttagatcagaacaagaatttcaagaacagttagagtcagcacggagagaagctaagaagtctttcaatgatgaygctatgctgatcgagaagtttgtagacacaccgaggcatgtagaagtccaggtgtttggtgatcaccatggcaatgctgtgtacttgtttgaaagagactgtagtgtgcagaggcgacatcagaagatcattgaggaggccccagcgcctggtattaaatctgaagtaagaaaaaagctgggagaagctgcagtcagagctgctaaagctgtaaattatgttggagcagggactgtggagtttattatggactcaaaacataatttctgtttcatggagatgaatacaaggctgcaagtggaacatcctgttactgagatgatcacaggaactgacttggtggagtggcagcttagaattgcagcaggagagaagattcctttgagccaggaagaaataactctgcagggccatgccttcgaagctagmatatatgcagaagatcctagcaataacttcatgcctgtggcaggcccattagtgcacctctctactcctcgagcagacccttccaccaggattgaaactggagtacggcaaggagacgaagtttccgtgcattatgaccccatgattgcgaagcyggtcgtgtgggcagcagatcgccaggcggcattgacaaaactgaggtacagccttcgtcagtacaatattgttggactgcmcaccaacattgacttcttactcaacctgtctggccacccagagtttgaagctgggaacgtgcacactgatttcatccctcaacaccacaaacagttgttgctcagtcggaaggctgcagccaaagagtctttatgccaggcagccctgggtctcatcctcaaggagaaagccatgaccgacactttcactcttcaggcacatgatcaattctytccattttcrtctagcagtggaagaagactgaatatctcgtataccagaaacatgactcttaaagatggtaaaamcaatgtagccatagctgtaacgtataaccatgatgggtcttatagcatgcagattgaagataaaactttccaagtccttggtaatctttacagcgagggagactgcacttacctgaaatgttctgttaatggagttgctagtaaagcgaagctgattatcctggaaaacactatttacctattttccaaggaaggaagtattgagattgacattccagtccccaaatacttatcttctgtgagctcacaagaaactcagggcggccccttagctcctatgactggaaccattgaaaaggtgtttgtcaaagctggagacaaagtgaaagcgggagattccctcatggttatgatcgccatgaagatggagcataccataaagtctccaaaggatggcacagtaaagaaagtgttctacagagaaggtgctcaggccaacagacacactcctttagtcgagtttgaggagraagaatcagacaaaagggaatcggaataaactccagcaaggaaatggccagttaagtagtgtcttctctctccaccaaaaagaggaagtgcctccagcttttctgggggtctcataaagagcagttttactaaatgattgtatgcttatgctgaacacctttcatattggagaatcatgcatttgggtcactaattatctcaaaatatttcatactaataaagttgaattattttttattggaagccaatg

SEQ ID NO: 1893 - DNA, 2734 bp, Homo sapiens
tctgctgaggtgacaacgtgctagcagccctcgctcgctctgggcgcctcctcggcctcagcgtccgctctggccgcgctcgaggagcccttcagcccgccgctgcgctatgaaggcccctctctggggctggccgaggctggagccggctccctctgctcgcgggcaagtgtgaagagagaggcgcgggcgggagccggggctgcgcgcggcgctcgcgggccggcgcgggttccagatgcatttttgtagaagcattttgaggatgaatgtttgcaaatcattttgaaattgccaagtgccacatacatggaatgtatcctgctttcatcttggagttcacctgtgtggcttggatttatcacagtagcatttgtcttcaatctgtgtgttaactagaaaycaaggaaagacatgaggagatttgtctactgcaaggtggttctagccacttcgctgatgtgggttcttgttgatgtcttcttactgctgtacttcagtgaatgtaacaaatgtgatgacaagaaggagagatctctgctgcctgcattgagggctgttatttcaagaaaccaagaagggccaggagawatgggaaaagctgtgttgattcctaaagatgaccaggagaaaatgaaagagctgtttaaaatcaatcagtttaaccttatggccagtgatttgattgcccttaatagaagtctgccagatgtaagattagaaggatgtaagacaaaagtctaccctgatgaacttccaaacacaagtgtagtcattgtgtttcataatgaagcttggagcactctccttagaactgtttacagtgtgataaatcgttccccacactatctactctcagaggtcatcttggtagatgatgccagtgaaagagattttctcaagttgacattagagaattacgtgaaaaatttagaagtgccagtaaaaattattaggatggaagaacgctctgggttaatacgtgcccgtcttcgaggagcagctgcttcaaaagggcaggtcataacttttcttgatgcacactgtgaatgcacgttaggatggctggagcctttgctggcaagaataaaggaagacaggaaaacggttgtctgccctatcattgatgtgattagtgatgatacttttgaatatatggctgggtcagacatgacttatgggggttttaactggaaactgaatttccgctggtatcctgttccccaaagagaaatggacaggaggaaaggagacagaacattacctgtcaggacccctactatggctggtggcctattttctattgacagaaactactttgaagagataggaacttacgatgcaggaatggatatctggggtggagagaatcttgaaatgtcttttaggatttggcaatgtggaggctccttggagattgttacttgctcccatgttggtcatgtttttcggaaggcaactccatacacttttcctggtggcactggtcatgtcatcaacaagaacaacaggagactggcagaagtttggatggatgaatttaaagatttcttctacatcatatccccaggtgttgtcaaagtggattatggagatgtgtcagtcagaaaaacactaagagaaaatctgaagtgtaagcccttttcttggtacctagaaaacatctatccggactcccagatcccaagacgttattactcacttggtgagataagaaatgttgaaaccaatcagtgtttagacaacatgggccgcaaggaaaatgaaaaagtgggtatattcaactgtcatggtatgggaggaaatcaggtattttcttacactgctgacaaagaaatccgaaccgatgacttgtgcttggatgtttctagactcaatggacctgtaatcatgttaaaatgccaccatatgagaggaaatcagttatgggaatatgatgctgagagactcacgttgcgacatgttaacagtaaccaatgtctcgatgaaccttctgaagaagacaaaatggtgcctacaatgcaggactgtagtggaagcagatcccaacagtggctgctaaggaacatgaccttgggcacatgaagatcatgtcctccaagccatgaaagtgtctacgcttttgtttttccattatttcaattgggggaaaatattaactttgctgaattgaaagttttaaaaatccttttagtattctaaaacacaattgtttctaattcgtttctagaaatgtttgcttatttccctactaaaatttgtatctgatcaaagcacataagaatataaataatagcaaactactattaaacaacagaacaacttgtaaaacaaattgtgtttgctttaagaaaaatstttattgcactcatgtcatagggttaattggaggttattttatttttggttgtcatggtgattgaaagagataatgtaaatgccttataaaatcttcattatgaaatattatcagttgctttataaactcactctttttatggatccttcatggaaacatgtttgatttctgtgtctacaacagggccacatattaaattacttctgaatggtgaattcatcttacaaaatgttccaagttttggacaaggaaaaacattacattggatattgaattcatrgagcctttacagaagcatcacatttaaaccaatgtgaattcaaaaaagagaaggaaactttttaaattcaatttagagtacataaaaaaagaaat

SEQ ID NO: 1894 - DNA, 1729 bp, Homo sapiens
tccagaccccggaggagggcagcgcgaccctccccatcttgttactggtactcagccactggggacactgactgaatgttcgcccctaacttacccggaaaacacgagaactagttcgatgtcgtttcaaccttaccaaactctgcggaaacttaggaaattatctttagtgtctagataggggaattgttagatggacttgaagtctctcacctcctgttgtacgcctcccggaagcaacaccaggagtccaacgggatcccaaaccagagcccaaccagtatcctataaagtcttcagagagggatcccctccaggctggggagaaacaggacaacctaacaaaacagggcctggactcctccctaaacagaccacgtttttctccgctcttccccttcccactccctgaaatctagactaaaactcttttaagataactgcgaggtataaagaacgtctagagcctaagcggcccgttgccagattctactcctcaggcctcaaatgtgagcgccccaaacattctagagctgaacctggcgggcaaggcccccgatcacgtgataccgccccccaactccgggcggaagaggccagcgacagcgctgcacgaagcgagtgggcgggcgctcgtgcccggctaaaagatggctgctggcgcctggcagccaccgcctgggaggttactgtaaggcccgcagctcccgccagctcccgcggactgctgccgcctccttaccatgaagccagtaagtcgtcgcacgctggastggatttattcagtgttgctgcttgccatcgttttaatctcctggggctgcatcatctatgcttcgatggtgtctgcaagacgacagctaaggaagaaatacccagacaaaatctttgggacgaawgaaaatttgtaactcttctggatttaattatctgaaaatacagttctttccctcatgcttatgtagatataaaaataaaattcataatgcaaagttcccaagtttatttttgcattatcctttataayaagcactagtatgcaaatttttcacttagagattttagtattttacattctcatgacaaaattaacagcaacctaaatctgacagtcttgagtgtcagatcatagttggaataagcttttcaatcaagtttctraattcttcaaaaatgattcggaaagctttttttttttttgagacggagtcttgctctgtcgcccaggctcagtggcactatctcggcttactgcaagctccgccttctgggttcacaccaatctcgtgcctcagcctccgcagtagctgggactacaggagcccgccaccacgcccggctaatttttttgtatttttagtagggacggggtttcactgtgttagccatgatggtctcgatctcctgacttcgtgatctgcccgcctcggcctcccaaagtgctgggattacaggcatgagccactgcgcctggccggaaagatttccttaaaacaaaagtgcatggaattgctgttcttacatttgtttattgtgatatttcactgttgcataccctgataccaaattagtgtaagtactgtgtaagaaaaaaacaaacaaacatgtaactaaatacttttccataccgttttccaagtcaagaatgaccagaaaaagtaggtagtctctcatatttgtttagcatgtccactttttacttattgttaaattactcagtctcaaattg

SEQ ID NO: 1895 - DNA, 1102 bp, Homo sapiens
gctgctggcgcctggcagccaccgcctgggaggttactgtaaggcccgcagctcccgccagctcccgcggactgctgccgcctccttaccatgaagccagtaagtcgtcgcacgctggastggatttattcagtggtaagtcccggggatcgcgggyccccaccgtgtcgactcactgggcccgcaggcggaaaggccctatttcttcagcacccagaaactccaaaatccattcctgaattaagcatttcactccctcacctcgactccgcctcttcctggaggatacgatcttccgcttcttacgtaagggctgctgggtgtacccgccactggaaccccatttattcgactttgttactttaattcccaccttagcaatggcaacggyaacctgacgggggcgaggggaaatatcaggtagatttcacacctcctttgcgatttttggtttagttgctgcttgccatcgttttaatctcctggggctgcatcatctatgcttcgatggtgtctgcaagacgacagctaaggaagaaatacccagacaaaatctttgggacgaawgaaaatttgtaactcttctggatttaattatctgaaaatacagttctttccctcatgcttatgtagatataaaaataaaattcataatgcaaagttcccaagtttatttttgcattatcctttataayaagcactagtatgcaaatttttcacttagagattttagtattttacattctcatgacaaaattaacagcaacctaaatctgacagtcttgagtgtcagatcatagttggaataagcttttcaatcaagtttctraattcttcaaaaatgattcggaaagctttttttttttttgagacggagtcttgctctgtcgcccaggctcagtggcactatctcggcttactgcaagctccgccttctgggttcacaccaatctcgtgcctcagcctccgcagtagctgggactacaggagcccgccaccacgcccggctaatttttttgtatttttagtagggacggggtttcactgtgttagccatgatggtctcgatctcctgacttcgtgatctgcccgcctcggcctc

SEQ ID NO: 1896 - DNA, 4735 bp, Homo sapiens
gcactttcgattttccctttagttattaaagttcctatgcagctccgcctcgcgtccggcctcakttcctcggaaaatccctgctttccccgctcgccacgccctcctsctacccggctttaaagctagtgaggcacagcctgcggggaacgtagctagctgcaagcagaggccggcatgaccaccgagcagcgaygcagcctgcaagccttccaggattatatccggaagaccctggaccctacctacatcctgagctacatggccccctggtttagggaggaagaggtgcagtatattcaggctgagaaaaacaacaagggcccaatggaggctgccacactttttctcaagttcctgttggagctccaggaggaaggctggttccgtggctttttggatgccctagaccatgcaggttattctggactttatgaagccattgaaagttgggatttcaaaaaaattgaaaagttggaggagtatagattacttttaaaacgtttacaaccagaatttaaaaccagaattatcccaaccgatatcatttctgatctgtctgaatgtttaattaatcaggaatgtgaagaaattctacagatttgctctactaaggggatgatggcaggtgcagagaaattggtggaatgccttctcagatcagacaaggaaaactggcccaaaactttgaaacttgctttggagaaagaaaggaacaagttcagtgaactgtggattgtagagaaaggtataaaagatgttgaaacagaagatcttgaggataagatggaaacttctgacatacagattttctaccaagaagatccagaatgccagaatcttagtgagaattcatgtccaccttcagaagtgtctgatacaaacttgtacagcccatttaaaccaagaaattaccaattagagcttgctttgcctgctatgaaaggaaaaaacacaataatatgtgctcctacaggttgtggaaaaacctttgtttcactgcttatatgtgaacatcatcttaaaaaattcccacaaggacaaaaggggaaagttgtcttttttgcgaatcagatcccagtgtatgaacagcagaaatctgtattctcaaaatactttgaaagacatgggtatagagttacaggcatttctggagcaacagctgagaatgtcccagtggaacagattgttgagaacaatgacatcatcattttaactccacagattcttgtgaacaaccttaaaaagggaacgattccatcactatccatctttactttgatgatatttgatgaatgccacaacactagtaaacaacacccgtacaatatgatcatgtttaattatctagatcagaaacttggaggatcttcaggcccactgccccaggtcaytgggctgactgcctcggttggtgttggggatgccaaaaacacagatgaagccttggattatatctgcaagctgtgtgcttctcttgatgcgtcagtgatagcaacrgtcaaacacaatctggaggaactggagcaagttgtttataagccccagaagtttttcaggaaagtggaatcacggattagcgacaaatttaaatacatcatagctcagctgatgagggacacagagagtctggcaaagagaatctgcaaagacctcgaaaacttatctcaaattcaaaatagggaatttggaacacagaaatatgaacaatggattgttacagttcagaaagcatgcatggtgttccagatgccagacaaagatgaagagagcaggatttgtaaagccctgtttttatacacttcacatttgcggaaatataatgatgccctcattatcagtgagcatgcacgaatgaaagatgctctggattacttgaaagacttcttcagcaatgtccgagcagcaggattcgawgagattgagcaagatcttactcagagatttgaagaaaagctgcaggaactagaaagtgtttccagggatcccagcaatgagaatcctaaacttgaagacctctgcttcatcttacaagaagagtaccacttaaacccagagacaataacaattctctttgtgaaaaccagagcacttgtggacgctttaaaaaattggattgaaggaaatcctaaactcagttttctaaaacctggcatattgactggacgtggcaaaacaaatcagaacacaggaatgaccctcccggcacagaagtgtatattggatgcattcaaagccagtggagatcacaatattctgattgccacctcagttgctgatgaaggcattgacattgcacagtgcaatcttgtcatcctttatgagtatgtgggcaatgtcatcaaaatgatccaaaccagaggcagaggaagagcaagaggtagcaagtgcttccttctgactagtaatgctggtgtaattgaaaaagaacaaataaacatgtacaaagaaaaaatgatgaatgactctattttacgccttcagacatgggacgaagcagtatttagggaaaagattctgcatatacagactcatgaaaaattmatcagagatagtcaagaaaaaccaaaacctgtmcctgataaggaaaataaaaaactgctctgcagaaagtgcaaagccttggcatgttacacagctgacgtaagagtgatagaggaatgccattacactgtgcttggagatgcttttaaggaatgctttgtgagtagaccacatcccaagccaaagcagttttcaagttttgaaaaaagagcaaagatattctgtgcccgacagaactgcagccatgactggggaatccatgtgaagtacaagacatttgagattccagttataaaaattgaaagttttgtggtggaggatattgcaactggagttcagacrctgtactcgaagtggaaggactttcattttgagaagataccatttgatccagcagaaatgtccaaatgatatcaggtcctcaatcttcagctacagggaatgagtaactttgagtggagaagaaacaaacatagtgggtataatcatggatcgcttgtacccctgtgaaaatatattttttaaaaatatctttagcagtttgtactatattatatatgcaaagcacaaatgagtgaatcacagcactgagtattttgtaggccaacagagctcatagtacttgggaaaaattaaaaagcctcatttctagccttctttttagagtcaactgccaacamacacacagtaatcactctgtacacactgggatagatgaatgaatggaatgttgggaatttttatctccctttgtctccttaacctactgtaaactggcttttgcccttaacaatctactgaaattgttcttttgaaggttaccagtgactctggttgccaaatccactgggcacttcttaaccttctatttgacytctgcgcatttggccctgttgagcactcttcttgaagctctccctgggcttctctctcttctagttctattctagtctttttttattgagtcctcctctttgctgatcccttccaagggttcaatatatatacatgtatatactgtacatatgtatatgtaactaatatacatacatacaggtatgtatatgtaatggttatatgtactcatgttcctggtgtagcaacgtgtggtatggctacacagagaacatgagaacataaagccatttttatgcttactactaaaagctgtccactgtagagttgctgtatgtagcaatgtgtatccactctacagtggtcagcttttagtagagagcataaaaatgataaaatacttcttgaaaacttagtttactatacatcttgccctattaatatgttctcttaacgtgtgccattgttctctttgaccattttcctataatgatgttgatgttcaacacctggactgaatgtctgttctcagatcccttggatgttacagatgaggcagtctgactgtcctttctacttgaaagattagaatatgtatccaaatggcattcacgtgtcacttagcaaggtttgctgatgcttcaaagagcttagtttgyggtttcctggacgtggaaacaagtatctgagttccctggagatcaacgggatgaggtgttacagctgcctccctcttcatgcaatctggtgagcagtggtgcaggcggggagccagagaaacttgccagttatataacttctctttggcttttcttcatctgtaaaacaaggataatactgaactgtaagggttagtggagagtttttaattaaaagaatgtgtgaaaagtacatgacacagtagttgcttgataatagttactagtagtagtattcttactaagacccaatacaaatggattatttaaaccaagtttatgagttggttttttttcattttcyatttgtattttattaagagtgtcttttcttatgtgattttttttaattgctatttgatatggtttggctatatgtccccacccaaatctcatcttgaattataatccccatgtgtcaagggagggacctgaygggaggtgaytggatcacgggggcagttgtccccatgctgttcttgggatagtgagttagttctcatgagatctgrtggttttataagtgtttgacaattcctcctttacacacactctctctctcatctgctgccatgtaagacttgcctgcttccccttctgccatgattgtaagtttcctgaggcctcctcagccatgt

SEQ ID NO: 1897 - DNA, 2950 bp, Homo sapiens
cgaggcctagggctgcaggcgcggagccgcgagccccagccaatgagcgccggcgggccggttgcccaggcgaccagcgcgcggctccgccccccgcggcgaggctcccgcgcgcggctgagtgcggactggagtgggaacccgggtccccgcgcttagagaacacgcgatgaccacgtggagcctccggcggaggccggcccgcacgctgggactcctgctgctggtcgtcttgggcttcctggtgctycgcaggctggactggagcaccctggtccctctgcggctccgccatcgacagctggggctgcaggccaagggctggaacttcatgctggaggattccaccttctggatcttcgggggctccatccactatttccgtgtgcccagggagtactggagggaccgcctgctgaagatgaaggcctgtggcttgaacaccctcaccacctatgttccgtggaacctgcatgagccagaaagaggcaaatttgacttctctgggaacctggacctggaggccttcgtcctgatggccgcagagatcgggctgtgggtgattctgcgtccaggcccctacatctgcagtgagatggacctcgggggcttgcccagctggctactccaagaccctggcatgaggctgaggacaacttacaagggcttcaccgaagcagtggacctttattttgaccacctgatgtccagggtggtgccactccagtacaagcgtgggggacctatcattgccgtgcaggtggagaatgaatatgrttcctataataaagaccccgcatacatgccctaygtcaagaaggcactggaggaccgtggcattgtggaactgctcctgacttcagacaacaaggatgggctgagcaaggggattgtccagggagtcttggccaccatcaacttgcagtcaacacacgagctgcagctactgaccacctttctcttcaacgtccaggggactcagcccaagatggtgatggagtactggacggggtggtttgactcrtggggaggccctcacaatatcttggattcttctgaggttttgaaaaccgtgtctgccattgtggacgccggctcctccatcaacctctacatgttycacggaggcaccaactttggcttcatgaatggagccatgcacttccatgactacaagtcagatgtcaccagctatggcaaggcccggtgtcttgcagactatgatgctgtgctgacagaagccggcgattacacggccaagtacatgaagcttcgagayttcttcggctccatctcaggcatccctctccctcccccacctgaccttcttcccaagatgccgtatgagcccttaacgccagtcttgtacctgtctctgtgggacgccctcaagtacctgggggagccaatcaagtctgaaaagcccatcaacatggagaacctgccagtcaaygggggaaatggacagtccttcgggtacattctctatgagaccagcatcacctcrtctggcatcctcagtggccacgtgcatgatcgggggcaggtgtttgtgaacacagtatccataggattcttggactacaagacaacgaagattgctgtccccctgatccagggttacaccgtgctgaggatcttggtggagaatcgtgggcgagtcaactatggggagaatattgatgaccagcgcaaaggcttaattggaaatctctatctgaatgattcacccctgaaaaacttcagaatctatagcctggatatgaagaagagcttctttcagaggttcggcctggacaaatggagttccctcccagaaacacccacattacctgctttcttcttgggtagcttgtccatcagctccacsccttgtgacacctttctgaagctggagggctgggagaagggggttgtattcatcaatggccagaaccttggacgttactggaacattggaccccagaagacgctttacctcccaggtccctggttgagcagcggaatcaaccaggtcatcgtttttgaggagacgatggmgggccctgcattacagttcacggaaaccccccacctgggcaggaaccagtacattaagtgagcggtggcaccccctcctgctggtgccagtgggagactgccgcctcctcttgacctgaagcctggtggctgctgccccacccctcactgcaaaagcatctccttaagtagcaacctcagggactgggggctacagtctgcccctgtctcagctcaaaaccctaagcctgcagggaaaggtgggatggctctgggcctggctttgttgatgatggctttcctacagccctgctcttgtgccgaggctgtcgggctgtctctagggtgggagcagctaatcagatcgcccagcctttggccctcagaaaaagtgctgaaacgtgcccttgcactggacgtcacagccctgcgagcatctgctggactcaggcgtgctctttgctggttcctgggaggcttggccacatccctcatggccccattttatccccgaaatcctgggtgtgtcaccagtgtagagggtggggaaggggtgtctcacctgagctgactttgttcttccttcacaaccttctgagccttctttgggattctggaaggaactcggcgtgagaaacatgtgacttcccctttcccttcccactcgctgcttcccacagggtgacaggctgggctggagaaacagaaatcctcaccctgcgtcttcccaagttagcaggtgtctctggtgttcagtgaggaggacatgtgagtcctggcagaaccatggcccatgtctgcacatccagggaggaggacagaaggcccagctcagtggcccccgccccccaccccccacgcccgaacagcaggggcagagcagccctccttcgaagtgtgtccaagtccgcatttgagccttgttytgggg

SEQ ID NO: 1898 - DNA, 975 bp, Homo sapiens
atgagcacaaccagaacagagaacgctgttataatgggtctgtccagtcaaaatggtcagctgaggggtcccctgaaacccagtggtggccctagaggagaggccacacagacacagcaacagacgaaccagctgaaaaacaccaacacaataatagcactcaaccacaagcgcagattactgatgagaatttttgaaatgggatggaaaaagccatctcctttccaagaagagagcattcccattgctttatctggtagggatatcttagctagagcaaaaaatggaacaggcaagagcagtgcccatgacattcccctacttaaaaggctagacctgaagaaggacactatacaaacaatagtgattgttcccacaggaggacctgctctacaggtcagtcaaatttgcatccaggtcagcaaacacatgggaggagtcaaagtggtgatgaccacaggaggaaccaattcaggagatgacgtactgaggctggatgatacagtgcacatggtgattgctgcccctgggagaatcctgaatcttattaagaaaggagtagcaaaggacataacccagtactacgcatatgtaactgagcaccaaaaagtacacggcctcaccacacttttctccaggcttcagctaaaccagatgatcattttctttaactgctctcagcgagttgaatggccagccaaaatttctcaactgggtattgatatacaagctgtgaatgtggtaataaactttgacttttcaaagmtagaagagacctatctccgtcatattggaagaccaggtcactttggccattttggcttagccatcaacttgatcacatatggcgatcacttcaacctgaaaggtattgaggagcagctgggaaaagaaataaaacctattccaagcaacattgacaagagcctgcatgtggcagaattccacagcaaggctgtagaaaatgagaagcct

SEQ ID NO: 1899 - DNA, 1433 bp, Homo sapiens
atgagcacaaccagaacagagaacgctgttataatgggtctgtccagtcaaaatggtcagctgaggggtcccctgaaacccagtggtggccctagaggagaggccacacagacacagcaacagacgaaccagctgaaaaacaccaacacaataatagcactcaaccacaagcgcagagtatgaccaccactattaagcctggtgataattggaagaagactttaaaactccttccaaaggatctaagaatcaaaatgttggatgtgacctctacaagaggatattaatttgaagattactgtttgaaacggcagttactgatgagaatttttgaaatgggatggaaaaagccatctcctttccaagaagagagcattcccattgctttatctggtagggatatcttagctagagcaaaaaatggaacaggcaagagcagtgcccatgacattcccctacttaaaaggctagacctgaagaaggacactatacaaacaatagtgattgttcccacaggaggacctgctctacaggtcagtcaaatttgcatccaggtcagcaaacacatgggaggagtcaaagtggtgatgaccacaggaggaaccaattcaggagatgacgtactgaggctggatgatacagtgcacatggtgattgctgcccctgggagaatcctgaatcttattaagaaaggagtagcaaaggtcagtcatgtccaggtgatagtattggatgaggcagataagtttctgtcccaggattttgggcagttaatggaagatattattctcatgctacctgaagacaggcagattttactacattctgctactttccctcttagtatacagaagttcatgaattcccatttgcagaaaccctgagactaacctgatggaaaaactaactctgaaggacataacccagtactacgcatatgtaactgagcaccaaaaagtacacggcctcaccacacttttctccaggcttcagctaaaccagatgatcattttctttaactgctctcagcgagttgaatggccagccaaaatttctcaactgggttatttttgtttctacattcatgctaaaatgaggcaggaacatcaaaattgtgtattttattatttctgaaatggcttattctcatttgcactgatctgtttacttgaggtattgatatacaagctgtgaatgtggtaataaactttgacttttcaaagmtagaagagacctatctccgtcatattggaagaccaggtcactttggccattttggcttagccatcaacttgatcacatatggcgatcacttcaacctgaaaggtattgaggagcagctgggaaaagaaataaaacctattccaagcaacattgacaagagcctgcatgtggcagaattccacagcaaggctgtagaaaatgagaagcct

SEQ ID NO: 1900 - DNA, 2041 bp, Homo sapiens
gaatgtaagccagtaaggcttgttaatkgattctttacraaagaagaaaggaagaatctggatgctcaagtctttttcgcccagactggagtgcagtggygcgatctcagctccactgcagcctctgcctcctcctgagtagctgggattacaggcatgagccaccatgcctggctaactttttggttttgttttaagtagaykgtctcaccatgtttcccaggctggtcttgaattcctaggctcaagtgatccacccacyttggccacccaaagtgctgggattgcaggcgtgagccaccacacctggccatggatgctcaagtcttaaacctgaagagtaggggagagagggatcggagagccttcaagaaggggtgatatctgagctgggtgttgagggttgagcaggagttggcaggaaggaaggggrttcttaccgtaccttttccgtaaatggggtccggggagatgtgtgacyggcaaacaatctgtcttcctctccattccaggatgagatggccttctgctacacccaggctccccacaagacaacgtccttgatcctcgacacacctcaggccgcygatctcgatgagttccccatgaagtactcactggtccctggtattggctacatgatccaggacactgaggaccataaagtggccagcatggattccattgggaacctgatggtgtccccacctgtcaaggtccaagggaaagagtacccgctgggcagagtcctcattggcagcagcttttaccccagcgcagagggccgggccatgagtaagaccctccgagacttcctctatgcccagcaggtccaagcgccggtggagctctactcagattggctaatgactggccacgtggatgagttcatgtgcttcatccccacagatgacaagaatgagggcaaaaagggcttcctgctgctcctggccagccccagtgcctgctataaactgttccgagagaaacagaaggaaggctatggcgaygctcttctgtttgatgagcttagagcagatcagctcctgtctaatggaagggaagccaaaaccatcgaccaacttctggctgatgaaagcctgaagaagcagaatgaatacgtggagacggagctgggcctggtggaacaggacatcatcgagattccccagctgttctgcttggagaagctgactaacatcccctctgaccagcagcccaagaggtcctttgcgaggccatacttccctgacctgttgcggatgattgtgatgggcaagaacctggggatccccaagccttttgggccccaaatcaaggggacctgctgcctggaagaaaagatttgctgcttgctggagcccctgggcttcaagtgcaccttcatcaatgaytttgactgttacctgacagaggtcggagacatctgtgcctgtgccaacatccgccgggtgccctttgccttcaaatggtggaagatggagttcgggaccagcctggacaacatggtgaaaccccatctctactaaaaatacaaaaattagccaggcatgtggtggacacctgtaatcccagctactcaggaggctgaggcaggagaatcgcttgaacccaggaggcagaggttgcagtgagctgcgattatgccactgcactccagcctgggtraaactcagtctccaaaaagactgtcggagtggactgcaggagtcaggggcgagacacacgacactcaatttgcagcatgtgcccaatacacaacagccagtgtgtcagcagggacgctgcccccagcagtggcttccctgcccacgggggctcttccagggcaggagcatctgatgggaagctccaagctgccaaggggggagatggggaaacaccgtgttttacatttggactgtcctgcaacagtgcacatgctccttctgcagctaacaggccatgggagaccgtttcctcctctcccaaactgggccaatgcctgccaggaggggctggtctggacactattcagccagtcaacacaaggtggcctgca

SEQ ID NO: 1901 - DNA, 4203 bp, Homo sapiens
tctcacggccggagttggtggtactgggaacccacgtgggctgggtttcggagacaaggacacgttgaagggagttgatgcaagcaacgcgctcgttctaccggggaagaagaaaaagaagaccaaagcccctcccctgtcgaagaaggagaagaagcctctgaccaagaaggagaagaaagtgctgcagaaaatcttagaacagaaggagaaaaagagccagcgagcagagatrctacagaagctgagtgaagtccaggcttccgaagctgagatgagactcttttataccacttccaagctaggcactgggaaccgcatgtatcacaccaaagagaaggctgacgaggtggtagccccgggccaggagaagatcagtagcctcagcggtgcccaccggaagcgtcgccgctggccctcagctgaggaggaggaggaggaggaggaggagtcggaatcggagctggaggaggagtcggagctggacgaggacccagctgctgagccggctgaggctggtgtggggaccaccgtggcacctctgccgccagctccagcacccagcagtcagcccgtgccggctgggatgactgttcctcctcctccagctgcagccccaccactgcccagggccctggctaagcccgccgtcttcatccccgtgaaccgctccccggaaatgcaggaggaacggctgaagctcccaattctctccgaagaacaagtaatcatggaggctgtggccragcaccccatcgtcatcgtgtgtggtgagaccggcagcgggaagaccacacaggtgcctcagtttctctatgaagcaggcttcagcagtgaagacagcatcatcggtgtcacggagccccgccgagtggccgccgtggccatgtcccagcgagtggccaaggagatgaatctgtcccagcgggtcgtctcctaccagatccggtatgaaggaaacgtgacagaggagaccagaatcaagttcatgacggatggtgtgctgcttaaagaaatccagaaggacttcctgctgctgcggtacaaggtggtgatcatcgacgaggcccacgagaggagcgtgtacacggacatcctcatcggcctcctgtcccgcattgtgactctccgggctaaggtagcgcaggaggcgggtgctggggagccccgagccctaggccccccccagctctgcttcagacccacctgcggtcctggggcmayggtcactgagcctgtccttttgcagaggaacctgccactcaagctgctcatcatgtcggccacgctgcgggtggaggacttcacccagaacccacggctcttcgccaagccgccgccggtcatcaaggtggaatccaggcagttcccagtgactgtgcatttcaacaagcggacaccgctggaagactacagtggcgagtgcttccrgaaggtctgcaagatccaccggatgctgcccgcaggtggcatcctggtgttcctgacggggcaggctgaggtgcatgcgctgtgccgcaggctcaggaaggctttcccaccctccagagcccggccacaaggtgagcagccggatgcctccctcccgctccacgtgctcccgctgtactctctgctggccccagagaagcaagcacaggtctttaagcctccaccggaggggactcggttgtgtgttgtggccaccaatgtggccgagacgtcgcttaccatccctggcatcaagtacgtggtggactgtgggaaggtcaagaaacgctactacgaccgcgtcactggygtatcctccttccgtgtcacctgggtctcccaggcatcagctgaccagcgagcgggcagagcaggacggacrgagcccggccactgctacaggctgtattcatctgcggtttttggtgacttcgagcagtttcctcctccagaaatcacccggaggcctgttgaagacttaatccttcaaatgaaggcgctcaacrttgaaaaggtcagttgctgcccccagccccgctctcagccaccccaggtgaagcaactgcaggagaaccggctgagctgccccatcactgcgctgggccggacaatggccacrttccccgtggcrccccgctacgctaagatgctggcactgagccgacaacacggctgcctgccctatgccatcaccatcgtggccagcatgacggtgcgggagctgtttgaggagctggacagaccagcggccagtgacgaggagctcaccaggctgaagagcaagcgkgcccgggtggcccagatgaagaggacctgggcagggcagggggcttctctgaagctcggcgacctcatggtgctgctgggcgccgtgggagcctgtgartatgccrgctgcacaccccagttttgcgaagccaacgggctgcggtacaaagccatgatggagatccggcgcctgcggggccagctgaccaccgcagtcaatgccgtgtgccccgaggctgagctcttcgtggatcccaagatgcagcckcccaccgagagccaggtgacctacctgcgacagatcgtgacggcrggcctgggggaccacttggcccgcagggtccagagcgaggagatgctggaggacaagtggaggaacgcctacaagacccctctcctcgacgaccctgtcttcatccaccccagctccgtccttttcaaagagctccccgagtttgtggtctaccaggaaatcgtggagaccactaagatgtacatgaaaggcgtctctagcgtggaggtccagtggatcccggccctgctgccctcttactgccagtttgacaagcccctggaggaaccagcccctacatactgccccgagcgggggcgggtgctgtgtcaccgggccagcgtgttctatcgcgtgggctggccgctccccgccatcgaggtggattttccagaggggattgaccgctacaagcactttgcycggttcctgctggaagggcaggtcttccgcaagctggcctcataccrgagctgtctgctgtccagccccggcaccatgctgaagacgtgggccaggctgcagccccgtacggagagccttctgcgagccctggttgcagagaaggctgactgccatgaagccttgctggctgcttggaagaaaaaccccaaatacctgctggctgagtactgtgagtggcttccacaggccatgcaccccgatatcgagaaagcctggccccccaccactgtccactgaccagaaacctggctgcagggccgaggactggtttggggactggagggctggcagcagcctgtcaccgtgcgaccgtgaccacctggcatgggcttcgtggcctgctctcaggaagtgggtcaagccctgggaaccctcatccatgagagctcgatcccgtatgaagggtgctgccgcccgtgccatctggcccgggggtgactttttgaactgtttattatatggtggatgatgatttcatctcacgtgctrgacgctgttctgttcagtgtgctctttggactacattagtcccctgtggagcagcagggctggagatctctgcagtcccttccccgcccgccctgccagaaggccraggaggcacgtggagggcctccttcctgcaattcttccctctccagagtcagggagggctrcccagccctggcctcacagccgtcccagatgttaggtgagccacygagctctgtgttgaccttgaggggcctggctgggggcccccaggctccatgccttcttgggagggtggccgccaaygcctttcctgtgttatggcaacagggagtgggcatctcatctgcctgtggtcagctctcagacggcagggagcggagctgacgttggctgtgcttggtcaccgctgccatgccgcagaggatgcgcctagctgggctggggccacacgactattatgttggccttgaacggggactgcagagccctcagtttgtctcccttgttcctctgtggctgaggtgggagsgggagggtggggtaggtcccccagcaagaaagagggacaggagcaccccaggcaggaccaaggagtcgggaggcccctgccttctgtcctccatggtgagggcacagatgtctccccagagcccagcgctggcagaatggattytgctcctggctttgcttctgcggcttcggtggagacagttatggaataaaatgttccttgc

SEQ ID NO: 1902 - DNA, 3472 bp, Homo sapiens
tctcacggccggagttggtggtactgggaacccacgtgggctgggtttcggagacaaggacacgttgaagggagttgatgcaagcaacgcgctcgttctaccggggaagaagaaaaagaagaccaaagcccctcccctgtcgaagaaggagaagaagcctctgaccaagaaggagaagaaagtgctgcagaaaatcttagaacagaaggagaaaaagagccagcgagcagagatrctacagaagctgagtgaagtccaggcttccgaagctgagatgagactcttttataccacttccaagctaggcactgggaaccgcatgtatcacaccaaagagaaggctgacgaggtggtagccccgggccaggagaagatcagtagcctcagcggtgcccaccggaagcgtcgccgctggccctcagctgaggaggaggaggaggaggaggaggagtcggaatcggagctggaggaggagtcggagctggacgaggacccagctgctgagccggctgaggctggtgtggggaccaccgtggcacctctgccgccagctccagcacccagcagtcagcccgtgccggctgggatgactgttcctcctcctccagctgcagccccaccactgcccagggccctggctaagcccgccgtcttcatccccgtgaaccgctccccggaaatgcaggaggaacggctgaagctcccaattctctccgaagaacaagtaatcatggaggctgtggccragcaccccatcgtcatcgtgtgtggtgagaccggcagcgggaagaccacacaggtgcctcagtttctctatgaagcaggcttcagcagtgaagacagcatcatcggtgtcacggagccccgccgagtggccgccgtggccatgtcccagcgagtggccaaggagatgaatctgtcccagcgggtcgtctcctaccagatccggtatgaaggaaacgtgacagaggagaccagaatcaagttcatgacggatggtgtgctgcttaaagaaatccagaaggacttcctgctgctgcggtacaaggtggtgatcatcgacgaggcccacgagaggagcgtgtacacggacatcctcatcggcctcctgtcccgcattgtgactctccgggctaagaggaacctgccactcaagctgctcatcatgtcggccacgctgcgggtggaggacttcacccagaacccacggctcttcgccaagccgccgccggtcatcaaggtggaatccaggcagttcccagtgactgtgcatttcaacaagcggacaccgctggaagactacagtggcgagtgcttccrgaaggtctgcaagatccaccggatgctgcccgcaggtggcatcctggtgttcctgacggggcaggctgaggtgcatgcgctgtgccgcaggctcaggaaggctttcccaccctccagagcccggccacaagaaaaggacgacgatcagaamgactcggtggaggaaatgcggaagtttaagaagtcaagggccagggccaagaaggcgcgggctgaggtgctgccccagatcaacttggatcattactcggtgttaccggcaggcgaaggcgatgaggacagggaggcagaagtggatgaggaagagggggccctggactccgacctcgatctggacctgggggatggcgggcaagatggaggtgagcagccggatgcctccctcccgctccacgtgctcccgctgtactctctgctggccccagagaagcaagcacaggtctttaagcctccaccggaggggactcggttgtgtgttgtggccaccaatgtggccgagacgtcgcttaccatccctggcatcaagtacgtggtggactgtgggaaggtcaagaaacgctactacgaccgcgtcactggygtatcctccttccgtgtcacctgggtctcccaggcatcagctgaccagcgagcgggcagagcaggacggacrgagcccggccactgctacaggctgtattcatctgcggtttttggtgacttcgagcagtttcctcctccagaaatcacccggaggcctgttgaagacttaatccttcaaatgaaggcgctcaacrttgaaaaggtcatcaacttccccttcccgacgcccccctccgtggaagcccttcttgccgccgaggagctgttgatcgcactgggtgccctgcaaccgccccagaaagcagaaagggtgaagcaactgcaggagaaccggctgagctgccccatcactgcgctgggccggacaatggccacrttccccgtggcrccccgctacgctaagatgctggcactgagccgacaacacggctgcctgccctatgccatcaccatcgtggccagcatgacggtgcgggagctgtttgaggagctggacagaccagcggccagtgacgaggagctcaccaggctgaagagcaagcgkgcccgggtggcccagatgaagaggacctgggcagggcagggggcttctctgaagctcggcgacctcatggtgctgctgggcgccgtgggagcctgtgartatgccrgctgcacaccccagttttgcgaagccaacgggctgcggtacaaagccatgatggagatccggcgcctgcggggccagctgaccaccgcagtcaatgccgtgtgccccgaggctgagctcttcgtggatcccaagatgcagcckcccaccgagagccaggtgacctacctgcgacagatcgtgacggcrggcctgggggaccacttggcccgcagggtccagagcgaggagatgctggaggacaagtggaggaacgcctacaagacccctctcctcgacgaccctgtcttcatccaccccagctccgtccttttcaaagagctccccgagtttgtggtctaccaggaaatcgtggagaccactaagatgtacatgaaaggcgtctctagcgtggaggtccagtggatcccggccctgctgccctcttactgccagtttgacaagcccctggaggaaccagcccctacatactgccccgagcgggggcgggtgctgtgtcaccgggccagcgtgttctatcgcgtgggctggccgctccccgccatcgaggtggattttccagaggggattgaccgctacaagcactttgcycggttcctgctggaagggcaggtcttccgcaagctggcctcataccrgagctgtctgctgtccagccccggcaccatgctgaagacgtgggccaggctgcagccccgtacggagagccttctgcgagccctggttgcagagaaggctgactgccatgaagccttgctggctgcttggaagaaaaaccccaaatgtgagtttgacyagggccagggggtggragtagacaggatggggtcactgaggcaggggctttgtgctttgtgcacggtcagccctggcttggcagaaggatctggccccacggctgctggccagctttttgccacc

SEQ ID NO: 1903 - DNA, 1057 bp, Homo sapiens
acctgctggctgagtactgtgagtggcttccacaggccatgcaccccgatatcgagaaagcctggccccccaccactgtccactgaccagaaacctggctgcagggccgaggactggtttggggactggagggctggcagcagcctgtcaccgtgcgaccgtgaccacctggcatgggcttcgtggcctgctctcaggaagtgggtcaagccctgggaaccctcatccatgagagctcgatcccgtatgaagggtgctgccgcccgtgccatctggcccgggggtgactttttgaactgtttattatatggtggatgatgatttcatctcacgtgctrgacgctgttctgttcagtgtgctctttggactacattagtcccctgtggagcagcagggctggagatctctgcagtcccttccccgcccgccctgccagaaggccraggaggcacgtggagggcctccttcctgcaattcttccctctccagagtcagggagggctrcccagccctggcctcacagccgtcccagatgttaggtgagccacygagctctgtgttgaccttgaggggcctggctgggggcccccaggctccatgccttcttgggagggtggccgccaaygcctttcctgtgttatggcaacagggagtgggcatctcatctgcctgtggtcagctctcagacggcagggagcggagctgacgttggctgtgcttggtcaccgctgccatgccgcagaggatgcgcctagctgggctggggccacacgactattatgttggccttgaacggggactgcagagccctcagtttgtctcccttgttcctctgtggctgaggtgggagsgggagggtggggtaggtcccccagcaagaaagagggacaggagcaccccaggcaggaccaaggagtcgggaggcccctgccttctgtcctccatggtgagggcacagatgtctccccagagcccagcgctggcagaatggattytgctcctggctttgcttctgcggcttcggtggagacagttatggaataaaatgttccttgc

SEQ ID NO: 1904 - DNA, 4392 bp, Homo sapiens
tctcacggccggagttggtggtactgggaacccacgtgggctgggtttcggagacaaggacacgttgaagggagttgatgcaagcaacgcgctcgttctaccggggaagaagaaaaagaagaccaaagcccctcccctgtcgaagaaggagaagaagcctctgaccaagaaggagaagaaagtgctgcagaaaatcttagaacagaaggagaaaaagagccagcgagcagagatrctacagaagctgagtgaagtccaggcttccgaagctgagatgagactcttttataccacttccaagctaggcactgggaaccgcatgtatcacaccaaagagaaggctgacgaggtggtagccccgggccaggagaagatcagtagcctcagcggtgcccaccggaagcgtcgccgctggccctcagctgaggaggaggaggaggaggaggaggagtcggaatcggagctggaggaggagtcggagctggacgaggacccagctgctgagccggctgaggctggtgtggggaccaccgtggcacctctgccgccagctccagcacccagcagtcagcccgtgccggctgggatgactgttcctcctcctccagctgcagccccaccactgcccagggccctggctaagcccgccgtcttcatccccgtgaaccgctccccggaaatgcaggaggaacggctgaagctcccaattctctccgaagaacaagtaatcatggaggctgtggccragcaccccatcgtcatcgtgtgtggtgagaccggcagcgggaagaccacacaggtgcctcagtttctctatgaagcaggcttcagcagtgaagacagcatcatcggtgtcacggagccccgccgagtggccgccgtggccatgtcccagcgagtggccaaggagatgaatctgtcccagcgggtcgtctcctaccagatccggtatgaaggaaacgtgacagaggagaccagaatcaagttcatgacggatggtgtgctgcttaaagaaatccagaaggacttcctgctgctgcggtacaaggtggtgatcatcgacgaggcccacgagaggagcgtgtacacggacatcctcatcggcctcctgtcccgcattgtgactctccgggctaagaggaacctgccactcaagctgctcatcatgtcggccacgctgcgggtggaggacttcacccagaacccacggctcttcgccaagccgccgccggtcatcaaggtggaatccaggcagttcccagtgactgtgcatttcaacaagcggacaccgctggaagactacagtggcgagtgcttccrgaaggtctgcaagatccaccggatgctgcccgcaggtggcatcctggtgttcctgacggggcaggctgaggtgcatgcgctgtgccgcaggctcaggaaggctttcccaccctccagagcccggccacaagaaaaggacgacgatcagaamgactcggtggaggaaatgcggaagtttaagaagtcaagggccagggccaagaaggcgcgggctgaggtgctgccccagatcaacttggatcattactcggtgttaccggcaggcgaaggcgatgaggacagggaggcagaagtggatgaggaagagggggccctggactccgacctcgatctggacctgggggatggcgggcaagatggaggtgagcagccggatgcctccctcccgctccacgtgctcccgctgtactctctgctggccccagagaagcaagcacaggtctttaagcctccaccggaggggactcggttgtgtgttgtggccaccaatgtggccgagacgtcgcttaccatccctggcatcaagtacgtggtggactgtgggaaggtcaagaaacgctactacgaccgcgtcactggygtatcctccttccgtgtcacctgggtctcccaggcatcagctgaccagcgagcgggcagagcaggacggacrgagcccggccactgctacaggctgtattcatctgcggtttttggtgacttcgagcagtttcctcctccagaaatcacccggaggcctgttgaagacttaatccttcaaatgaaggcgctcaacrttgaaaaggtcatcaacttccccttcccgacgcccccctccgtggaagcccttcttgccgccgaggagctgttgatcgcactgggtgccctgcaaccgccccagaaagcagaaagggtgaagcaactgcaggagaaccggctgagctgccccatcactgcgctgggccggacaatggccacrttccccgtggcrccccgctacgctaagatgctggcactgagccgacaacacggctgcctgccctatgccatcaccatcgtggccagcatgacggtgcgggagctgtttgaggagctggacagaccagcggccagtgacgaggagctcaccaggctgaagagcaagcgkgcccgggtggcccagatgaagaggacctgggcagggcagggggcttctctgaagctcggcgacctcatggtgctgctgggcgccgtgggagcctgtgartatgccrgctgcacaccccagttttgcgaagccaacgggctgcggtacaaagccatgatggagatccggcgcctgcggggccagctgaccaccgcagtcaatgccgtgtgccccgaggctgagctcttcgtggatcccaagatgcagcckcccaccgagagccaggtgacctacctgcgacagatcgtgacggcrggcctgggggaccacttggcccgcagggtccagagcgaggagatgctggaggacaagtggaggaacgcctacaagacccctctcctcgacgaccctgtcttcatccaccccagctccgtccttttcaaagagctccccgagtttgtggtctaccaggaaatcgtggagaccactaagatgtacatgaaaggcgtctctagcgtggaggtccagtggatcccggccctgctgccctcttactgccagtttgacaagcccctggaggaaccagcccctacatactgccccgagcgggggcgggtgctgtgtcaccgggccagcgtgttctatcgcgtgggctggccgctccccgccatcgaggtggattttccagaggggattgaccgctacaagcactttgcycggttcctgctggaagggcaggtcttccgcaagctggcctcataccrgagctgtctgctgtccagccccggcaccatgctgaagacgtgggccaggctgcagccccgtacggagagccttctgcgagccctggttgcagagaaggctgactgccatgaagccttgctggctgcttggaagaaaaaccccaaatacctgctggctgagtactgtgagtggcttccacaggccatgcaccccgatatcgagaaagcctggccccccaccactgtccactgaccagaaacctggctgcagggccgaggactggtttggggactggagggctggcagcagcctgtcaccgtgcgaccgtgaccacctggcatgggcttcgtggcctgctctcaggaagtgggtcaagccctgggaaccctcatccatgagagctcgatcccgtatgaagggtgctgccgcccgtgccatctggcccgggggtgactttttgaactgtttattatatggtggatgatgatttcatctcacgtgctrgacgctgttctgttcagtgtgctctttggactacattagtcccctgtggagcagcagggctggagatctctgcagtcccttccccgcccgccctgccagaaggccraggaggcacgtggagggcctccttcctgcaattcttccctctccagagtcagggagggctrcccagccctggcctcacagccgtcccagatgttaggtgagccacygagctctgtgttgaccttgaggggcctggctgggggcccccaggctccatgccttcttgggagggtggccgccaaygcctttcctgtgttatggcaacagggagtgggcatctcatctgcctgtggtcagctctcagacggcagggagcggagctgacgttggctgtgcttggtcaccgctgccatgccgcagaggatgcgcctagctgggctggggccacacgactattatgttggccttgaacggggactgcagagccctcagtttgtctcccttgttcctctgtggctgaggtgggagsgggagggtggggtaggtcccccagcaagaaagagggacaggagcaccccaggcaggaccaaggagtcgggaggcccctgccttctgtcctccatggtgagggcacagatgtctccccagagcccagcgctggcagaatggattytgctcctggctttgcttctgcggcttcggtggagacagttatggaataaaatgttccttgc

SEQ ID NO: 1905 - DNA, 1592 bp, Homo sapiens
gttgccatggctrttgctggcacycttccttggtgagctggtctggtctccaaaaatgctctgggatcatctttcattgctgcaataaatgtccatggctctaacactcttcttcatgaatggcacggtggagatgtcctctatttttgaagagcatattgttagagataatacttctgctgaccttgaagagactcagcctgtcttaagtattggtggtggtattgcccaagtacatggactgacgaatgttcaagcagaagaagtagaagaattttcttcaggcttaaaggttatgtctctgaacttggaacctgaaaatgtttggaaatgacaaactgaaggaggagatattgtgaagaggacaggagccactgtagacattccagttggtaaggagctgttgggttgtgtagtagatactcttgatcatgtccttaattatgtgggtccagtgattccaaaacctatagacaagttggttagaaaaatcttggaattattcctcaaactttgttgcagaaactaagtagtctggcattaaggctttgggttgcttcgtgttagttagttgtggtccgtgtgaactgattattgacaaccgacagactggcaaaatttaaattgctattgacacaatcattatacactccaatgatctgatagaagaagccatattgtctctacattgcaacgagttaagagatsattttccagttggtgaagagacttacacatgtagatgtcatgaagtaagctattgtggttcagctgytatttctgatgttgccccacttcagtacctggcttcttattctggctgttctatgggagaatattttagagataatggcaaatgtacatttgccatctatgatgatctatccaaacaggctggtgattgctatcagatgtccctgctgctctgccgactccctgttgtgaggcctatcctggtgatatgtttcatttataatcctggctgttggagagggtagccaaaatgagtaattcctctggcagtagctccttgactgcttcaccggtcacagaaacacaagctggtaatatctgcttacatttcagcaaatggaatatccattgctgactaacagatcttcttagaaacagaatttctctacaaaagtacctgccctgtcattaatgttgttctgtgttctccattggatatgctgcccaaaccagggctgtaaagtaggaggcaggtactgtgaagctggaattggctcattattgtgaatgctgcttttgcccaatttgattctgactttaatgcagtcaaactcagcaactgtaaagctggtgtgtatctgcctaagttgctgatacaagcctggtattcttccatggctattgaaaacaagcagttgcaatctatactcatgtaagaaggctatcttgataaactggagcctagcaagatcacaaagtttgagaacgctttcttggcaaatgttatcagccaacaccaagccctgttcagcaatatcaaggctgatggaaagatcccttaacagtcaaatgcaaagctgatagagattataaccaacttcttggctggatttgaagct

SEQ ID NO: 1906 - DNA, 2462 bp, Homo sapiens
ggccgcgctgtggctgtttcaccgctccccggctgggacttggagtcccttatctttccctggtttggtacatgacccggaagcctcggctggccgttgcgtcatccatggcgccggcgcagagcgagaaggaggtgggaacgccgtgaagcaagagcggtcggcagagcggggaggcgaactgcagcagagttcttgctttccggcaggtgatggcgccccccgcggcctagaggtccagcgcccgccgcgagcagcggacagtcctcctgttgtgtccgaccgagagtcctggtgactttgaacatgctggtgccgctagccaagctgtcctgcctggcatatcagtgctttcatgccttaaaaattaagaaaaattatctacctctatgtgctayaagatggtcttcaacttctactgtgcctcgaattactacccattatactatttatccccgggataaggacaagagatgggaaggagtgaacatggaaaggtttgcagaagaagcagatgttgtaatagttggtgcaggccctgcagggctctctgcagctgttcgtctaaaacagttggctgtggcacrtgaaaaggacatccgtgtgtgtctagtggagaaagctgcccagataggagctcatactctctcaggggcttgccttgatccaggtgcttttaaagaactcttcccagactggaaagagaagggggctccacttaacactcctgtaacagaagacagatttggaattttaacagagaaatacagaattcctgtgccaattcttccagggcttccaatgaataatcatggcaattacattgtacgcttgggacatttagtgagctggatgggcgaacaagcagaagcccttggtgttgaagtataccctggttatgcagctgctgaggtcctttttcatgatgatggtagtgtaaaaggaattgccactaacgatgtagggatacaaaaggatggtgcaccaaaggcaacatttgagagaggactggaactacatgctaaagtcacaatttttgcagaaggttgccatggacatctagccaagcaactatataagaagtttgatttgagagcaaattgtgaacctcaaacctacgggattggactgaaggagttatgggttattgatgaaaagaactggaaacctgggagagtagatcacactgttggttggcccttggacagacatacctatggaggatctttcctctatcatttgaatgaaggtgaacccctagtagctcttggtcttgtggttggtctagactatcagaatccatacctgagtccatttagagagttccaaaggtggaaacaccatcctagcattcggccaaccttggaaggtggaaaaaggattgcatacggagccagagctctcaatgaaggtggctttcagtctataccaaaactcacctttcctggtggtttactaattggttgtagtcctggttttatgaatgttcccaagatcaaaggtactcacacagcaatgaaaagtggaattttagcagcagaatctatttttaatcaactaactagtgaaaatctccaatcaaagacaataggactccatgtaactgaatatgaggacaatttgaagaactcatgggtatggaaagagctatattctgttagaaatataagaccgtcctgccacggagtactgggtgtatatggagggatgatttacactggaatcttttactggatattgagaggaatggagccgtggactctgaaacataaaggttctgactttgaacggctcaagccagccaaggattgcacacctattgagtatccaaaacccgatggacagatcagttttgacctcttgtcatctgtggctctgagtggtactaatcatgaacatgaccagccggcacacttaaccttaagggatgacagtatacctgtaaatagaaatctgtcgatatatgatgggcccgagcagcgattctgtcctgcaggagtttatgaatttgtacctgtggaacaaggtgatggatttcggttacagataaatgctcagaactgtgtacattgtaaaacatgtgatattaaagatccaagtcagaatattaactgggtggtacctgaaggtggaggaggacctgcttacaatggaatgtaaactgcagctagccagtttctttcaagtatggcaagctaacgttaaaatgtttagagattaacagatttcagaatgtctttctgcatattactgaacagaatagtcacaaaatgattatcaaataaaaattttatmctatatgtaagattgtcccataaagaaattacgggtattgcttttaaataacctttataagaatgcagcatcttcctacctcttcagttcttcagagattcagtaccaagagcaaaattcactactggactttacatttgacttgccaaagttaagtaatcaaatat

SEQ ID NO: 1907 - DNA, 1170 bp, Homo sapiens
ggccagtctttcccatgctgttctcgtgatagtaagtctcacaagatctgatgggtttatcaggcttttctgcgtttgcttcttcctcattctttcttgctgccaccatgtaagaagtgccttttgccctccaccatgattatgagacctcccagccgtgtggaactgagtgattggggcagatgtgagagggcacggcctcatctgtgaggggcagccagtgaygtcacggctggctgtcatctgtggaacgtcttcttgtcacatggggatcagcaaagacccgatttttgtaccaggcgtctgggggccttatttctcagccatggtacctgggttctggctgmatgaaggtggtcagagcgttactggaaaattgatagaccacatggtacaaggccatgctgcttttccagaactacaagtaaaggccacagccagatgccagagtatatatgcatatttgaacagtcacctggatctgattaagaaggctcagcctgtgggtttccttactgttgatttacatgtttggccagatttccatggcaaccggtctcccttagcagatctgacactaaagggcatggtcaccggattgaaactgtctcaggaccttgatgatcttgccattctctacctggccacagttcaagccattgctttggggactcgcttcattatagaagccatggaggcagcagggcactcaatcagtactcttttcctatgtggaggcctcagcaagaatcccctttttgtgcaaatgcatgcggacattactggcatgcctgtggtcctgtcgcaagaggtggagtccgttcttgtgggtgctgctgttctggktgcctgtgcctcaggggatttcgcttctgtacaggaagcaatggcaaaaatgagcaaagttgggaaagttgtgttcccgagactacaggataaaaaatactatgataagaaataccaagtattcctgaagctggttgaacaccagaaggagtatttggcgatcatgaatgatgactgaacagggcttgcaggtgctgatgccagaagcttctgtgccattgcattaaagacttgtcatttgatccatgttcaagacccttgaggtattgtttcatcatttctgtattgtctttcaataaagaaaacaaacatgtgcaaccagaa

SEQ ID NO: 1908 - DNA, 1003 bp, Homo sapiens
gagtgattggggcagatgtgagagggcacggcctcatctgtgaggggcagccagtgaygtcacggctggctgtcatctgtggaacgtcttcttgtcacatggggatcagcaaagacccgatttttgtaccaggcgtctgggggccttatttctcagccatggtacctgggttctggctgmatgaaggtggtcagagcgttactggaaaattgatagaccacatggtacaaggccatgctgcttttccagaactacaagtaaaggccacagccagatgccagagtatatatgcatatttgaacagtcacctggatctgattaagaaggctcagcctgtgggtttccttactgttgatttacatgtttggccagatttccatggcaaccggtctcccttagcagatctgacactaaagggcatggtcaccggattgaaactgtctcaggaccttgatgatcttgccattctctacctggccacagttcaagccattgctttggggactcgcttcattatagaagccatggaggcagcagggcactcaatcagtactcttttcctatgtggaggcctcagcaagaatcccctttttgtgcaaatgcatgcggacattactggcatgcctgtggtcctgtcgcaagaggtggagtccgttcttgtgggtgctgctgttctggktgcctgtgcctcaggggatttcgcttctgtacaggaagcaatggcaaaaatgagcaaagttgggaaagttgtgttcccgagactacaggataaaaaatactatgataagaaataccaagtattcctgaagctggttgaacaccagaaggagtatttggcgatcatgaatgatgactgaacagggcttgcaggtgctgatgccagaagcttctgtgccattgcattaaagacttgtcatttgatccatgttcaagacccttgaggtattgtttcatcatttctgtattgtctttcaataaagaaaacaaacatgtgcaaccagaa

SEQ ID NO: 1909 - DNA, 1921 bp, Homo sapiens
cagcctgagcagacgcagcgtagccgatcttgggtggaggaactgcaatgtctggtggagaacagaaaccagagaggtactatgtgggtgtggacgttggaacaggcagtgtccgtgcagctctggtggaccagagtggggtcctgttggcttttgcagaccagccaattaagaaktgggagccccagttcaaccaccatgagcagtcctccgaggacatctgggctgcgtgctgtgttgtcacaaagaaagttgtacaagggattgatttaaaccaaattcgaggacttgggtttgatgccacgtgttctctggttgttttggataagcagtttcacccattaccagtcaaccaggaaggggattcccatcgaaacgtcatcatgtggctggaccatcgagcagtcagtcaagttaacaggatcaatgagaccaagcacagtgtcctccagtacgtcgggggggtgatgtctgtggaaatgcaggccccgaaacttctgtggctgaaagagaacttgagagagatttgctgggataaggcgggacatttctttgatctcccrgacttcttatcgtggaaggcaacaggtgtcacagcacggtctctctgctccctgrtgtgtaagtggacatattcagcagagaaaggctgggacgacagtttctggaaaatgattggtttggaagactttgttgcagataattacagcaaaataggaaaccaagtgctacctcctggagcttctcttggaaatgggctcacaccagaggcagcaagagacsttggccttctccctgggattgcggtcgcagcttcactcattgatgcccatgcaggaggactaggagtgattggggcagatgtgagagggcacggcctcatctgtgaggggcagccagtgaygtcacggctggctgtcatctgtggaacgtcttcttgtcacatggggatcagcaaagacccgatttttgtaccaggcgtctgggggccttatttctcagccatggtacctgggttctggctgmatgaaggtggtcagagcgttactggaaaattgatagaccacatggtacaaggccatgctgcttttccagaactacaagtaaaggccacagccagatgccagagtatatatgcatatttgaacagtcacctggatctgattaagaaggctcagcctgtgggtttccttactgttgatttacatgtttggccagatttccatggcaaccggtctcccttagcagatctgacactaaagggcatgagaaccactggatatctgtatattccggctttggcagcgttgcactctcccagttctctactctcccctcaggtcaccggattgaaactgtctcaggaccttgatgatcttgccattctctacctggccacagttcaagccattgctttggggactcgcttcattatagaagccatggaggcagcagggcactcaatcagtactcttttcctatgtggaggcctcagcaagaatcccctttttgtgcaaatgcatgcggacattactggcatgcctgtggtcctgtcgcaagaggtggagtccgttcttgtgggtgctgctgttctggktgcctgtgcctcaggggatttcgcttctgtacaggaagcaatggcaaaaatgagcaaagttgggaaagttgtgttcccgagactacaggataaaaaatactatgataagaaataccaagtattcctgaagctggttgaacaccagaaggagtatttggcgatcatgaatgatgactgaacagggcttgcaggtgctgatgccagaagcttctgtgccattgcattaaagacttgtcatttgatccatgttcaagacccttgaggtattgtttcatcatttctgtattgtctttcaataaagaaaacaaacatgtgcaaccagaa

SEQ ID NO: 1910 - DNA, 1547 bp, Homo sapiens
gcgcggctacgtgcagaatccgtctagctaaaatgtaatttcagattggacaagtactgggattcccatcgaaacgtcatcatgtggctggaccatcgagcagtcagtcaagttaacaggatcaatgagaccaagcacagtgtcctccagtacgtcgggggggtgatgtctgtggaaatgcaggccccgaaacttctgtggctgaaagagaacttgagagagatttgctgggataaggcgggacatttctttgatctcccrgacttcttatcgtggaaggcaacaggtgtcacagcacggtctctctgctccctgrtgtgtaagtggacatattcagcagagaaaggctgggacgacagtttctggaaaatgattggtttggaagactttgttgcagataattacagcaaaataggaaaccaagtgctacctcctggagcttctcttggaaatgggctcacaccagaggcagcaagagacsttggccttctccctgggattgcggtcgcagcttcactcattgatgcccatgcaggaggactaggagtgattggggcagatgtgagagggcacggcctcatctgtgaggggcagccagtgaygtcacggctggctgtcatctgtggaacgtcttcttgtcacatggggatcagcaaagacccgatttttgtaccaggcgtctgggggccttatttctcagccatggtacctgggttctggctgmatgaaggtggtcagagcgttactggaaaattgatagaccacatggtacaaggccatgctgcttttccagaactacaagtaaaggccacagccagatgccagagtatatatgcatatttgaacagtcacctggatctgattaagaaggctcagcctgtgggtttccttactgttgatttacatgtttggccagatttccatggcaaccggtctcccttagcagatctgacactaaagggcatggtcaccggattgaaactgtctcaggaccttgatgatcttgccattctctacctggccacagttcaagccattgctttggggactcgcttcattatagaagccatggaggcagcagggcactcaatcagtactcttttcctatgtggaggcctcagcaagaatcccctttttgtgcaaatgcatgcggacattactggcatgcctgtggtcctgtcgcaagaggtggagtccgttcttgtgggtgctgctgttctggktgcctgtgcctcaggggatttcgcttctgtacaggaagcaatggcaaaaatgagcaaagttgggaaagttgtgttcccgagactacaggataaaaaatactatgataagaaataccaagtattcctgaagctggttgaacaccagaaggagtatttggcgatcatgaatgatgactgaacagggcttgcaggtgctgatgccagaagcttctgtgccattgcattaaagacttgtcatttgatccatgttcaagacccttgaggtattgtttcatcatttctgtattgtctttcaataaagaaaacaaacatgtgcaaccagaa

SEQ ID NO: 1911 - DNA, 1849 bp, Homo sapiens
cagcctgagcagacgcagcgtagccgatcttgggtggaggaactgcaatgtctggtggagaacagaaaccagagaggtactatgtgggtgtggacgttggaacaggcagtgtccgtgcagctctggtggaccagagtggggtcctgttggcttttgcagaccagccaattaagaaktgggagccccagttcaaccaccatgagcagtcctccgaggacatctgggctgcgtgctgtgttgtcacaaagaaagttgtacaagggattgatttaaaccaaattcgaggacttgggtttgatgccacgtgttctctggttgttttggataagcagtttcacccattaccagtcaaccaggaaggggattcccatcgaaacgtcatcatgtggctggaccatcgagcagtcagtcaagttaacaggatcaatgagaccaagcacagtgtcctccagtacgtcgggggggtgatgtctgtggaaatgcaggccccgaaacttctgtggctgaaagagaacttgagagagatttgctgggataaggcgggacatttctttgatctcccrgacttcttatcgtggaaggcaacaggtgtcacagcacggtctctctgctccctgrtgtgtaagtggacatattcagcagagaaaggctgggacgacagtttctggaaaatgattggtttggaagactttgttgcagataattacagcaaaataggaaaccaagtgctacctcctggagcttctcttggaaatgggctcacaccagaggcagcaagagacsttggccttctccctgggattgcggtcgcagcttcactcattgatgcccatgcaggaggactaggagtgattggggcagatgtgagagggcacggcctcatctgtgaggggcagccagtgaygtcacggctggctgtcatctgtggaacgtcttcttgtcacatggggatcagcaaagacccgatttttgtaccaggcgtctgggggccttatttctcagccatggtacctgggttctggctgmatgaaggtggtcagagcgttactggaaaattgatagaccacatggtacaaggccatgctgcttttccagaactacaagtaaaggccacagccagatgccagagtatatatgcatatttgaacagtcacctggatctgattaagaaggctcagcctgtgggtttccttactgttgatttacatgtttggccagatttccatggcaaccggtctcccttagcagatctgacactaaagggcatggtcaccggattgaaactgtctcaggaccttgatgatcttgccattctctacctggccacagttcaagccattgctttggggactcgcttcattatagaagccatggaggcagcagggcactcaatcagtactcttttcctatgtggaggcctcagcaagaatcccctttttgtgcaaatgcatgcggacattactggcatgcctgtggtcctgtcgcaagaggtggagtccgttcttgtgggtgctgctgttctggktgcctgtgcctcaggggatttcgcttctgtacaggaagcaatggcaaaaatgagcaaagttgggaaagttgtgttcccgagactacaggataaaaaatactatgataagaaataccaagtattcctgaagctggttgaacaccagaaggagtatttggcgatcatgaatgatgactgaacagggcttgcaggtgctgatgccagaagcttctgtgccattgcattaaagacttgtcatttgatccatgttcaagacccttgaggtattgtttcatcatttctgtattgtctttcaataaagaaaacaaacatgtgcaaccagaa

SEQ ID NO: 1912 - DNA, 1791 bp, Homo sapiens
agaaagaggcttctccaacccggcccggcccttccttcccctttcccgcagtcgttgcctcctcctcccctgcctcctcctccccttcctcctcctggccgcttagtctcacacccgccgggccgttgttcccgagacgttgttgagtcccctgtgtcctcttctgggtggaggaactgcaatgtctggtggagaacagaaaccagagaggtactatgtgggtgtggacgttggaacaggcagtgtccgtgcagctctggtggaccagagtggggtcctgttggcttttgcagaccagccaattaagaaktgggagccccagttcaaccaccatgagcagtcctccgaggacatctgggctgcgtgctgtgttgtcacaaagaacttgagagagatttgctgggataaggcgggacatttctttgatctcccrgacttcttatcgtggaaggcaacaggtgtcacagcacggtctctctgctccctgrtgtgtaagtggacatattcagcagagaaaggctgggacgacagtttctggaaaatgattggtttggaagactttgttgcagataattacagcaaaataggaaaccaagtgctacctcctggagcttctcttggaaatgggctcacaccagaggcagcaagagacsttggccttctccctgggattgcggtcgcagcttcactcattgatgcccatgcaggaggactaggagtgattggggcagatgtgagagggcacggcctcatctgtgaggggcagccagtgaygtcacggctggctgtcatctgtggaacgtcttcttgtcacatggggatcagcaaagacccgatttttgtaccaggcgtctgggggccttatttctcagccatggtacctgggttctggctgmatgaaggtggtcagagcgttactggaaaattgatagaccacatggtacaaggccatgctgcttttccagaactacaagtaaaggccacagccagatgccagagtatatatgcatatttgaacagtcacctggatctgattaagaaggctcagcctgtgggtttccttactgttgatttacatgtttggccagatttccatggcaaccggtctcccttagcagatctgacactaaagggcatgagaaccactggatatctgtatattccggctttggcagcgttgcactctcccagttctctactctcccctcaggtcaccggattgaaactgtctcaggaccttgatgatcttgccattctctacctggccacagttcaagccattgctttggggactcgcttcattatagaagccatggaggcagcagggcactcaatcagtactcttttcctatgtggaggcctcagcaagaatcccctttttgtgcaaatgcatgcggacattactggcatgcctgtggtcctgtcgcaagaggtggagtccgttcttgtgggtgctgctgttctggktgcctgtgcctcaggggatttcgcttctgtacaggaagcaatggcaaaaatgagcaaagttgggaaagttgtgttcccgagactacaggataaaaaatactatgataagaaataccaagtattcctgaagctggttgaacaccagaaggagtatttggcgatcatgaatgatgactgaacagggcttgcaggtgctgatgccagaagcttctgtgccattgcattaaagacttgtcatttgatccatgttcaagacccttgaggtattgtttcatcatttctgtattgtctttcaataaagaaaacaaacatgtgcaaccagaa

SEQ ID NO: 1913 - DNA, 1644 bp, Homo sapiens
gttgttcccgagacgttgttgagtcccctgtgtcctcttctggaaagttgtacaagggattgatttaaaccaaattcgaggacttgggtttgatgccacgtgttctctggttgttttggataagcagtttcacccattaccagtcaaccaggaaggggattcccatcgaaacgtcatcatgtggctggaccatcgagcagtcagtcaagttaacaggatcaatgagaccaagcacagtgtcctccagtacgtcgggggggtgatgtctgtggaaatgcaggccccgaaacttctgtggctgaaagagaacttgagagagatttgctgggataaggcgggacatttctttgatctcccrgacttcttatcgtggaaggcaacaggtgtcacagcacggtctctctgctccctgrtgtgtaagtggacatattcagcagagaaaggctgggacgacagtttctggaaaatgattggtttggaagactttgttgcagataattacagcaaaataggaaaccaagtgctacctcctggagcttctcttggaaatgggctcacaccagaggcagcaagagacsttggccttctccctgggattgcggtcgcagcttcactcattgatgcccatgcaggaggactaggagtgattggggcagatgtgagagggcacggcctcatctgtgaggggcagccagtgaygtcacggctggctgtcatctgtggaacgtcttcttgtcacatggggatcagcaaagacccgatttttgtaccaggcgtctgggggccttatttctcagccatggtacctgggttctggctgmatgaaggtggtcagagcgttactggaaaattgatagaccacatggtacaaggccatgctgcttttccagaactacaagtaaaggccacagccagatgccagagtatatatgcatatttgaacagtcacctggatctgattaagaaggctcagcctgtgggtttccttactgttgatttacatgtttggccagatttccatggcaaccggtctcccttagcagatctgacactaaagggcatggtcaccggattgaaactgtctcaggaccttgatgatcttgccattctctacctggccacagttcaagccattgctttggggactcgcttcattatagaagccatggaggcagcagggcactcaatcagtactcttttcctatgtggaggcctcagcaagaatcccctttttgtgcaaatgcatgcggacattactggcatgcctgtggtcctgtcgcaagaggtggagtccgttcttgtgggtgctgctgttctggktgcctgtgcctcaggggatttcgcttctgtacaggaagcaatggcaaaaatgagcaaagttgggaaagttgtgttcccgagactacaggataaaaaatactatgataagaaataccaagtattcctgaagctggttgaacaccagaaggagtatttggcgatcatgaatgatgactgaacagggcttgcaggtgctgatgccagaagcttctgtgccattgcattaaagacttgtcatttgatccatgttcaagacccttgaggtattgtttcatcatttctgtattgtctttcaataaagaaaacaaacatgtgcaaccagaa

SEQ ID NO: 1914 - DNA, 2111 bp, Homo sapiens
ggcgcaaaaagaaaacctcactagtcagcttcgcacgtgctctgcgcaggggctcctgcgaggccctagtccctccctgggagctaagagcaggacggaggctgtacctgactgctgcttggagggaaccctggctgagtccagggaggaggagccagaggaggggccgattggaagcagccacctcagcgaagctgcaggatttccgcagggcgggagctgtttatctcccggaagaaaacggctcctgtcacagaagtctcgtgattgctctgggagctttgcttagacacttgaaactacaggagaaagaaggatctagcgaaatatggctacagagagccctgctacgcgtcgggtccaggtggcagaacatcctaggttactgaagctaaaggagatgtttaactccaagtttggatctattcccaagttttatgttcgagcaccaggaagagtcaacataataggagagcatrtagattattgtggatattctgttcttcctatggctgtagaacaagatgtgctaatagctgtagaacctgtgaaaacgtacgctctccaactggccaatacaaatcccttgtatccggacttcagtactagtgctaataacatccagattgataaaaccaagcctttgtggcacaactatttcttatgtggacttaaaggaattcaggaacactttggtcttagtaacctgactggaatgaactgcctggtagatggaaatatcccaccaagttctggcctctccagctccagtgctttggtctgttgtgctggcttggtgacgctcacagtgctgggaaggaatctatccaaggtggaacttgcagaaatctgtgccaagagtgagcgttacrttggcactgaaggaggaggcatggaccagtctatatcatttcttgcagaagaaggaactgccaagttgatagaatttagtcctctgagggcaaccgatgtaaaactcccaagtggagcagtgtttgtgattgccaacagttgtgtggagatgaataaggcagcaacttcccatttcaatatcagggtgatggagtgtcggctggctgcgaagctcctggctaaatacaaaagcttgcaatgggacaaagtactgaggctggaggaggtgcaggctaaactagggattagtctagaagaaatgctgttggtcacagaagatgcccttcatcctgaaccctataaccctgaggagatctgcaggtgtctgggaattagcctggaggaactccgaacccaaatcctgagtccaaacactcaagatgtgctcatcttcaaactctatcagcgggcaaagcatgtgtacagcgaggctgcgcgagtgctccagtttaagaagatatgtgaagaagcacctgaaaacatggtccagctgctgggagagttgatgaaccagagccacatgagctgccgggacatgtatgagtgcagctgccccgagctggatcagctggtggacatctgtcggaagtttggggctcaagggtcacgacttactggagcaggatggggaggctgyacagtatcaatggtacctgcggacaagctgcccagctttctagcaaatgtgcacaaagcttattaccagaggagtgatggaagcttagcaccggagaagcaaagtttgtttgctaccaaacctggaggyggggctttggttttgcttgaggcctgaaaaaatgtaaaaagtctgagagaaactacttagggcacttaggaattggcaggactttctgtgccacagtaaattaatcttccttctgttttgtattatgatgaacggttgctattatatcaagatatattttcaaagaaatggttgaaagctctctatgcttcataatgattctttttccatcttaaaatatggttttactattaagagccaagatcatgcttggacagatcttttaagaataacttactgagatttattgatttgaagattttaaagatgaatggtaaaacacactcttaatactgattacatggattggacttgaattaaatatattgttacaattaaactgataccactgaattgtatgcattattcttgaatagagttcatttctggtttc

SEQ ID NO: 1915 - DNA, 2481 bp, Homo sapiens
atggtcaccgaggcggctagcgcggtggggaggcagaagacagagaaccgaacgcctgggaccaggggcatccgtgtaaaccgaagaggcgctcagactcggagggcaaggcccggggcccccttcgctgcctcctttgccctcccttcccccatgctggagaagcagggcccgggcccggtgcgggaacggggaggagtggttggtgccttagcaactaaagctggcaactgggamatcgtccggtgctgcaggtctcagccgaagggcgtcggaaactgcgctcgcatcgagcagtttccagcctcctgggtaaaggagcagtctcctcccttgcttgggactctggacgcatctcattccggtgaaaggcgcaaaaagaaaacctcactagtcagcttcgcacgtgctctgcgcaggggctcctgcgaggccctagtccctccctgggagctaagagcaggacggaggctgtacctgactgctgcttggagggaaccctggctgagtccagggaggaggagccagaggaggggccgattggaagcagccacctcagcgaagctgcaggatttccgcagggcgggagctgtttatctcccggaagaaaacggctcctgtcacagaagtctcgtgattgctctgggagctttgcttagacacttgaaactacaggagaaagaaggatctagcgaaatatggctacagagagccctgctacgcgtcgggtccaggtggcagaacatcctaggttactgaagctaaaggagatgtttaactccaagtttggatctattcccaagttttatgttcgagcaccaggaagagtcaacataataggagagcatrtagattattgtggatattctgttcttcctatggctgtagaacaagatgtgctaatagctgtagaacctgtgaaaacgtacgctctccaactggccaatacaaatcccttgtatccggacttcagtactagtgctaataacatccagattgataaaaccaagcctttgtggcacaactatttcttatgtggacttaaaggaattcaggaacactttggtcttagtaacctgactggaatgaactgcctggtagatggaaatatcccaccaagttctggcctctccagctccagtgctttggtctgttgtgctggcttggtgacgctcacagtgctgggaaggaatctatccaaggtggaacttgcagaaatctgtgccaagagtgagcgttacrttggcactgaaggaggaggcatggaccagtctatatcatttcttgcagaagaaggaactgccaagttgatagaatttagtcctctgagggcaaccgatgtaaaactcccaagtggagcagtgtttgtgattgccaacagttgtgtggagatgaataaggcagcaacttcccatttcaatatcagggtgatggagtgtcggctggctgcgaagctcctggctaaatacaaaagcttgcaatgggacaaagtactgaggctggaggaggtgcaggctaaactagggattagtctagaagaaatgctgttggtcacagaagatgcccttcatcctgaaccctataaccctgaggagatctgcaggtgtctgggaattagcctggaggaactccgaacccaaatcctgagtccaaacactcaagatgtgctcatcttcaaactctatcagcgggcaaagcatgtgtacagcgaggctgcgcgagtgctccagtttaagaagatatgtgaagaagcacctgaaaacatggtccagctgctgggagagttgatgaaccagagccacatgagctgccgggacatgtatgagtgcagctgccccgagctggatcagctggtggacatctgtcggaagtttggggctcaagggtcacgacttactggagcaggatggggaggctgyacagtatcaatggtacctgcggacaagctgcccagctttctagcaaatgtgcacaaagcttattaccagaggagtgatggaagcttagcaccggagaagcaaagtttgtttgctaccaaacctggaggyggggctttggttttgcttgaggcctgaaaaaatgtaaaaagtctgagagaaactacttagggcacttaggaattggcaggactttctgtgccacagtaaattaatcttccttctgttttgtattatgatgaacggttgctattatatcaagatatattttcaaagaaatggttgaaagctctctatgcttcataatgattctttttccatcttaaaatatggttttactattaagagccaagatcatgcttggacagatcttttaagaataacttactgagatttattgatttgaagattttaaagatgaatggtaaaacacactcttaatactgattacatggattggacttgaattaaatatattgttacaattaaactgataccactgaattgtatgcattattcttgaatagagttcatttctggtttc

SEQ ID NO: 1916 - DNA, 3766 bp, Homo sapiens
tgctcggattttttgcttggctacccggagtgaagcggccgggttgggcgattaacaggccgtggttaggaaggacggagaaggggcgttcgctcctttgggacttttcatgcctcgtttttttttcagatgtggcttggtctgggcgcaaggtcccagcagccagcttaagcttactcttctgtgaaaggggaaagtatcccctgtggaaagcggttaaacttgtggagggggtgcgggacgtgagttcttccccatgccaggcgaatggtgtggccttgagctggtccaggagccggctcgacgtgtctgagggaggccccggagggggcggggaggtggcccacagaacgcgggttctgtaaagagacgttgggaagattcgattccgagaagaggaagaaccggattgaaagagagccaggccgctgagggggagggggctgctaagatggcgtcggcctcctccgggccgtcgtcttcggtcggtttttcatcctttgatcccgcggtcccttcctgtaccttgtcctcagcatctggaatcaagagacccatggcatctgaggtgccttatgcctctggcatgcccatcaagaaaataggccatagaagtgttgattcctcaggagagacaacatataaaaagacaacctcatcagccttgaaaggtgccatccagttaggcattacccacactgtggggagcctgagtaccaaaccagagcgtgatgtcctcatgcaagatttctacgtggttgagagtatcttctttcccagtgaagggagcaacctgacccctgctcatcactacaatgactttcgtttcaagacctatgcacctgttgccttccgctacttccgggagctatttggtatccggcccgatgattacttgtattccctctgcagtgagccgctgattgaactctgtagctctggagctagtggttccctattctatgtgtccagcgacgatgagttcattattaagacagtccaacataaagaggcggaatttctgcagaagctgcttccaggatactacatgaacctcaaccagaaccctcggactttgctgcctaaattctatggactgtactgtgtgcaggcaggtggcaagaacattcggattgtggtgatgaacaatcttttaccaagatcggtaaaaatgcatatcaaatatgacctcaaaggctcaacctacaaacggcgggcttcccagaaagagcgagagaagcctcttccyacatttaaagacctagacttcttacaagacatccctgatggtctttttttggatgctgacatgtacaacgctctctgtaagaccctgcagcgtgactgtttggtgctgcagagcttcaagataatggattayagcctcttgatgtcaatccataatatagatcatgcacaacgagagcccttaagcagtgaaacacagtactcagttgatactcgaagaccggccccccaaaaggctctgtattccacagccatggaatccatccagggagaggctcgacggggtggtaccatggagactgatgaccatatgggtggcatccctgcccggaatagtaaaggggaaaggcttctgctttatattggcatcattgacattctacagtcttacaggtttgttaagaagttggagcactcttggaaagccctggtacatgacggagacactgtctcagtgcatcgcccaggcttctacgctgaacggttccagcgcttcatgtgcaacacagtatttaagaagattcccttgaagccttctccttccaaaaagtttcggtctggctcatctttctctcggcgagcaggctccagtggcaactcctgcattacttaccagccatcggtctctggggaacacaaggcacaagtgacaacaaaggcagaagtggagccaggcgttcaccttggtcgtcctgatgttttacctcagactccacctttggaggaaatcagtgagggctcgcctattcctgaccccagtttctcacctctrgttggagagactttgcaaatgctaactacaagtacaaccttggaaaagcttgaagttgcagagtcagagttcacccattaagcgcaaagcctcagaagacctggaacaagattctgccatctctgtgatcccaagatgtcagcccttgccccagcaatgctgaattttcttctacttggtcatcaaaaaaggagtgtaatagaagtgaggggagctgctcctccatcttcttcctgaagaagaaccttctctccttcctcttcctcatgaatgggccttagtgcctcagagagttgaggaccgcagcatcccctccactccagagttgggtggtayggattttcaactggccaaccctttgcctccactattgaatttttttcagacccccattcttcatgctggaaatgggattgctggacttggcagctttctttcccctcgtctttgactaggaaccggactcttaatttcctcaggacagactagctggcacattatccctaccttagttctttctctctgactcctggaagaatactcctgtaatctctgtaaaggtttttgggggataagggtgtttaaccacctcccagctttcttcttctttttttttttctgaaaaaaggaaaaagcacacagcacacaatttcaagccattttcagatcagaactccagaagtgttgacaagatgcctattcgtagagttccctcagaagagccatggtgtttatgaagagaagagtagtgattgctctgccagaagcagctcctctttaaactcctcctctcttgatgaatttcttaaggctgaaggaatgaagagagtgggacatggggtaatctttatcccttttgttaaaacaggaggcagccatgggctgggagatcatagcccttcctaggcagaatcctgttcactgccaggctatagtaattattactattttgcaatttgaaatatattctggttgtttttctaaatgtgaagacttaccaaatgaattttagatcattctccagaggagattttttttgctcttctcatcttttccaacagtgttctcctgtttgtggagctaaggtaaagaggggacacttctgtctgtttaacagacagtccatatctgtgaggccagcaaatattttcttaaactcatggggagacagcagattcttgccttggtgaggtcattgctgtgccatatgtcctacccccctgtcttcatgcagggaagttggaaatgsgggctacatatgccctctcctccccgtctacaagagttgtggttttccatctgatccttccactcttgtcaggggaagaagggggcctggtatctcaggcagattgttgaattcctgttctatcccttctctatcccaccctgccttgataatatgttagcccataccccaaataactgtctatattagacacccccagccagtttctggctgcctgtctttgctgccatgttttttacaagaaggaaagaattcttgctatttttttttcataatttactatttatgatgtatttaagtgttttattaaggacagagttctgttaggggtgggagggaatatttgagggagggctgggtcttagggaaaggaatggggaagcaacatttttattaagtgttactatttgcctctactttgtattgttcagaaatggcaaatacaatataaaagtgatatatggttttaatgtaataaactttaatgagttatttag

SEQ ID NO: 1917 - DNA, 3619 bp, Homo sapiens
tgctcggattttttgcttggctacccggagtgaagcggccgggttgggcgattaacaggccgtggttaggaaggacggagaaggggcgttcgctcctttgggacttttcatgcctcgtttttttttcagatgtggcttggtctgggcgcaaggtcccagcagccagcttaagcttactcttctgtgaaaggggaaagtatcccctgtggaaagcggttaaacttgtggagggggtgcgggacgtgagttcttccccatgccaggcgaatggtgtggccttgagctggtccaggagccggctcgacgtgtctgagggaggccccggagggggcggggaggtggcccacagaacgcgggttctgtaaagagacgttgggaagattcgattccgagaagaggaagaaccggattgaaagagagccaggccgctgagggggagggggctgctaagatggcgtcggcctcctccgggccgtcgtcttcggtcggtttttcatcctttgatcccgcggtcccttcctgtaccttgtcctcagcatctggaatcaagagacccatggcatctgaggtgccttatgcctctggcatgcccatcaagaaaataggccatagaagtgttgattcctcaggagagacaacatataaaaagacaacctcatcagccttgaaaggtgccatccagttaggcattacccacactgtggggagcctgagtaccaaaccagagcgtgatgtcctcatgcaagatttctacgtggttgagagtatcttctttcccagtgaagggagcaacctgacccctgctcatcactacaatgactttcgtttcaagacctatgcacctgttgccttccgctacttccgggagctatttggtatccggcccgatgattacttgtattccctctgcagtgagccgctgattgaactctgtagctctggagctagtggttccctattctatgtgtccagcgacgatgagttcattattaagacagtccaacataaagaggcggaatttctgcagaagctgcttccaggatactacatgaacctcaaccagaaccctcggactttgctgcctaaattctatggactgtactgtgtgcaggcaggtggcaagaacattcggattgtggtgatgaacaatcttttaccaagatcggtaaaaatgcatatcaaatatgacctcaaaggctcaacctacaaacggcgggcttcccagaaagagcgagagaagcctcttccyacatttaaagacctagacttcttacaagacatccctgatggtctttttttggatgctgacatgtacaacgctctctgtaagaccctgcagcgtgactgtttggtgctgcagagcttcaagataatggattayagcctcttgatgtcaatccataatatagatcatgcacaacgagagcccttaagcagtgaaacacagtactcagttgatactcgaagaccggccccccaaaaggctctgtattccacagccatggaatccatccagggagaggctcgacggggtggtaccatggagactgatgaccatatgggtggcatccctgcccggaatagtaaaggggaaaggcttctgctttatattggcatcattgacattctacagtcttacaggtttgttaagaagttggagcactcttggaaagccctggtacatgacggagacactgtctcagtgcatcgcccaggcttctacgctgaacggttccagcgcttcatgtgcaacacagtatttaagaagattccctgcgttcaccttggtcgtcctgatgttttacctcagactccacctttggaggaaatcagtgagggctcgcctattcctgaccccagtttctcacctctrgttggagagactttgcaaatgctaactacaagtacaaccttggaaaagcttgaagttgcagagtcagagttcacccattaagcgcaaagcctcagaagacctggaacaagattctgccatctctgtgatcccaagatgtcagcccttgccccagcaatgctgaattttcttctacttggtcatcaaaaaaggagtgtaatagaagtgaggggagctgctcctccatcttcttcctgaagaagaaccttctctccttcctcttcctcatgaatgggccttagtgcctcagagagttgaggaccgcagcatcccctccactccagagttgggtggtayggattttcaactggccaaccctttgcctccactattgaatttttttcagacccccattcttcatgctggaaatgggattgctggacttggcagctttctttcccctcgtctttgactaggaaccggactcttaatttcctcaggacagactagctggcacattatccctaccttagttctttctctctgactcctggaagaatactcctgtaatctctgtaaaggtttttgggggataagggtgtttaaccacctcccagctttcttcttctttttttttttctgaaaaaaggaaaaagcacacagcacacaatttcaagccattttcagatcagaactccagaagtgttgacaagatgcctattcgtagagttccctcagaagagccatggtgtttatgaagagaagagtagtgattgctctgccagaagcagctcctctttaaactcctcctctcttgatgaatttcttaaggctgaaggaatgaagagagtgggacatggggtaatctttatcccttttgttaaaacaggaggcagccatgggctgggagatcatagcccttcctaggcagaatcctgttcactgccaggctatagtaattattactattttgcaatttgaaatatattctggttgtttttctaaatgtgaagacttaccaaatgaattttagatcattctccagaggagattttttttgctcttctcatcttttccaacagtgttctcctgtttgtggagctaaggtaaagaggggacacttctgtctgtttaacagacagtccatatctgtgaggccagcaaatattttcttaaactcatggggagacagcagattcttgccttggtgaggtcattgctgtgccatatgtcctacccccctgtcttcatgcagggaagttggaaatgsgggctacatatgccctctcctccccgtctacaagagttgtggttttccatctgatccttccactcttgtcaggggaagaagggggcctggtatctcaggcagattgttgaattcctgttctatcccttctctatcccaccctgccttgataatatgttagcccataccccaaataactgtctatattagacacccccagccagtttctggctgcctgtctttgctgccatgttttttacaagaaggaaagaattcttgctatttttttttcataatttactatttatgatgtatttaagtgttttattaaggacagagttctgttaggggtgggagggaatatttgagggagggctgggtcttagggaaaggaatggggaagcaacatttttattaagtgttactatttgcctctactttgtattgttcagaaatggcaaatacaatataaaagtgatatatggttttaatgtaataaactttaatgagttatttag

SEQ ID NO: 1918 - DNA, 3805 bp, Homo sapiens
tgctcggattttttgcttggctacccggagtgaagcggccgggttgggcgattaacaggccgtggttaggaaggacggagaaggggcgttcgctcctttgggacttttcatgcctcgtttttttttcagatgtggcttggtctgggcgcaaggtcccagcagccagcttaagcttactcttctgtgaaaggggaaagtatcccctgtggaaagcggttaaacttgtggagggggtgcgggacgtgagttcttccccatgccaggcgaatggtgtggccttgagctggtccaggagccggctcgacgtgtctgagggaggccccggagggggcggggaggtggcccacagaacgcgggttctgtaaagagacgttgggaagattcgattccgagaagaggaagaaccggattgaaagagagccaggccgctgagggggagggggctgctaagatggcgtcggcctcctccgggccgtcgtcttcggtcggtttttcatcctttgatcccgcggtcccttcctgtaccttgtcctcagcagcatctggaatcaagagacccatggcatctgaggtcttggaagctagacaggattcttacatctcattggtgccttatgcctctggcatgcccatcaagaaaataggccatagaagtgttgattcctcaggagagacaacatataaaaagacaacctcatcagccttgaaaggtgccatccagttaggcattacccacactgtggggagcctgagtaccaaaccagagcgtgatgtcctcatgcaagatttctacgtggttgagagtatcttctttcccagtgaagggagcaacctgacccctgctcatcactacaatgactttcgtttcaagacctatgcacctgttgccttccgctacttccgggagctatttggtatccggcccgatgattacttgtattccctctgcagtgagccgctgattgaactctgtagctctggagctagtggttccctattctatgtgtccagcgacgatgagttcattattaagacagtccaacataaagaggcggaatttctgcagaagctgcttccaggatactacatgaacctcaaccagaaccctcggactttgctgcctaaattctatggactgtactgtgtgcaggcaggtggcaagaacattcggattgtggtgatgaacaatcttttaccaagatcggtaaaaatgcatatcaaatatgacctcaaaggctcaacctacaaacggcgggcttcccagaaagagcgagagaagcctcttccyacatttaaagacctagacttcttacaagacatccctgatggtctttttttggatgctgacatgtacaacgctctctgtaagaccctgcagcgtgactgtttggtgctgcagagcttcaagataatggattayagcctcttgatgtcaatccataatatagatcatgcacaacgagagcccttaagcagtgaaacacagtactcagttgatactcgaagaccggccccccaaaaggctctgtattccacagccatggaatccatccagggagaggctcgacggggtggtaccatggagactgatgaccatatgggtggcatccctgcccggaatagtaaaggggaaaggcttctgctttatattggcatcattgacattctacagtcttacaggtttgttaagaagttggagcactcttggaaagccctggtacatgacggagacactgtctcagtgcatcgcccaggcttctacgctgaacggttccagcgcttcatgtgcaacacagtatttaagaagattcccttgaagccttctccttccaaaaagtttcggtctggctcatctttctctcggcgagcaggctccagtggcaactcctgcattacttaccagccatcggtctctggggaacacaaggcacaagtgacaacaaaggcagaagtggagccaggcgttcaccttggtcgtcctgatgttttacctcagactccacctttggaggaaatcagtgagggctcgcctattcctgaccccagtttctcacctctrgttggagagactttgcaaatgctaactacaagtacaaccttggaaaagcttgaagttgcagagtcagagttcacccattaagcgcaaagcctcagaagacctggaacaagattctgccatctctgtgatcccaagatgtcagcccttgccccagcaatgctgaattttcttctacttggtcatcaaaaaaggagtgtaatagaagtgaggggagctgctcctccatcttcttcctgaagaagaaccttctctccttcctcttcctcatgaatgggccttagtgcctcagagagttgaggaccgcagcatcccctccactccagagttgggtggtayggattttcaactggccaaccctttgcctccactattgaatttttttcagacccccattcttcatgctggaaatgggattgctggacttggcagctttctttcccctcgtctttgactaggaaccggactcttaatttcctcaggacagactagctggcacattatccctaccttagttctttctctctgactcctggaagaatactcctgtaatctctgtaaaggtttttgggggataagggtgtttaaccacctcccagctttcttcttctttttttttttctgaaaaaaggaaaaagcacacagcacacaatttcaagccattttcagatcagaactccagaagtgttgacaagatgcctattcgtagagttccctcagaagagccatggtgtttatgaagagaagagtagtgattgctctgccagaagcagctcctctttaaactcctcctctcttgatgaatttcttaaggctgaaggaatgaagagagtgggacatggggtaatctttatcccttttgttaaaacaggaggcagccatgggctgggagatcatagcccttcctaggcagaatcctgttcactgccaggctatagtaattattactattttgcaatttgaaatatattctggttgtttttctaaatgtgaagacttaccaaatgaattttagatcattctccagaggagattttttttgctcttctcatcttttccaacagtgttctcctgtttgtggagctaaggtaaagaggggacacttctgtctgtttaacagacagtccatatctgtgaggccagcaaatattttcttaaactcatggggagacagcagattcttgccttggtgaggtcattgctgtgccatatgtcctacccccctgtcttcatgcagggaagttggaaatgsgggctacatatgccctctcctccccgtctacaagagttgtggttttccatctgatccttccactcttgtcaggggaagaagggggcctggtatctcaggcagattgttgaattcctgttctatcccttctctatcccaccctgccttgataatatgttagcccataccccaaataactgtctatattagacacccccagccagtttctggctgcctgtctttgctgccatgttttttacaagaaggaaagaattcttgctatttttttttcataatttactatttatgatgtatttaagtgttttattaaggacagagttctgttaggggtgggagggaatatttgagggagggctgggtcttagggaaaggaatggggaagcaacatttttattaagtgttactatttgcctctactttgtattgttcagaaatggcaaatacaatataaaagtgatatatggttttaatgtaataaactttaatgagttatttag

SEQ ID NO: 1919 - DNA, 2031 bp, Homo sapiens
acccgtcaagggccgccccttttcctgcccacgtggtctcgggctcctgccccgtcctgctcacgagttcagggctcctgggcggccgccttttccagttccaggtgtgcagargtgtcctctccccacgcgcggcgkgctgcacttggtcgctggctccgagatcgcgcggggccgccggaagcccaagacggtaccgggggccgcagccgcagccggcgccgccctccgccctccccaacagcaggccgagtcccgtagcatccggtagggaaatggtcgtgctttcggtccccgccgaagtcaccgtgatcctgttagatatcgaaggtaccacaaccccgattgctttcgtgaaggacattttatttccttacatcgaagaaaatgttaaagagtatctgcagacacattgggaagaagaggagtgccagcaggatgtcagtcttttgaggaaacaggctgaagaggacgcccacctggatggggctgttcctatccctgcagcatctgggaatggagtggatgatctgcaacagatgatccaggccgtggtagataatgtgtgctggcagatgtccctggatcgaaagaccactgcactcaaacagctgcagggccacatgtggagggcggcattcacagctgggcgcatgaaagcagagttctttgcagatgtagttccagcagtcaggaagtggagagaggccggaatgaaggtgtacatctattcctcagggagtgtggaggcacagaaactgttattcgggcattctacggagggagatattcttgagcttgttgatggtcactttgataccaagattggacacaaagtagagagtgaaagttaccgaaagattgcagacagcattgggtgctcaaccaacaacattttgtttctgacagatgttactcgagaggccagtgctgctgaggaagcagatgtgcacgtagctgtggtggtgagaccaggcaacgcaggattaacagatgatgagaagacttactacagcctcatcacatccttcagtgaactatacctgccttcctcaacctagagaagggttgttaaggcagacygccctgttccccagagttgtccctgtagtgtctaggtttattctaatggtaaaagtaacttacttaaaaaacatatgtacacatatgtatgcaagtatgtatatatgtgtatgctcagattaacttccataggtacataagtgaaagaagtctcagttcagtgaacacaaaacttatttaaagatgctttatatgtagaaattgtttcaaatcatactctaacccttagtgagggcaaagtgtagttggtagaagaaattgctaaatamctatctaatgtgctatgtttatcaaatcgtgtactaaaatggaaagctagttttgagaaattattcagaagccttgttattttaaaaatgaaatatttcaaagactgaatattttcaaagaaaatgaataattcattgcccttgtgatttagaagattataacagctgtatttcatatttgcctccttatatatatcaaagaccaaggtatttccttctgcttcaaaagaacaaaattgggaaagaaaactcacttgagtcttgatcaaacaagtgtcttttacttaagaagaaacttggtaatcattgtggcacccacagcaagcagttgccttaccagtgaaaaaggtgcactgaggtaacatctaaaacagagatgtggttcttaatgtttaacagaacagttctaatcctgccacgtgttatcattatagattttatagttgcctttctaactacttagcacagtttgagaatacgttaattgctatttactatttaaaaagttttactgaaatcagtccataacattaagatgagccctaatatgtaagattttcctctggaatggatgtgagaaatgtaaattttataacagcagtatttatcctggtttaattctaatacgatgtcatgttaatttcatgttgtgattaataaaagcattttttcttcactc

SEQ ID NO: 1920 - DNA, 411 bp, Homo sapiens
taaacaaatgttcatagcagctttattcataatagccccaaatcgtaaacaacccagatgtccttcaacaagtggatggttaaacaaattgtgctatatccatacacggaaccactattctattacaggcatgagccaccgtgctcagccataagaccataaattctgtcagctccttccacctkcgaagctgrctggcttygtgacttgctttggccaaaagaatgaggcggaacaaattgcgacctttctaggctaaaccttaaggggcttactccctgcgaacactgccaccttgtggacaggtctgggatagcggtcttgagagcaggagtccacgctgagggagacaccgcccccctcaacccgacccccaagccgacttgcccagtgcaccagagagagcccaag

SEQ ID NO: 1921 - DNA, 1831 bp, Homo sapiens
ctccagaggactgtatgctgttcttaaggactctctgcttcctggacaagctcaagctaaggactacatctcccagcaggctgtgctctgacagctcttggatttaaataggattctgggctctgctcagagtcaggctgctgctcagcacccaggacggagaggagcagagaagcagcagaagcagccaagagctggagccagaccaggaacctgagccagagctggggttgaagctggagcagcagcaaaagcaacagcagctacagaagttggaacgatgctggtcaccttgggactgctcacctccttcttctcgttcctgtatatggtagctccatccatcaggaagttctttgctggtggagtgtgtagaacaaatgtgcagcttcctggcaaggtagtggtgatcactggcgccaacacgggcattggcaaggagacggccagagagctcgctagccgaggagcccgagtctatattgcctgcagagatgtactgaagggggagtctgctgccagtgaaatccgagtggatacaaagaactcccaggtgctggtgcggaaattggacctatccgacaccaaatctatccgagcctttgctgagggctttctggcagaggaaaagcagctccatattctgatcaacaatgcgggagtaatgatgtgtccatattccaagacagctgatggctttgaaacccacctgggagtcaaccacctgggccacttcctcctcacctacctgctcctggagcrgctaaaggtgtctgcccctgcacgggtggttaatgtgtcctcggtggctcaccacattggcaagattcccttccacgacctccagagcgagaagcgctacagcaggggttttgcctattgccacagcaagctggccaatgtgctttttactcgtgagctggccaagaggctccaaggcaccggggtcaccacctacgcagtgcacccaggcgtcgtccgctctgagctggtccggcactcctccctgctctgcctgctctggcggctcttctccccctttgtcaagacggcacgggagggggcgcagaccagcctgcactgcgccctggctgagggcctggagcccctgagtggcaagtacttcagtgactgcaagaggacctgggkgtctccaagggcccgaaataacaaaacagctgagcgcctatggaatgtcagctgtgagcttctaggaatccggtgggagtagctggtggaagagctgcagctttatcaggcccaatccatgccataatgaacagggaccaaggagaaggccaaccctaaaggattgtcctcttggccagctggtgctgcgaatcctgcctgctctgatcctcttgacccttctgggaatgtttgcacacctgacactcttgtgagactggcttatggcatgagttgtggacacctatagagtgttcttctctaagacctggaaagtcagcaaccctctgggggcagcaggactgggcagatcccaggctgggcatgggggtggcagaagagcccgagaaattgggtcagttccctcatcagcaccagaggctcagctgaggcaagaagagcaccatcactgcctatttctaggggctatacactccaactcttggttgatctctttctttttaaaaatatttgccaccaccctggagtctagaccaacacacaaagatcctggctaaccctggcctatttagattccttcctctcacctggaccttcccatttcaatcatgcagatggtttctttttgtaaagagttccgtttgcctttcaatttttagagaaaataaagactgcattcatc

SEQ ID NO: 1922 - DNA, 2232 bp, Homo sapiens
aggataggaactggagttattgttaatgttacaggaagaacacattctcaaaggagaggggggtggtgggaaactttgattttcatagggttttcagtttcctctcaaatgggaggatgcagcagtgccgctacttaactgaacgtctcgacagtctgatggggcggccctcagccttccggagcagcagtgggactgacctgtccagtgaggaagaaacactgaaccagatggaatggcctttggggatggaaaaaccccagtttacgctcatctcttctctcagctaacttttgtggagccctgttcccaaactggcctgggccagagcaccgtggaggggtatttgttgtaaatggaaggtttccaggcccgcctggaaatcctgaagggtgagacctgcagtgggctcaggagtctgcatttgtgggtgaccgagggggcctcccctccctctagagtccacactgtggagagcatcaggaagggaarggcctgcatcttgtgctcagtgagctcatcgtctagtgaggaaggcatgtgtgaatctctggacaaggcagcgctgagctgttgtggactagtggtgcaggcaagggattayttctgaccaaggatrgtgagaaggtttcccatacagactgaygtctggattgagctttgaagaagaaagccaggactggagcagacgacgaggagggaagagtttgaccagatataccatctggcatctccagcctcccctccaaactacatgtataatcctatcaagacattaaagaccaatacgattgggacattaaacatgttggggctggcaaaacgagtcggtgcccgtctgctcctggcctccacatcggaggtgtatggagatcctgaagtccaccctcaaagtgaggattactggggccacgtgaatccaataggacctcgggcctgctacgatgaaggcaaacgtgttgcagagaccatgtgctatgcctacatgaagcaggaaggcgtggaagtgcgagtggccagaatcttcaacacctttgggccacgcatgcacatgaacgatgggcgagtagtcagcaacttcatcctgcaggcgctccagggggagccactcacggtatacggatccgggtctcagacaagggcgttccagtacgtcagcgatctagtgaatggcctcgtggctctcatgaacagcaacgtcagcagcccggtcaacctggggaacccagaagaacacacaatcctagaatttgctcagttaattaaaaaccttgttggtagcggaagtgaaattcagtttctctccgaagcccaggatgacccacagaaaagaaaaccagacatcaaaaaagcaaagctgatgctggggtgggagcccgtggtcccgctggaggaaggtttaaacaaagcaattcactacttccgtaaagaactcgagtaccaggcaaataatcrgtacatccccaaaccaaagcctgccagaataaagaaaggacggactcgccacagctgaactcctcacttttaggacacaagactaccattgtacacttgatgggatgtatttttggcttttttttgttgtcgtttaaagaaagactttaacaggtgtcatgaagaacaaactggaatttcattctgaagcttgctttaatgaaatggatgtgcctaaaagctcccctcaaaaaactgcagattttgccttgcactttttgaatctctctttttatgtaaaatagcgtagatgcatctctgcgtattttcaagtttttttatcttgctgtgagagcatatgytgtgactgtcgttgacagttttatttactggtttctttgtgaagctgaaaaggaacattaagcgggacaaaaaatgccgattttatttataaaagtgggtacttaataaatgagtcgttatactatgcataaagaaaaatcctagcagtattgtcaggtggtggtgcgccggcattgattttagggcagataaaagaattctgtgtgagagctttatgtttctcttttaattcagagtttytccaaggtctacttttgagttgcaaacttgactttgaaatattcctgttggtcatgatcaaggatatttgaaatcactactgtgttttgctgcgtatctggggcgggggcaggttggggggcacaaagttaacatattcttggttaaccatggttaaatatgctattttaataaaatattgaaactcaccagtca

SEQ ID NO: 1923 - DNA, 2122 bp, Homo sapiens
caggaagcaggcgcgcgggggcgggggcgcgcggcggcaggaggcggggctctcggggccgctgccgccgccgccgccgcgcattgtgcagcaggcgggcccccgcgcggtagggccctggacccgcgcggctcccggggatggtgagcaaggcgctgctgcgcctcgtgtctgccgtcaaccgcaggaggatgaagctgctgctgggcatcgccttgctggcctacgtcgcctctgtttggggcaacttcgttaatatgaggtctatccaggaaaatggtgaactaaaaattgaaagcaagattgaagagatggttgaaccactaagagagaaaatcagagatttagaaaaaagctttacccagaaatacccaccagtaaagtttttatcagaaaaggatcggaaaagaattttgataacaggaggcgcagggttcgtgggctcccatctaactgacaaactcatgatggacggccacgaggtgaccgtggtggacaatttcttcacgggcaggaagagaaacgtggagcactggatcggacatgagaacttygagttgattaaccacgacgtggtggagcccctctacatcgaggttgaccagatataccatctggcatctccagcctcccctccaaactacatgtataatcctatcaagacattaaagaccaatacgattgggacattaaacatgttggggctggcaaaacgagtcggtgcccgtctgctcctggcctccacatcggaggtgtatggagatcctgaagtccaccctcaaagtgaggattactggggccacgtgaatccaataggacctcgggcctgctacgatgaaggcaaacgtgttgcagagaccatgtgctatgcctacatgaagcaggaaggcgtggaagtgcgagtggccagaatcttcaacacctttgggccacgcatgcacatgaacgatgggcgagtagtcagcaacttcatcctgcaggcgctccagggggagccactcacggtatacggatccgggtctcagacaagggcgttccagtacgtcagcgatctagtgaatggcctcgtggctctcatgaacagcaacgtcagcagcccggtcaacctggggaacccagaagaacacacaatcctagaatttgctcagttaattaaaaaccttgttggtagcggaagtgaaattcagtttctctccgaagcccaggatgacccacagaaaagaaaaccagacatcaaaaaagcaaagctgatgctggggtgggagcccgtggtcccgctggaggaaggtttaaacaaagcaattcactacttccgtaaagaactcgagtaccaggcaaataatcrgtacatccccaaaccaaagcctgccagaataaagaaaggacggactcgccacagctgaactcctcacttttaggacacaagactaccattgtacacttgatgggatgtatttttggcttttttttgttgtcgtttaaagaaagactttaacaggtgtcatgaagaacaaactggaatttcattctgaagcttgctttaatgaaatggatgtgcctaaaagctcccctcaaaaaactgcagattttgccttgcactttttgaatctctctttttatgtaaaatagcgtagatgcatctctgcgtattttcaagtttttttatcttgctgtgagagcatatgytgtgactgtcgttgacagttttatttactggtttctttgtgaagctgaaaaggaacattaagcgggacaaaaaatgccgattttatttataaaagtgggtacttaataaatgagtcgttatactatgcataaagaaaaatcctagcagtattgtcaggtggtggtgcgccggcattgattttagggcagataaaagaattctgtgtgagagctttatgtttctcttttaattcagagtttytccaaggtctacttttgagttgcaaacttgactttgaaatattcctgttggtcatgatcaaggatatttgaaatcactactgtgttttgctgcgtatctggggcgggggcaggttggggggcacaaagttaacatattcttggttaaccatggttaaatatgctattttaataaaatattgaaactcaccagtca

SEQ ID NO: 1924 - DNA, 921 bp, Homo sapiens
attcccmatggcgaagattgagaaaaacgctcccacgatggaaaaaaagccagaactgtttaacatcatggaagtagatggagtycctacgttgatattatcaaaagaatggtgggaaaaagtmtgtaatttccaagccaagcctgatgatcttattctggcaacttacccaaagtcaggtacaacatggatgcatgaaattttagacatgattctaaatgatggtgatgtggagaaatgcaaaagagcccagactctagatagacacrctttccttgaactgaaatttccccataaagaaaaaccagatttggagttcgttcttgaaatgtcctcaccacaactgataaaaacacatctcccttcacatctgattccaccatctatctggaaagaaaactgcaagattgtctatgtggccagaaatcccaaggattgcctggtgtcctactaccactttcacaggatggcttcctttatgcctgatcctcagaacttagaggaattttatgagaaattcatgtccggaaaagttgttggcrggtcctggtttgaccatgtgaaaggatggtgggctgcaaaagacaygcaccggatcctctacctcttctacraggatattaaaaaaaatccaaaacatgagatccacaaggtgttggaattcttggagaaaacttktcaggtgatgttataaacaagattgtccaccatacctcatttgatgtaatgaaggataatcccatggccaaccatactgcrgtacctgctcacatattcaatcactccatctcaaaatttatgaggaaagggatgcctggagactggaagaaccactttactgtggctwtgaatgagaactttgataagcattatgaaaagaagatggcagggtccacactgaacttctgcctggagatctga

SEQ ID NO: 1925 - DNA, 12466 bp, Homo sapiens
  misc_feature (1)...(12466): n = A,T,C or G
atgtatttacccatatctcttttgtctacaggtggctgttcctttgatgagcactacagcaactgtggttatagtgtggctctagggaccaatgggttcacctgggagcagattaacacatgggagaaaccaatgctggaccaggcagtgcccacaggatctttcatgrtggtgaacagctctgggagagcctctggccagaaggcccaccttctcctgccaaccctgaaggagaatgacacccactgcatcgacttccattactacttctccagccgtgacaggtccagcccaggggccttgaacgtctacgtgaaggtgaatggtggcccccaagggaaccctgtgtggaatgtgtccggggtcgtcactgagggctgggtgaaggcagagctcgccatcagcactttctggccacatttctatcaggtgatatttgaatccgtctcattgaagggtcatcctggctacatcgccgtggacgaggtccgggtccttgctcatccatgcagaaaagcacctcattttctgcgactccaaaacgtggaggtgaatgtggggcagaatgccacatttcagtgcattgctggtgggaagtggtctcagcatgacaagctttggctccagcaatggaatggcagggacacggccctgatggtcacccgtgtrgtcaaccacaggcgcttctcagccacagtcagtgtggcagacactgcccagcggagcgtcagcaagtaccgctgtgtgatccgctctgatggtgggtctggtgtgtccaactacgcggagctgatcgtgaaagagcctcccacgcccattgctcccccagagctgctggctgtgggggccacatacctgtggatcaagccaaatgccaactccatcatcggggatggccccatcatcctgaaggaagtggaatatcgcaccaccacaggcacgtgggcagagacccacatagtcgactctcccaactataagctgtggcatctggaccccgaygttgagtatgagatccgagtgctcctcacacgaccaggtgaggggggtacgggaccgccagggcctcccctcaccaccaggaccaagtgtgcagatccggtacatggcccacagaacgtggaaatcgtagacatcagagcccggcagctgaccctgcagtgggagcccttcggctacgcggtgacccgctgccatagctacaacctcaccgtgcagtaccagtatgtgttcaaccagcagcagtacgaggccgaggaggtcatccagacctcctcccactacaccctgcgaggcctgcgccccttcatgaccatccggctgcgactcttgctgtctaaccccgagggccgaatggagagcgaggagctggtggtgcagactgaggaagacgttccaggagctgttcctctagaatccatccaaggggggccctttgaggagaagatctacatccagtggaaacctcccaatgagaccaatggggtcatcacgctctacgagatcaactacaaggctgtcggctcgctggacccaagtgctgacctctcgagccagagggggaaagtgttcaagctccggaatgaaacccaccacctctttgtgggtctgtacccagggaccacctattccttcaccatcaaggccagcacagcraagggctttgggccccctgtcaccactcggattgccaccaaaatttcagctccatccatgcctgagtacgacacagacaccccattgaatgagacagacacgaccatcacagtgatgctgaaacccgctcagtcccggggagctcctgtcagtgtttatcagctggttgtcaaggaggagcgacttcagaagtcacggagggcagctgacattattgagtgcttttcggtgcccgtgagctatcggaatgcctccagcctcgattctctacactactttgctgctgagttgaagcctgccaacctgcctgtcacccagccatttacagtgggtgacaataagacatacaatggctactggaaccctcctctctctcccctgaaaagctacagcatctacttccaggcactcagcaaagccaatggagagaccaaaatcaactgtgttcgtctggctacaaaagcaccaatgggcagcgcccaggtgaccccggggactccactctgcctcctcaccacaggtgcctccacccagaattctaacactgtggagccagagaagcaggtggacaacaccgtgaagatggctggcgtgatcgctggcctcctcatgttcatcatcattctcctgggcgtgatgctcaccatcaaaaggagaagaaatgcttattcctactcctattacttgtcccaaaggaagctggccaagaagcagaaggagacccagagtggagcccagagggagatggggcctgtggcctctgccgacaaacccaccaccaagctcagcrccagccgcaatgatgaaggcttctcttctagttctcaggacgtcaacggattcacagatggcagccgcggggagctytcccagcccaccctcacgatccagactcatccctaccgcacctgtgaccctgtggagatgagctacccccgggaccagttccaacccgccatccgggtggctgacttgctgcagcacatcacgcagatgaagagaggccagggctacgggttcaaggaggaatacgaggccttaccagaggggcagacagcttcgtgggacacagccaaggaggatgaaaaccgcaataagaatcgatatgggaacatcatatcctacgaccattcccgggtgaggctgctggtgctggatggagacccgcactctgactacatcaatgccaactacattgacggrtaccatcgacctcggcactacattgcgactcaaggtccgatgcaggagactgtaaaggacttttggagaatgatctggcaggagaactcygccagcatcgtcatggtcacaaacctggtggaagtgggcagggtgaaatgtgtgcgatactggccagatgacacggaggtctacggagacattaaagtcaccctgattgaaacagagcccctggcagaatacgtcatacgcaccttcacagtccagaagaaaggctaccatgagatccgggagctccgcctcttccacttcaccagctggcctgaccacggcgttccctgctatgccactggccttctgggcttcgtccgccaggtcaagttcctcaaccccccggaagctgggcccatagtggtccactgcagtgctggggctgggcggactggctgcttcattgccattgacaccatgcttgacatggccgagaatgaaggggtggtggacatcttcaactgcgtgcgtgagctccgggcccaaagggtcaacctggkacagacagaggagcaatatgtgtttgtgcacgatgccatcctggaagcgtgcctctgtggcaacactgccatccctgtgtgtgagttccgttctctctactacaatatcagcaggctggacccccagacaaactccagccaaatcaaagatgaatttcagaccctcaacattgtgacaccccgtgtgcggcccgaggactgcagcattgggctcctgccccggaaccatgataagaatcgaagtatggaygtgctgcctctggaccgctgcctgcccttccttatctcagtggacggagaatccagcaattacatcaacgcagcactgatggatagccacaagcagcctgccgccttcgtggtcacccagcaccctctacccaacaccgtggcagacttctggaggctggtgttcgattacaactgctcctctgtggtgatgctgaatgagatggacactgcccagttctgtatgcagtaytggcctgagaagacctccgggwgctatgggcccatccaggtggagttygtctccgcagacatcgacgaggacatcatccacagaatattccgcatctgtaacatggcccggccacaggatggttatcgtatagtccagcacctccagtacattggctggcctgcctaccgggacacgcccccctccaagcgctctctgctcaaagtggtccgacgactggagaagtggcaggagcagtatgacgggagggagggacgtactgtggtccactgcctaaatgggggaggccgtagtggaaccttctgtgccatctgcagtgtgtgtgagatgatccagcagcaaaacatcattgacgtgttccacatcgtgaaaacactgcgtaacaacaaatccaacatggtggagaccctggaacagtataaatttgtrtacgaggtggcactggaatatytaagctccttttagctcaatgggatggggaacctgccggagtccagaggctgctgtgaccaagcccccttttgtgtgaatggcagtaactgggctcaggagctctgaggtggcaccctgcctgactccaaggagaagactggtggccctgtgttccacggggggctctgcaccttctgaggggtctcctgttgccgtgggagatgctgctccaaaaggcccaggcttccttttcaacctaaccagccacagccaagggcccaagcagaagtacacccacaagcaaggccttggatttctggctcccagaccacctgcttttgttctgagtttgtggatctcttggcaagccaactgtgcaggtgctggggagtgggaggctcccctgccctccttctccttaggagtggaggagatgtgtgttctgctcctctacgtcatggaaaagattgaggctcttgggggtcactgctctgctgccccctgcaacctccttcaggggcctctggcaccagacatttgcagtctggaccagtgtgaccttacgatgttccctaggccacaagagaggccccccatcctcacacctaacctgcatggggcttcgcccacaaccattctgtaccccttccccagcctgggccttgaccgtccagcattcactggccggccagctgtgtccacagcagtttttgataaaggtgttctttgcttttttgtgtggtcagtgggagggggtggaactgcagggaacttctctgctcctccttgtctttgtaaaaagggaccacctccctggggcagggcttgggctgacctgtaggatgtaacccctgtgtttctttggtggtagctttctttggaagagacaaacaagataagatttgattattttccaaagtgtatgtgaaaagaaactttcttttggagggtgtaaaatcttagtctcttatgtcaaaaagaagggggcgggggagtttgagtatgtacctctaagacaaatctctcgggccttttattttttcctggcaatgtccttaaaagctcccaccctgggacagcatgccactgagcaaggagagatgggtgagcctgaagatggtccctttggtttctggggcaaatagagcaccagctttgtgcataatttggatgtccaaatttgaactccttcctaaagaaacccagcagccaccttgaaaaaggccattgtggagcccattatactttgatttaaaataggccaagagaatcaggcctggagatctagggtcttgtccaaagtgtgagtgagtcaatgagagggaaccaacatttgctaagtctctactgtatgccagggatcatgcttggcactttccataggacatttcacacagtccttagaacccccaggagagagctactgacttgttatcatctccatttgatcatctcctccaatgaggaaacccacgcaccttccttagtaatgaaatcctgggttccaaaggggcaggtaatggcaatgagacttctccgtgctgttttcttcatcttctctaagccaagcaattattttatggagggaaaataaggccagaaacttctgagcagrtaactccacaaatggaaatttagtactttcttcctgatgccagttcttctgggaagcrcagaatttcagatatattttagtaacacattcccagctccccaggaaagccagtctcatctaatttcttagtcagtaaaaacaattccctgttccttcaggctatgaatggaccagccagggaaactctcgaccttgatctctagccagtgcttaggcccaatatctgayagcctcaggtgggctgggacctaggaagctccatcttgaaggctggtctagccccagacagggcatgaggggcagagaattcaagaaggtacagctttggccctcaagagcccactgtatgctggggaaatggaaccatggtgcagtagtgtggagtggatgagtgttccatgagcctaggagcaagaaagtctcttcggcctcgggcttcctggagaaggggacgtccattcctgctgggtcttaacaagcataaaaaggaaaaaaaggaaactcaggcaaagggatccatatgtgcaatggcaaagaaatgtgaaaaggcattgggagaagcagtctgggggaggccagcccagtgcgggcacagcacaacacggggagcagcaagagatgagccagggtccaggagacagatgcccatcgcgagtacagactttgtcctattggcaacaaggagtccatggagctttagagagaygcactcagcttcgtgttggccaagactccttctgggccaatggggctgcctcttttcctttcatcagacactgtgaaaacattcccttaagcgtgcactttttaatatcacatctatttgtctgtctgctcattgttttgttgctggaactaaatatgcaatggatcatgagactcagattctatgagaaacccagggtctctgctttaccacggagcagggtcaccaacccagatctccaggcccatgaggatggaacatgaaaggagccgacaaaagttgcttccattggcatgggctctggagctgtccagaagtccagggacaccagacttgatcaaggaagggctgtcactttagaggttcaaaaggaagtgcctcaaagcaaaggcaagcaaaggaaccccacgatgaacttgctcttttcctttgatgagcctctccccaggtgtatttcagcagaccccggggacccacccccactgggcctgctggcctccctcggctccagcccaatgccccagctggccttccccagcctgcaaggagcctgtagcatggcaaatctgcctgctgtatgctattttcttagatcttggtacatccagacaggatgagggtggagggagagctatttaacacaaatcctaagatttttttctgctcaggaaggggtgaaatagctggcagatacaaaagacagtggcttttatcattttaaatggtaggaatttaargtgtgacttcagggagaaacaaacttgcaaaaaaaaaaaaaaaatctcaggccatgttggggtaacccagcaagggccagtgatgatttcccccagytcatccccttattttcccacaacccaaccattctctaaagcaggncagtgaataggtcttaggccagtgcacacaggaagaaattgaggcttatggatggggatgrcttccctaagatcccatgggacaaggatgtggcaaggcttggatgagatggggcaccrgtgcccaggaatttgaacattttcctttacccaggaaatctccggagccaacaccaccacccccagggggtctccccaccccaccccatttacagggtgagctcagcctgtcatgagcagaggaaaatattattaatgctctctgagtctttacaacaggagctcttacctcatagatgtgggctctgtttggggaagatgcaaggaagtaatgagaagcccaggaaatttctccacctgtgtttatggcctaaatagcttcaggatgtatcttagctgcactccaacattgcatcctttctggggtgaagaatctgggccaaccaggggtccttgggcctctagaaggccacagtaggcctctctttgtgggaatggaaggggacagtttgcttttagtgctggccctctctgtgggtgtggcctgcaaaggaaccaacagaccctatgctggggactctaacatgtgagctcattaaattcttccagcattctaaaggagggtttgtgattgtcaccatttactgatgaggaaactaaggctcctaggggagaaatcacttgcccacagttccacagctagtgagtgaatgaaccaggatttaaaccggttttttctcactacagagacaatatttttccaccattgtatctcacatttttcccaggaggttacccataacagaagagactagagtggaacagatacgtcagtggataaagctcaaagcaaacaacagtaagcttaaaattccttcatagtctcatgttttacgttcacaattcatgcaaaatttgcattccactttctgatttagccttgttggttttaatatgactctatgaatatttcaaaaaaaaatgtgctctgttcctcatgttgttctgttctgttcaccccgctatgacggaccctaggtcagctggtcttcagcttgaccctagaattgactctaggagcagtgaccctgctgcctcccagagccagttataggctcaagatcaagaccaactgaccttctcctaggcagctcctttggtgtgtgggtgctctgacctcactgttcatgaggggacctcaactaaggcatcttccagttgggtgctggaaggaacccattaactcacactagaatgatgaggatttgctcatctggcgtggagaaggatgagcccacaaaaccctaaagggaaaagagaagctggacacagctgtactcagcagattcctgaatgctaggctggaaagtggtgcctgttgtccaagtggagtcacatggttgctaatgtgggcaagtctgaggacacacttcatgagcagctggggtctggaaggctcctcactttaccctagccacacataattactgggtgcctacagcacctagyaccttggagggggcactattaggaaatcgagattactatggcacaattaattcctgggtaaggcatggggttgtggtggacagagctcagtctttagtttgaacgaaaacatacatacatgaaaaacatacatgaaaaaaggaccctcatcaacattagaaggggtagatttggagcactttaggcaggaaaacaggaacgcaaggccaggaaactggaacccagtgaatactcagaaccgaggatgcagatgacttatttagcaaaatggtcacttctgtgacatagctggagaaaggatgggtaacagcttgccagagccacttggaacaagggcaaatctcagtgtctggggcaaaagatgatgcatttccctctgacccatcatgtttattcatcctccactccccattgccacactagctcttgctgtaagtcctcaccaggatctacatttcctcgtcgctggtgggaaccccttagagtacatagaggtatcagtccagtaagactgctctacacaacagaagtgaggcccagggagtagcagccaggcccttatcctgttacctctgcaggagtgactgcccaacccagatccagagacattgaaggaaatgataattccttggtacctcactgccttgggacaaaatgaagaaagccacccttccttaggctgcagcttgccactcctgggctgggtaaacaggtcatcagcaccargctcaaccaggagtaacaytctggaagacatgggtgagcccaagaggaagcatgaacaggacgctgttcctaagtcatgtcaacaggttgtgctgggccaggatccccagggaaaaaaatggtcaacccaactggagggtaggttagaagaaaaaaaacataaacgtggatagtcatgtcatctcaaatccctgacttggcttccccattacttracagtctgagctccttcttagcctgtgaccagcttcaaatcacagccaagtaaaacaaggaaataggaaaagtaaatccaactagaagagacaagctgagattcagatttgtttactcctcccatgcaaagtttccctgttggaggttttccatgtatacatgtctagaagtgatagaatgcaaggccttggctttgtcttgcagggatctgcctttgaggtcatagactgaacagcagggagagaggttagtggtggagtgtggggggagctgttctagctccagtttcttctgacacatttttcaggatcatggatctgatcctccgaagcacagcagagatatctaagccatatttgtgcacatgagcagactcttctagttttttagtaaccagggatgggcttttgcatggcactgactatagagatgtcttgtagagatcaagccagtcttttgcatcccacctgcccacctccagaagagatgggaaaaggtcatcaaagggcattcaccaactgaaatccactcatgaatgttaggtctctaaaaggaggcatcaacactcacaatggtagcctccaaacctagcatcccacctatctaagagctcaggggtggtccactggggcagatacaagggaagtgcaagggctcaggatgaaagaaaatctattgggaagagttttaggggcttgatcattatggggcttccttctatatctgagaactgctctgggtggtgagatgtggactctgatccttaattggaatgttcrgagaatgagtgtctggtggccttgaagtgttggacagaaaagtatcagtataaaagcctggagctcagggtaattaatgtagttcatggttccttagtgagcaggactcttggatgtggaggagaaagggtcataggaagtaaaccaccaaaattacaaaattgagtctctgtacaattacttcagtgcctttgggcttatgaatacaaatcagtgggccttctctatgatggtccaacaaactctcagtgtccaccctgtccctgtatctcccatggaagatgaataatgtcaggtgttctttgggtcaaaggycccagggcagtctggaggcttagagggcagagtggtgtcattccatgtaaagttaggcttctgaggggtcaggcagaatatggtgtccatatcttccatagctctgcagattcttggatgaagtcaagcayagtttgctagacccaggtcactcctctgagtataactaggacccatgagtgaaacttaatagctgtaaggaagaacctgctgtctgccagagaggataagctgcccatctcagcagctgtctaaaagaaggcaggtgtctctttaaagggaagagaagcattggtgaaatggatttcaggtcacttccattccagatgggtgagatcttgtggagctgggatcatgtttgaactcattcatacctgtagagcacgaatccaagtagattgtgtttggtctgtacaggctgaagccccctgctctcccacccaagtgcccccactgagcaggccaacatgctgttgtggccacatatactgggctgatccaggctggttatcaccaaacagcaaaccatagggaacagctgctttgccatagacccaatacccatgtagatctctcatgagagcagccataactcagacccactgaccaacagggccatgagtgacagccagaaccagtgaaggtccaagtaggacacagagcagggcttttcttaccatacacattatctccagaggttatttctaccccactccctattcaaggcctgttggagcacaytgcaaaagcaaaagcacagtaactcaatttacacatgattataatcatttccagtgcacacatttcatcaccaggtggatcctgagctagcccatgtaaatccgggttaacccatattggtaatcatactcaaaagcacttttcaccctacattctactagccaatcaaagacaaagagttgtggcctctaccattgccttggcttctggacaccctcacaagctatcccaaggttcccgctcaactccagggaggctgacatcttcacatccactgggcatataatattgcatgagaccaaagtctccacactctttgcagcctcctccatgaatcccaatggcctgcacttgtacagtttgggtgtttgatagataaagcacgtatgagaagagaaaacaaaataaatcaactttttaaaaaagccagcactgtgctgtcaatgttttttttttcttttcaattctagctcagaaaagcagaaggtaaataatgtcaggtcaatgaatatcagatatattttttgactgtacattacagtgaagtgtaatctttttacacctgcaagtccatcttatttattcttgtaaatgttccctgacaatgtttgtaayatggctgtgttaaaaaatctatacaataaagctgtgaccctgagattcatgttttcctaagata

SEQ ID NO: 1926 - DNA, 4394 bp, Homo sapiens
ggaagttgcggtgcattgtgggttctcctggagctgtggagttgatcctgaatgaaagtggcgcgccgcccctgacgttacccggatcggagaggttggaattcagattacggctgcgattcgggtgtctcggaccccggtgtgcaccggaccacggggaggcggctccaaaggcgcggtgaacgttggtgagggagggcagctctgcgcagccccaagasatggctcacaacaagatcccgccgcggtggctgaactgtccccggcgcggccagccggtggcaggaagattcttacctctgaagacaatgttaggaccaagatatgatagtcaagttgctgaagaaaatcggttccatcccagcatgctctcaaattacctaaagagcctaaaggttaaaatgggcttgttggtggacctgacaaatacttcaaggttctatgaccgaaatgacatagaaaaagaaggaatcaaatatataaaacttcartgtaaaggacatggtgagtgccctaccactgagaatactgagacctttattcgtctgtgtgagcggtttaatgaaagaaatccacctgaacttataggtgttcattgtactcatggcttcaatcgcactggtttcctcatatgtgcctttttggtggagaaaatggattggagtatcgaagcagcagttgctacttttgcccaagccagaccaccaggaatctacaagggtgattatttgaaggaactttttcgtcggtatggtgacatagaggaagcaccacccccacctctattgccagattggtgttttgaggatgatgaagacgaagatgaggatgaggatggaaagaaggaatcagaacccgggtcaagtgcttcttttggcaaaaggagaaaagaacggttaaaactgggcgctattttcttggaaggtgttactgttaaaggtgtaactcaagtaacaacacaaccaaagttaggagaggtacagcagaagtgtcatcaattctgtggctgggaagggtctggattccctggagcacagcctgtttccatggacaagcaaaatattaaacttttagacctgaagccatacaaagtaagctggaaagcagatggtactcggtacatgatgttgattgatggcacaaatgaagtttttatgattgatagagacaattcagtatttcatgtttcaaatctggaatttccatttcgtaaagatcttcgtatgcatttatcaaatactctcttggatggcgagatgattattgacagagtaaatggacaggctgttcctagatatttgatatatgacataattaaattcaattcacagcccgttggagattgtgattttaatgttcgtctgcagtgtatagaacgagaaattataagtcctcgacacgaaaaaatgaagactgggctcattgacaaaacacaggaaccatttagcgtcagaaataagccgttttttgacatctgtacttcaagaaagaaatacaaacctggtcgatgtgatgatattttgaaatggaagcctcccagtctgaattctgtggattttcgtctaaaaataacaagaatgggaggagaagggttacttcctcagaatgttggcctcctgtatgttggaggttatgaaagaccctttgcacaaatcaaggtgacaaaagagctgaaacagtatgacaacaaaattatagaatgcaaatttgagaacaacagctgggtcttcatgagacagagaacagacaaaagttttcctaatgcctacaacactgccatggctgtgtgtaacagcatctcaaaccctgtcaccaaggagatgctgtttgagttcatcgacagatgtactgcagcttctcaaggacagaagcgaaaacatcatctggaccctgacacggagctcatgccaccaccacctcccaaaagaccacgccctttaacctaagacctgcctgtgacttsagggttaagaagaaagaggaatgaggaaaaaacgctgttgcccatttttgtmgccagagaaattgaaaaacgactgtggcttgatgttgatacacrtttgaattttttttaaaaaaagaaagttatcgtagccagcctgtaaatacttgatgcattcgtttcctcagtgctgcaatacatcrtggacktaaacatcttatttatctgataaactcagccttaccttgtggaatctgaagattgaaatatccaaaggtttaaacaagatggaaatcaatgaaaaagaggccttgtttatatatgggtagcttcacatttaatttataaagttaacaatctggaaactgtgagcccataaaacagtattttttagaagttgtgttacaactgtagcaaattttccttttaaaaaatccaggcaatggcattaaacattcttgctatcatttaccatggatttcctacatttctgagatccctgtattcaaaaacaaatgacagggttgttaagttgtactatattaaacaacttggtctggtttatatcattttaacaagttttttggaaatgtaaaagaaaaaagtaaagctccatttttgtgaattgcattgtttctaaaggaagtattttgagtattttcatctgtttgtattgtttcgactatgatatcagatatccagtgtgtccattctggcagtggttttgagttacttcatggaacttggacatacaccaccaggtcctttatgtgttgttctcctgggagacttctttttttaaatgccagggctacttctgctttacctcagtggtatcagcacattgtwaattacgttaaaacacacaactcactgtgatctatgggagtgatatcaaatacaaacgatgttgtgttccttctctcgaacaaaacagcaaagggaatgccagctaacttctttgattagaaggtaatgtcatggaatagaatgctgtcaccagaaaatgctctcccactgctagataaatgcagaggcaaagtgtagacatctgtaggaactaaatatcaaggaaatcaagacatttattttcaaagcgagaattctatctacattctattctgcggatgttatttctgttatacatctgaattttaaaatgtttactgatagataatggatttaaagggcggctaattgattgtctgccattgttgataaactgttctaattggtttgtgaaagaactctgagaattagctaaatggaggctagtgtatttatttttagaggtacatgttttaagtaaatgtatttaaaacaaattttcatggtctgaattgtatatgtaaatgcatatctgtgtaagtatatgcaagtgtatattcttctactgattcagtcagacacgaaatccaactgaattacccggtagactgaatatctgacgggatttctatatggacatagcacagatgaaccaaaaatgtatttatattcacctgagttttaatgtttttaaacaaagttttctcctgcagtgcttttctatatgaaatagttgagtcaagcttgggcttttttcttcgttgttcccaagtcatgtaatgtatagtgaatttatccaaaacgccattgtaacgttttttactagagtgtttttgcacatttgggcgctaaagggattaaaacaactgatgccacaatgactattgaaggagggaaaattctcaaggttccatagtatcttttacaaaatggattaaaaaaaaaatgcctatgcaacttcaaatagtctgatgcctgcttccccaggacgagtgactcttccacggtgtgctgctttccctccragcctgtggaaaggcagagcccttttgcagatacgaaagcaagcttttgccaatgatctttaatggagttaaaatgtttatggtaattgtaacctttcaaatgagttacgtgaaaagagcatctcacttttaatacacccagatattttcttcaagtctttgtgcattttagcaggacttaattttcttaatttattctttcctttcaattatagtgacatagagtagttggccttataagtagatcccatttagcccctgaacataataccatctgcagtattataaaagtcatttagaaggtcagggggataatctagaggcaggatyttggacattgtgaaggaaatgtgctccttctcagctcacttcaataactattttctgagactgaagttttttagacaagaataagaaaactttgctttcttcagttatcacatgtgaaagcttttgctttttgttaggaaaaggtgtggatgactctactgcgtggatggttacatttgctttccgtgaaatgctcagaaaatgtcaggacattccttttccaattgtgtgtcagtgcgtattgtaataaaactactgatttaaattag

SEQ ID NO: 1927 - DNA, 1844 bp, Homo sapiens
ggaagttgcggtgcattgtgggttctcctggagctgtggagttgatcctgaatgaaagtggcgcgccgcccctgacgttacccggatcggagaggttggaattcagattacggctgcgattcgggtgtctcggaccccggtgtgcaccggaccacggggaggcggctccaaaggcgcggtgaacgttggtgagggagggcagctctgcgcagccccaagasatggctcacaacaagatcccgccgcggtggctgaactgtccccggcgcggccagccggtggcaggaagattcttacctctgaagacaatgttaggaccaagatatgatagtcaagttgctgaagaaaatcggttccatcccagcatgctctcaaattacctaaagagcctaaaggttaaaatgggcttgttggtggacctgacaaatacttcaaggttctatgaccgaaatgacatagaaaaagaaggaatcaaatatataaaacttcartgtaaaggacatggtgagtgccctaccactgagaatactgagacctttattcgtctgtgtgagcggtttaatgaaagaaatccacctgaacttataggtgttcattgtactcatggcttcaatcgcactggtttcctcatatgtgcctttttggtggagaaaatggattggagtatcgaagcagcagttgctacttttgcccaagccagaccaccaggaatctacaagggtgattatttgaaggaactttttcgtcggtatggtgacatagaggaagcaccacccccacctctattgccagattggtgttttgaggatgatgaagacgaagatgaggatgaggatggaaagaaggaatcagaacccgggtcaagtgcttcttttggcaaaaggagaaaagaacggttaaaactgggcgctattttcttggaaggtgttactgttaaaggtgtaactcaagtaacaacacaaccaaagttaggagaggtacagcagaagtgtcatcaattctgtggctgggaagggtctggattccctggagcacagcctgtttccatggacaagcaaaatattaaacttttagacctgaagccatacaaagtaagctggaaagcagatggtactcggtacatgatgttgattgatggcacaaatgaagtttttatgattgatagagacaattcagtatttcatgtttcaaatctggaatttccatttcgtaaagatcttcgtatgcatttatcaaatactctcttggatggcgagatgattattgacagagtaaatggacaggctgttcctagatatttgatatatgacataattaaattcaattcacagcccgttggagattgtgattttaatgttcgtctgcagtgtatagaacgagaaattataagtcctcgacacgaaaaaatgaagactgggctcattgacaaaacacaggaaccatttagcgtcagaaataagccgttttttgacatctgtacttcaagaaagctacttgaaggaaattttgccaaagaagtgagccatgaaatggatggacttatttttcagcctactggaaaatacaaacctggtcgatgtgatgatattttgaaatggaagcctcccagtctgaattctgtggattttcgtctaaaaataacaagaatgggaggagaagggttacttcctcagaatgttggcctcctgtatgttggaggttatgaaagaccctttgcacaaatcaaggtatgtttgttcattttcagtgtacttttcctggatgttctcttatctrgaatccatcaaaaccttgctaataataatcaacatataaaaatatcgtgttccagcactttgggaggc

SEQ ID NO: 1928 - DNA, 2349 bp, Homo sapiens
ggaagttgcggtgcattgtgggttctcctggagctgtggagttgatcctgaatgaaagtggcgcgccgcccctgacgttacccggatcggagaggttggaattcagattacggctgcgattcgggtgtctcggaccccggtgtgcaccggaccacggggaggcggctccaaaggcgcggtgaacgttggtgagggagggcagctctgcgcagccccaagasatggctcacaacaagatcccgccgcggtggctgaactgtccccggcgcggccagccggtggcaggaagattcttacctctgaagacaatgttaggaccaagatatgatagtcaagttgctgaagaaaatcggttccatcccagcatgctctcaaattacctaaagagcctaaaggttaaaatgggcttgttggtggacctgacaaatacttcaaggttctatgaccgaaatgacatagaaaaagaaggaatcaaatatataaaacttcartgtaaaggacatggtgagtgccctaccactgagaatactgagacctttattcgtctgtgtgagcggtttaatgaaagaaatccacctgaacttataggtgttcattgtactcatggcttcaatcgcactggtttcctcatatgtgcctttttggtggagaaaatggattggagtatcgaagcagcagttgctacttttgcccaagccagaccaccaggaatctacaagggtgattatttgaaggaactttttcgtcggtatggtgacatagaggaagcaccacccccacctctattgccagattggtgttttgaggatgatgaagacgaagatgaggatgaggatggaaagaaggaatcagaacccgggtcaagtgcttcttttggcaaaaggagaaaagaacggttaaaactgggcgctattttcttggaaggtgttactgttaaaggtgtaactcaagtaacaacacaaccaaagttaggagaggtacagcagaagtgtcatcaattctgtggctgggaagggtctggattccctggagcacagcctgtttccatggacaagcaaaatattaaacttttagacctgaagccatacaaagtaagctggaaagcagatggtactcggtacatgatgttgattgatggcacaaatgaagtttttatgattgatagagacaattcagtatttcatgtttcaaatctggaatttccatttcgtaaagatcttcgtatgcatttatcaaatactctcttggatggcgagatgattattgacagagtaaatggacaggctgttcctagatatttgatatatgacataattaaattcaattcacagcccgttggagattgtgattttaatgttcgtctgcagtgtatagaacgagaaattataagtcctcgacacgaaaaaatgaagactgggctcattgacaaaacacaggaaccatttagcgtcagaaataagccgttttttgacatctgtacttcaagaaagaaatacaaacctggtcgatgtgatgatattttgaaatggaagcctcccagtctgaattctgtggattttcgtctaaaaataacaagaatgggaggagaagggttacttcctcagaatgttggcctcctgtatgttggaggttatgaaagaccctttgcacaaatcaaggtgacaaaagagctgaaacagtatgacaacaaaattatagaatgcaaatttgagaacaacagctgggtcttcatgagacagagaacagacaaaagttttcctaatgcctacaacactgccatggctgtgtgtaacagcatctcaaaccctgtcaccaaggagatgctgtttgagttcatcgacagatgtactgcagcttctcaaggacagaagcgaaaacatcatctggaccctgacacggagctcatgccaccaccacctcccaaaagaccacgccctttaacctaagacctgcctgtgacttsagggttaagaagaaagaggaatgaggaaaaaacgctgttgcccatttttgtmgccagagaaattgaaaaacgactgtggcttgatgttgatacacrtttgaattttttttaaaaaaagaaagttatcgtagccagcctgtaaatacttgatgcattcgtttcctcagtgctgcaatacatcrtggacktaaacatcttatttatctgataaactcagccttaccttgtggaatctgaagattgaaatatccaaaggtttaaacaagatggaaatcaatgaaaaagaggccttgtttatatatgggtagcttcacatttaatttacaaattttccttttaaaaaatccaggcaatggcattaaacattcttgctatcatttaccatg

SEQ ID NO: 1929 - DNA, 2418 bp, Homo sapiens
ggaagttgcggtgcattgtgggttctcctggagctgtggagttgatcctgaatgaaagtggcgcgccgcccctgacgttacccggatcggagaggttggaattcagattacggctgcgattcgggtgtctcggaccccggtgtgcaccggaccacggggaggcggctccaaaggcgcggtgaacgttggtgagggagggcagctctgcgcagccccaagasatggctcacaacaagatcccgccgcggtggctgaactgtccccggcgcggccagccggtggcaggaagattcttacctctgaagacaatgttaggaccaagatatgatagtcaagttgctgaagaaaatcggttccatcccagcatgctctcaaattacctaaagagcctaaaggttaaaatgggcttgttggtggacctgacaaatacttcaaggttctatgaccgaaatgacatagaaaaagaaggaatcaaatatataaaacttcartgtaaaggacatggtgagtgccctaccactgagaatactgagacctttattcgtctgtgtgagcggtttaatgaaagaaatccacctgaacttataggtgttcattgtactcatggcttcaatcgcactggtttcctcatatgtgcctttttggtggagaaaatggattggagtatcgaagcagcagttgctacttttgcccaagccagaccaccaggaatctacaagggtgattatttgaaggaactttttcgtcggtatggtgacatagaggaagcaccacccccacctctattgccagattggtgttttgaggatgatgaagacgaagatgaggatgaggatggaaagaaggaatcagaacccgggtcaagtgcttcttttggcaaaaggagaaaagaacggttaaaactgggcgctattttcttggaaggtgttactgttaaaggtgtaactcaagtaacaacacaaccaaagttaggagaggtacagcagaagtgtcatcaattctgtggctgggaagggtctggattccctggagcacagcctgtttccatggacaagcaaaatattaaacttttagacctgaagccatacaaagtaagctggaaagcagatggtactcggtacatgatgttgattgatggcacaaatgaagtttttatgattgatagagacaattcagtatttcatgtttcaaatctggaatttccatttcgtaaagatcttcgtatgcatttatcaaatactctcttggatggcgagatgattattgacagagtaaatggacaggctgttcctagatatttgatatatgacataattaaattcaattcacagcccgttggagattgtgattttaatgttcgtctgcagtgtatagaacgagaaattataagtcctcgacacgaaaaaatgaagactgggctcattgacaaaacacaggaaccatttagcgtcagaaataagccgttttttgacatctgtacttcaagaaagctacttgaaggaaattttgccaaagaagtgagccatgaaatggatggacttatttttcagcctactggaaaatacaaacctggtcgatgtgatgatattttgaaatggaagcctcccagtctgaattctgtggattttcgtctaaaaataacaagaatgggaggagaagggttacttcctcagaatgttggcctcctgtatgttggaggttatgaaagaccctttgcacaaatcaaggtgacaaaagagctgaaacagtatgacaacaaaattatagaatgcaaatttgagaacaacagctgggtcttcatgagacagagaacagacaaaagttttcctaatgcctacaacactgccatggctgtgtgtaacagcatctcaaaccctgtcaccaaggagatgctgtttgagttcatcgacagatgtactgcagcttctcaaggacagaagcgaaaacatcatctggaccctgacacggagctcatgccaccaccacctcccaaaagaccacgccctttaacctaagacctgcctgtgacttsagggttaagaagaaagaggaatgaggaaaaaacgctgttgcccatttttgtmgccagagaaattgaaaaacgactgtggcttgatgttgatacacrtttgaattttttttaaaaaaagaaagttatcgtagccagcctgtaaatacttgatgcattcgtttcctcagtgctgcaatacatcrtggacktaaacatcttatttatctgataaactcagccttaccttgtggaatctgaagattgaaatatccaaaggtttaaacaagatggaaatcaatgaaaaagaggccttgtttatatatgggtagcttcacatttaatttacaaattttccttttaaaaaatccaggcaatggcattaaacattcttgctatcatttaccatg

SEQ ID NO: 1930 - DNA, 4463 bp, Homo sapiens
ggaagttgcggtgcattgtgggttctcctggagctgtggagttgatcctgaatgaaagtggcgcgccgcccctgacgttacccggatcggagaggttggaattcagattacggctgcgattcgggtgtctcggaccccggtgtgcaccggaccacggggaggcggctccaaaggcgcggtgaacgttggtgagggagggcagctctgcgcagccccaagasatggctcacaacaagatcccgccgcggtggctgaactgtccccggcgcggccagccggtggcaggaagattcttacctctgaagacaatgttaggaccaagatatgatagtcaagttgctgaagaaaatcggttccatcccagcatgctctcaaattacctaaagagcctaaaggttaaaatgggcttgttggtggacctgacaaatacttcaaggttctatgaccgaaatgacatagaaaaagaaggaatcaaatatataaaacttcartgtaaaggacatggtgagtgccctaccactgagaatactgagacctttattcgtctgtgtgagcggtttaatgaaagaaatccacctgaacttataggtgttcattgtactcatggcttcaatcgcactggtttcctcatatgtgcctttttggtggagaaaatggattggagtatcgaagcagcagttgctacttttgcccaagccagaccaccaggaatctacaagggtgattatttgaaggaactttttcgtcggtatggtgacatagaggaagcaccacccccacctctattgccagattggtgttttgaggatgatgaagacgaagatgaggatgaggatggaaagaaggaatcagaacccgggtcaagtgcttcttttggcaaaaggagaaaagaacggttaaaactgggcgctattttcttggaaggtgttactgttaaaggtgtaactcaagtaacaacacaaccaaagttaggagaggtacagcagaagtgtcatcaattctgtggctgggaagggtctggattccctggagcacagcctgtttccatggacaagcaaaatattaaacttttagacctgaagccatacaaagtaagctggaaagcagatggtactcggtacatgatgttgattgatggcacaaatgaagtttttatgattgatagagacaattcagtatttcatgtttcaaatctggaatttccatttcgtaaagatcttcgtatgcatttatcaaatactctcttggatggcgagatgattattgacagagtaaatggacaggctgttcctagatatttgatatatgacataattaaattcaattcacagcccgttggagattgtgattttaatgttcgtctgcagtgtatagaacgagaaattataagtcctcgacacgaaaaaatgaagactgggctcattgacaaaacacaggaaccatttagcgtcagaaataagccgttttttgacatctgtacttcaagaaagctacttgaaggaaattttgccaaagaagtgagccatgaaatggatggacttatttttcagcctactggaaaatacaaacctggtcgatgtgatgatattttgaaatggaagcctcccagtctgaattctgtggattttcgtctaaaaataacaagaatgggaggagaagggttacttcctcagaatgttggcctcctgtatgttggaggttatgaaagaccctttgcacaaatcaaggtgacaaaagagctgaaacagtatgacaacaaaattatagaatgcaaatttgagaacaacagctgggtcttcatgagacagagaacagacaaaagttttcctaatgcctacaacactgccatggctgtgtgtaacagcatctcaaaccctgtcaccaaggagatgctgtttgagttcatcgacagatgtactgcagcttctcaaggacagaagcgaaaacatcatctggaccctgacacggagctcatgccaccaccacctcccaaaagaccacgccctttaacctaagacctgcctgtgacttsagggttaagaagaaagaggaatgaggaaaaaacgctgttgcccatttttgtmgccagagaaattgaaaaacgactgtggcttgatgttgatacacrtttgaattttttttaaaaaaagaaagttatcgtagccagcctgtaaatacttgatgcattcgtttcctcagtgctgcaatacatcrtggacktaaacatcttatttatctgataaactcagccttaccttgtggaatctgaagattgaaatatccaaaggtttaaacaagatggaaatcaatgaaaaagaggccttgtttatatatgggtagcttcacatttaatttataaagttaacaatctggaaactgtgagcccataaaacagtattttttagaagttgtgttacaactgtagcaaattttccttttaaaaaatccaggcaatggcattaaacattcttgctatcatttaccatggatttcctacatttctgagatccctgtattcaaaaacaaatgacagggttgttaagttgtactatattaaacaacttggtctggtttatatcattttaacaagttttttggaaatgtaaaagaaaaaagtaaagctccatttttgtgaattgcattgtttctaaaggaagtattttgagtattttcatctgtttgtattgtttcgactatgatatcagatatccagtgtgtccattctggcagtggttttgagttacttcatggaacttggacatacaccaccaggtcctttatgtgttgttctcctgggagacttctttttttaaatgccagggctacttctgctttacctcagtggtatcagcacattgtwaattacgttaaaacacacaactcactgtgatctatgggagtgatatcaaatacaaacgatgttgtgttccttctctcgaacaaaacagcaaagggaatgccagctaacttctttgattagaaggtaatgtcatggaatagaatgctgtcaccagaaaatgctctcccactgctagataaatgcagaggcaaagtgtagacatctgtaggaactaaatatcaaggaaatcaagacatttattttcaaagcgagaattctatctacattctattctgcggatgttatttctgttatacatctgaattttaaaatgtttactgatagataatggatttaaagggcggctaattgattgtctgccattgttgataaactgttctaattggtttgtgaaagaactctgagaattagctaaatggaggctagtgtatttatttttagaggtacatgttttaagtaaatgtatttaaaacaaattttcatggtctgaattgtatatgtaaatgcatatctgtgtaagtatatgcaagtgtatattcttctactgattcagtcagacacgaaatccaactgaattacccggtagactgaatatctgacgggatttctatatggacatagcacagatgaaccaaaaatgtatttatattcacctgagttttaatgtttttaaacaaagttttctcctgcagtgcttttctatatgaaatagttgagtcaagcttgggcttttttcttcgttgttcccaagtcatgtaatgtatagtgaatttatccaaaacgccattgtaacgttttttactagagtgtttttgcacatttgggcgctaaagggattaaaacaactgatgccacaatgactattgaaggagggaaaattctcaaggttccatagtatcttttacaaaatggattaaaaaaaaaatgcctatgcaacttcaaatagtctgatgcctgcttccccaggacgagtgactcttccacggtgtgctgctttccctccragcctgtggaaaggcagagcccttttgcagatacgaaagcaagcttttgccaatgatctttaatggagttaaaatgtttatggtaattgtaacctttcaaatgagttacgtgaaaagagcatctcacttttaatacacccagatattttcttcaagtctttgtgcattttagcaggacttaattttcttaatttattctttcctttcaattatagtgacatagagtagttggccttataagtagatcccatttagcccctgaacataataccatctgcagtattataaaagtcatttagaaggtcagggggataatctagaggcaggatyttggacattgtgaaggaaatgtgctccttctcagctcacttcaataactattttctgagactgaagttttttagacaagaataagaaaactttgctttcttcagttatcacatgtgaaagcttttgctttttgttaggaaaaggtgtggatgactctactgcgtggatggttacatttgctttccgtgaaatgctcagaaaatgtcaggacattccttttccaattgtgtgtcagtgcgtattgtaataaaactactgatttaaattag

SEQ ID NO: 1931 - DNA, 453 bp, Homo sapiens
aaaaaagtgaaaatggatttctgtcccataccatacataaaaatcaatttcaggtgtakcaggaaccaaaacagggaaaacaaaactttaaaacacttagagaaattcctcaaggatctagaactagaaataccatttgacccagcaatcccattactgggtatatacccaaaagattataaatcatgctgctataaagacacatgcacacgtatgtttattgtggcactactcacaatagcaaagacttggaaccaacccaaatgtccaacaatgatagactggattaagacaatgtggcacatatacaccatggaatactatgcagccataaaaaatgatgagttcatgtcctttgtagggacatggatgaagctggaaaccatcattctcagcaaactatcacaaggacaaaaaaccaaacaccatatgttctcactcacaggcgggaat

SEQ ID NO: 1932 - DNA, 8942 bp, Homo sapiens
ttcgcgatggactgggcctccccgccgcgccgccgccgccgtcgcccgcagcaccgcgcgggcctctgagttgcagggcctgaggagccgcgtgctggggactggacgtccgctggctgctgccgcacgcgagaacctctcgcttccctgtcaccaggtcctcgcggaggaaggggagggacgaggcgcggcttttcctgtgccgcctgcccggttcgacctgcgcggcctgcggcttcttgggaactctagggccgcggccgggcctggctctgccggcggcctgttgggagctggatcggagcggtttggaacgacaagcccgacaaagagacttttaaaaaaccatggcagatgtggacccagatacattgctggaatggctacagatgggacagggagatgaaagggacatgcaactaatagcccttgaacagctatgcatgctgcttttgatgtctgacaacgtggatcgttgttttgaaacatgtcctcctcgyactttcttrccagccctttgcaaaatttttcttgatgaaagtgctccagacaatgtattagaggtgacagcccgtgccataacatactacctggatgtatctgcggaatgtacccgaaggattgttggggtagatggagctataaaagcactttgtaatcgtttggttgtagttgaacttaacaacaggactagcagagacttagcygaacagtgtgtaaaggtattagaactgatatgtactcgtgagtcaggagcagtctttgaggctggtggtttgaattgtgtgcttaccttcattcgtgacagtggacatctagttcataaagacaccttgcactctgctatggctgtggtatcaagactctgtggcaaaatggagcctcaagattcttctttagaaatttgtgtagaatctctgtctagtttattaaagcatgaagatcatcaggtttcagatggagctctgcgatgctttgcatcactggctgaccgatttacccgtcgtggtgttgacccagctccattagccaagcatggattaactgaggagctgttatctcgaatggctgctgctggtggtactgtttcaggaccatcatcagcatgcaaaccaggtcgcagcaccacaggagctccatccaccactgcagattccaaattgagtaatcaggtgtcaacaattgtaagtctgctctcaacactttgcagaggctctccggtagtaacacatgatcttctgaggtcggagcttccagattcaattgaaagtgcattgcagggtgatgaaagatgtgtgcttgatactatgcgtttggttgaccttctcttggtgctattatttgaaggacgaaaagctttgccaaagtctagtgctggatctacaggcagaatcccaggactccggagattagatagttctggggagcgctcacatcggcagcttatagattgtattcgaagtaaagataccgatgcacttatagatgcaattgacacaggagcctttgaagtaaattttatggatgatgtaggtcagactctattaaactgggcctctgcttttggaactcaggaaatggtagaatttctttgtgagagaggtgcagatgttaatagaggtcaaaggtcatcatcattacattatgctgcatgttttggaagacctcaagtagcaaagactctgttacggcatggtgcaaatccagatctgagagatgaagatgggaaaactccattagataaagctcgagaaaggggccatagtgaagtggtagctattcttcagtctccaggtgattggatgtgtccagttaataaaggagatgataagaaaaagaaagatacaaacaaagatgaagaagaatgtaatgagcccaaaggagatccggaaatggcacccatatacttgaaaaggttattgccagtgtttgcacaaacatttcagsaaactatgctgccttcaataaggaaagcaagtcttgctctaattcgaaaaatgattcatttttgctctgaagcactgttaaaagaagtttgtgattctgatgttggtcacaatttgcctacaatactagtggaaatcactgcaactgtcctggatcaagaggatgatgatgatggccacttgctggctttgcagatcataagggatttagtagataaaggtggtgatatatttttggatcagctagccagacttggtgtaattagcaaagtgtcaacgttggcaggtccttcctctgatgatgagaatgaagaggaatcaaaaccagaaaaagaagatgaaccacaggaagatgctaaagaattgcarcaaggtaaaccatatcattggagagactggtcaatcattaggggaagggactgcttatatatttggagtgatgcagcagccttggaattatctaatggcagtaatggatggttcagatttatcttggatggaaaacttgccaccatgtattcaagtggtagtccggaaggtggatctgacagttcagaaagccgaagtgaattcttagagaagttacaaagagctcgaggccaagtaaagccatctacttcaagtcaaccyataytgtcagcaccaggacccactaaacttactgtaggaaattggtcactgacatgtttgaaagaaggagaaattgctattcataattcagatggtcagcaagctacaatattgaaagaagatttacctggttttgtatttgaatctaatagaggaaccaaacattcatttactgcagaaacttccctgggttcagaatttgtgactggctggactggcaaaagaggcagaaaactgaaatctaagttagaaaaaacaaagcaaaaggtacgaactatggctcgagatttatacgatgaccattttaaagctgttgaaagcatgcctcgtggagtagtggtaacactcagaaacatagcaactcagttagagtcatcttgggaacttcatacaaatagacaatgtattgagagtgagaacacttggagagatttaatgaagacagctttagaaaacctaattgtacttttgaaggatgaaaacacaatttcaccatatgaaatgtgtagcagtggcttggtacaagcacttcttactgtgttaaacaatagcatggatttggatatgaaacaagattgtagtcaactggtagaaagaataaatgtttttaaaactgcctttagtgaaaatgaagatgatgaaagtcgaccagcagttgcgttaattcgaaagttaatagctgtactagaatctattgaacgtctacctctccatttgtatgatacaccaggatccacatataacctccagatacttacaaggagattacgatttcggttggaacgtgcacctggtgaaactgcattgattgacaggactggcagaatgttgaagatggaacctttggctacagttgaatctctggaacagtaccttttgaaaatggtagcaaaacagtggtatgattttgaccgatcttcatttgtttttgttcgaaaattaagagaaggacaaaattttatatttcggcaccagcatgattttgatgaaaatggaatcatttactggattggaacaaatgcaaaaactgcttatgaatgggtaaatccagctgcctatggacttgtagtagtaacgtcatcagaaggaagaaatctaccttatggccgcttagaagacatactaagtcgtgataattcagctttaaattgtcatagcaatgatgataagaatgcctggtttgccatagatctgggtctctgggtgataccatcagcatatacacttcgtcatgctcgtggttatggaaggtctgcactgagaaattgggttttccaggtatccaaagatggacagaactggacttctttgtatacccatgttgatgactgcagtctcaatgaaccagggtcaactgcaacttggcctcttgatccaccaaaggatgagaaacaagggtggagacatgtgagaattaaacagatggggaaaaatgccagtggacaaacacactacctctcattatctggattcgaactttatggcactgtaaatggagtatgtgaagatcagctagggaaagcagctaaagaagcagaagctaatcttagacggcagagacgtctagtacgttcccaggttctgaaatacatggttccaggagctcgtgttatcagaggcctggattggaaatggcgagatcaggatggcagcccacagggagaaggcactgtcacaggagaactacacaatggctggattgatgtcacctgggatgctggtggctcaaactcttaccgtatgggcgcagaaggaaaatttgacctcaagcttgcaccagggtacgaccctgatacagtggcatcacccaaacctgtttcatccactgtttcaggcacaacgcaatcatggagcagcttggtgaaaaacaactgtccagacaagacatctgctgctgcaggctcctcaagtagaaaaggaagcagcagttctgtgtgtagcgtggccagtagcagcgacatcagcttgggttcgaccaaaacggaacggagatcagaaattgtaatggaacacagtatagtttcaggagctgatgtccatgaaccaattgttgttctttcatctgctgaaaacgtccctcaaacagaagtagggtcatcytccagtgcaagcaccagcaccttaacagcggaaacgggaagtgaaaatgctgaaaggaagttaggccctgatagttctgttcgtactcctggggagtctagtgcaatatccatgggaattgtcagtgttagttctcctgatgttagttcagtatctgaattaactaataaagaagcagcttcacaacgacctcttagctcttcagcaagtaacagactgtcagtgagttctttgttggctgctggggcccctatgagctctagtgcaagtgtacctaacctgtcctcaagagaaacatctagcttggagagttttgtaaggagagtggcaaacatagcacggactaatgccacgaacaacatgaatctaagccgaagcagcagtgataacaacactaatactttggggaggaatgtgatgagcacagcaacttctcctcttatgggtgctcagagtttccctaatttgaccacacctggtactacatcaacagtgactatgtcaacatccagtgttactagcagcagcaatgtagctacagcaacaacagttttatcagttggtcaatctttaagtaacactttaaccaccagcctcacatcaacttccagtgagagtgacacaggtcaggaagcakaatattccttatatgatttccttgatagctgccgtgccagtactctattggctgagctcgatgatgatgaggacttacctgagccagatgaagaagatgatgagaatgaagatgacaatcaggaggaccaagaatacgaggaggttatgattctgagacgcccatccctgcaacgtcgagctggctcccgctctgatgtaacgcatcatgctgttacctcgcagctaccacaggtacctgctggagcagggagccgacctattggggagcaggaagaagaagagtacgaaactaaaggaggacgccggagaacatgggatgatgattatgtgctaaagagacagttttctgcattggttcctgcttttgatcctagacctggtcgtactaatgtccagcagacaactgatctagaaataccacccccagggacccctcattcagagctcttggaagaagtcgaatgtactccgtcacctcgattagctctcactttgaaagtaacaggtcttggaacgactcgtgaagttgaattaccactcaccaatttcagatcaaccatcttttactatgtacaaaaattgcttcaattgtcctgtaatggcaatgtgaaatcagataaacttaggcgtatttgggagccmamatacacaatcatgtacagagaaatgaaggattctgataaagaaaaggaaaatggaaaaatgggttgctggtctatagagcatgtggagcagtaccttggcactgatgaattaccaaagaatgacttgataacctacctgcagaagaatgcagacgctgctttcctgcgccactggaaattaactggcactaataaaagtattaggaaaaacagaaattgttctcagctcatagctgcatataaggatttttgtgagcatggaacaaagtctgggttaaaccagggggccatttctactcttcaaagtagtgatattcttaatttaacaaaagaacaacctcaggccaaagcaggcaatggacagaactcttgtggagtagaagatgtccttcagcttctgcgtattctrtatatagttgcaagtgacccttattcaagaatatcccaggaagatggtgatgaacagcytcagtttacttttccaccagatgaattcactagcaaaaaaattacaacaaaaatattacagcagattgaggaaccattggcactggcaagtggggctctgccagactggtgtgaacaattaaccagcaaatgtccttttctaataccatttgaaactagacagctttatttcacatgtacagcatttggcgcctcaagagcaatagtatggttacagaaccgacgtgaagccactgtggarcgaacgagaaccacaagcagtgttaggcgagatgaccctggagagtttcgagttggtcgtctcaagcatgaaagagtaaaagttccacgtggcgagtcactgatggaatgggctgagaatgtcatgcaaatacatgcagatcggaaatcagttcttgaggttgaatttttaggagaagaaggaactggcttgggacccacattagagttttatgctctggtggcagcagaattccagagaactgacttgggagcttggctttgtgatgataattttccagatgatgaatctcgtcacgttgatcttggaggtggattgaaacctcctggatattatgtgcagaggtcatgtggactgttcacagcaccatttccacaggatagtgatgagcttgaaaggatcacgaaactgtttcatttccttggaattttcttggccaaatgcattcaagacaatagacttgtggacttacctatttctaaacctttttttaaacttatgtgtatgggtgacattaaaagcaatatgagtaaactgatttatgagtcacgaggtgatagagacttacactgtactgaaagtcagtctgaagcttctacagaagaaggtcatgattcactctcggtaggaagctttgaagaggattcaaaatcagaatttattcttgatccccctaaaccaaaacccccagcttggtttaatggaattttgacttgggaagactttgaattagtaaacccacacagagccagatttttaaaagaaattaaagaccttgctatcaagaggcgccaaattttaagcaacaaaggtctttctgaagatgagaagaacacaaaattacaggaactagtgctgaagaatccatcaggttctgggcctccacttagcatagaggatttaggtttaaatttccagttttgcccttcctcaagaatatatggttttacagctgtggatctcaagccaagtggtgaagatgagatgataacaatggataatgcagaagaatatgtggatttgatgtttgacttttgtatgcatacgggtattcagaaacaaatggaagcctttagagatgggtttaataaagtttttccaatggagaaattaagttccttcagccatgaagaagtccaaatgattctttgtggaaaccagtcaccatcctgggcagcagaggatattatcaattacactgaacctaagctgggttatacacgtgacagccctggtttcctgaggtttgtgagggttttatgtggcatgtcttctgatgaaaggaaagcattcttgcagtttaccactggttgttcaactctacccccaggtggactggctaacctgcatcccaggctyacggttgtacgcaaggttgatgctactgatgcaagctatccatcagtcaatacatgtgtgcattaccttaagttgcctgaatattcttccgaggagatcatgagagagcgcctgctagctgctacaatggagaaaggctttcatctcaattgagctttgaagtgcaatgggagacatcagagactttaaaagctaatgacacttgcctttttttccaccattaaggctttaagaacatgtggaataagttttttagctgctaatgacaaaacaaatcctgtaactacccagccagcaagtatatagcacagaacactgtgttactttacaagggcttatgtgactggaataaggtggtcccacttgactgttccaaagagcagcttctcagatcttcagtgttcactggtaaatttctaacagtgtatttgtgtaaagtttgtcatttcatactccatacactacagttgctgtcactgatccctgttttgctggcttttaagctacttggtcaaaaatcctgcttccttaaaacatagagaattaatgagcatctcaagctttttcttttcctttttaatgatgcctgcactatcaagagtattctagtgttctctctttgtttggcatataatcatgcaccaaactttttatttctttaaggtgggagtatatttttatttcctaaatgccatactatgaagatcaaagtcttaagtgtgtttgcagctcaaaaataaagatgtattaaggggggaaaacctggtytaagtgcaaggcacacttacagcgagttttactttcggttgtattttctttktatattataaacatttatttaacttgttgccrtttgaagtaaaaaatttccaaaatgtatgctcaacaataatcattaaaatgtttgcagcgtac

SEQ ID NO: 1933 - DNA, 1701 bp, Homo sapiens
ttcgcgatggactgggcctccccgccgcgccgccgccgccgtcgcccgcagcaccgcgcgggcctctgagttgcagggcctgaggagccgcgtgctggggactggacgtccgctggctgctgccgcacgcgagaacctctcgcttccctgtcaccaggtcctcgcggaggaaggggagggacgaggcgcggcttttcctgtgccgcctgcccggttcgacctgcgcggcctgcggcttcttgggaactctagggccgcggccgggcctggctctgccggcggcctgttgggagctggatcggagcggtttggaacgacaagcccgacaaagagacttttaaaaaaccatggcagatgtggacccagatacattgctggaatggctacagatgggacagggagatgaaagggacatgcaactaatagcccttgaacagctatgcatgctgcttttgatgtctgacaacgtggatcgttgttttgaaacatgtcctcctcgyactttcttrccagccctttgcaaaatttttcttgatgaaagtgctccagacaatgtattagaggtgacagcccgtgccataacatactacctggatgtatctgcggaatgtacccgaaggattgttggggtagatggagctataaaagcactttgtaatcgtttggttgtagttgaacttaacaacaggactagcagagacttagcygaacagtgtgtaaaggtattagaactgatatgtactcgtgagtcaggagcagtctttgaggctggtggtttgaattgtgtgcttaccttcattcgtgacagtggacatctagttcataaagacaccttgcactctgctatggctgtggtatcaagactctgtggcaaaatggagcctcaagattcttctttagaaatttgtgtagaatctctgtctagtttattaaagcatgaagatcatcaggtttcagatggagctctgcgatgctttgcatcactggctgaccgatttacccgtcgtggtgttgacccagctccattagccaagcatggattaactgaggagctgttatctcgaatggctgctgctggtggtactgtttcaggaccatcatcagcatgcaaaccaggtcgcagcaccacaggagctccatccaccactgcagattccaaattgagtaatcaggtgtcaacaattgtaagtctgctctcaacactttgcagaggctctccggtagtaacacatgatcttctgaggtcggagcttccagattcaattgaaagtgcattgcagggtgatgaaagatgtgtgcttgatactatgcgtttggttgaccttctcttggtgctattatttgaaggacgaaaagctttgccaaagtctagtgctggatctacaggcagaatcccaggactccggagattagatagttctggggagcgctcacatcggcagcttatagattgtattcgaagtaaagataccgatgcacttatagatgcaattgacacaggaggtcagaaaatatttttttaaatataaaaagaaagttgtgagataaccatataggcagtttctagttttcggacagtactcttagaaatccagataacaaagtggcaccccttcgatattctcccctatccctgtgcataattatgtaattatcagcttggttcttggtgaaacctgaataaatgcttgttgaatgrgt

SEQ ID NO: 1934 - DNA, 8996 bp, Homo sapiens
ttcgcgatggactgggcctccccgccgcgccgccgccgccgtcgcccgcagcaccgcgcgggcctctgagttgcagggcctgaggagccgcgtgctggggactggacgtccgctggctgctgccgcacgcgagaacctctcgcttccctgtcaccaggtcctcgcggaggaaggggagggacgaggcgcggcttttcctgtgccgcctgcccggttcgacctgcgcggcctgcggcttcttgggaactctagggccgcggccgggcctggctctgccggcggcctgttgggagctggatcggagcggtttggaacgacaagcccgacaaagagacttttaaaaaaccatggcagatgtggacccagatacattgctggaatggctacagatgggacagggagatgaaagggacatgcaactaatagcccttgaacagctatgcatgctgcttttgatgtctgacaacgtggatcgttgttttgaaacatgtcctcctcgyactttcttrccagccctttgcaaaatttttcttgatgaaagtgctccagacaatgtattagaggtgacagcccgtgccataacatactacctggatgtatctgcggaatgtacccgaaggattgttggggtagatggagctataaaagcactttgtaatcgtttggttgtagttgaacttaacaacaggactagcagagacttagcygaacagtgtgtaaaggtattagaactgatatgtactcgtgagtcaggagcagtctttgaggctggtggtttgaattgtgtgcttaccttcattcgtgacagtggacatctagttcataaagacaccttgcactctgctatggctgtggtatcaagactctgtggcaaaatggagcctcaagattcttctttagaaatttgtgtagaatctctgtctagtttattaaagcatgaagatcatcaggtttcagatggagctctgcgatgctttgcatcactggctgaccgatttacccgtcgtggtgttgacccagctccattagccaagcatggattaactgaggagctgttatctcgaatggctgctgctggtggtactgtttcaggaccatcatcagcatgcaaaccaggtcgcagcaccacaggagctccatccaccactgcagattccaaattgagtaatcaggtgtcaacaattgtaagtctgctctcaacactttgcagaggctctccggtagtaacacatgatcttctgaggtcggagcttccagattcaattgaaagtgcattgcagggtgatgaaagatgtgtgcttgatactatgcgtttggttgaccttctcttggtgctattatttgaaggacgaaaagctttgccaaagtctagtgctggatctacaggcagaatcccaggactccggagattagatagttctggggagcgctcacatcggcagcttatagattgtattcgaagtaaagataccgatgcacttatagatgcaattgacacaggagcctttgaagtaaattttatggatgatgtaggtcagactctattaaactgggcctctgcttttggaactcaggaaatggtagaatttctttgtgagagaggtgcagatgttaatagaggtcaaaggtcatcatcattacattatgctgcatgttttggaagacctcaagtagcaaagactctgttacggcatggtgcaaatccagatctgagagatgaagatgggaaaactccattagataaagctcgagaaaggggccatagtgaagtggtagctattcttcagtctccaggtgattggatgtgtccagttaataaaggagatgataagaaaaagaaagatacaaacaaagatgaagaagaatgtaatgagcccaaaggagatccggaaatggcacccatatacttgaaaaggttattgccagtgtttgcacaaacatttcagsaaactatgctgccttcaataaggaaagcaagtcttgctctaattcgaaaaatgattcatttttgctctgaagcactgttaaaagaagtttgtgattctgatgttggtcacaatttgcctacaatactagtggaaatcactgcaactgtcctggatcaagaggatgatgatgatggccacttgctggctttgcagatcataagggatttagtagataaaggtggtgatatatttttggatcagctagccagacttggtgtaattagcaaagtgtcaacgttggcaggtccttcctctgatgatgagaatgaagaggaatcaaaaccagaaaaagaagatgaaccacaggaagatgctaaagaattgcarcaaggtaaaccatatcattggagagactggtcaatcattaggggaagggactgcttatatatttggagtgatgcagcagccttggaattatctaatggcagtaatggatggttcagatttatcttggatggaaaacttgccaccatgtattcaagtggtagtccggaaggtggatctgacagttcagaaagccgaagtgaattcttagagaagttacaaagagctcgaggccaagtaaagccatctacttcaagtcaaccyataytgtcagcaccaggacccactaaacttactgtaggaaattggtcactgacatgtttgaaagaaggagaaattgctattcataattcagatggtcagcaagctacaatattgaaagaagatttacctggttttgtatttgaatctaatagaggaaccaaacattcatttactgcagaaacttccctgggttcagaatttgtgactggctggactggcaaaagaggcagaaaactgaaatctaagttagaaaaaacaaagcaaaaggtacgaactatggctcgagatttatacgatgaccattttaaagctgttgaaagcatgcctcgtggagtagtggtaacactcagaaacatagcaactcagttagagtcatcttgggaacttcatacaaatagacaatgtattgagagtgagaacacttggagagatttaatgaagacagctttagaaaacctaattgtacttttgaaggatgaaaacacaatttcaccatatgaaatgtgtagcagtggcttggtacaagcacttcttactgtgttaaacaatagcatggatttggatatgaaacaagattgtagtcaactggtagaaagaataaatgtttttaaaactgcctttagtgaaaatgaagatgatgaaagtcgaccagcagttgcgttaattcgaaagttaatagctgtactagaatctattgaacgtctacctctccatttgtatgatacaccaggatccacatataacctccagatacttacaaggagattacgatttcggttggaacgtgcacctggtgaaactgcattgattgacaggactggcagaatgttgaagatggaacctttggctacagttgaatctctggaacagtaccttttgaaaatggtagcaaaacagtggtatgattttgaccgatcttcatttgtttttgttcgaaaattaagagaaggacaaaattttatatttcggcaccagcatgattttgatgaaaatggaatcatttactggattggaacaaatgcaaaaactgcttatgaatgggtaaatccagctgcctatggacttgtagtagtaacgtcatcagaaggaagaaatctaccttatggccgcttagaagacatactaagtcgtgataattcagctttaaattgtcatagcaatgatgataagaatgcctggtttgccatagatctgggtctctgggtgataccatcagcatatacacttcgtcatgctcgtggttatggaaggtctgcactgagaaattgggttttccaggtatccaaagatggacagaactggacttctttgtatacccatgttgatgactgcagtctcaatgaaccagggtcaactgcaacttggcctcttgatccaccaaaggatgagaaacaagggtggagacatgtgagaattaaacagatggggaaaaatgccagtggacaaacacactacctctcattatctggattcgaactttatggcactgtaaatggagtatgtgaagatcagctagggaaagcagctaaagaagcagaagctaatcttagacggcagagacgtctagtacgttcccaggttctgaaatacatggttccaggagctcgtgttatcagaggcctggattggaaatggcgagatcaggatggcagcccacagggagaaggcactgtcacaggagaactacacaatggctggattgatgtcacctgggatgctggtggctcaaactcttaccgtatgggcgcagaaggaaaatttgacctcaagcttgcaccagggtacgaccctgatacagtggcatcacccaaacctgtttcatccactgtttcaggcacaacgcaatcatggagcagcttggtgaaaaacaactgtccagacaagacatctgctgctgcaggctcctcaagtagaaaaggaagcagcagttctgtgtgtagcgtggccagtagcagcgacatcagcttgggttcgaccaaaacggaacggagatcagaaattgtaatggaacacagtatagtttcaggagctgatgtccatgaaccaattgttgttctttcatctgctgaaaacgtccctcaaacagaagtagggtcatcytccagtgcaagcaccagcaccttaacagcggaaacgggaagtgaaaatgctgaaaggaagttaggccctgatagttctgttcgtactcctggggagtctagtgcaatatccatgggaattgtcagtgttagttctcctgatgttagttcagtatctgaattaactaataaagaagcagcttcacaacgacctcttagctcttcagcaagtaacagactgtcagtgagttctttgttggctgctggggcccctatgagctctagtgcaagtgtacctaacctgtcctcaagagaaacatctagcttggagagttttgtaaggagagtggcaaacatagcacggactaatgccacgaacaacatgaatctaagccgaagcagcagtgataacaacactaatactttggggaggaatgtgatgagcacagcaacttctcctcttatgggtgctcagagtttccctaatttgaccacacctggtactacatcaacagtgactatgtcaacatccagtgttactagcagcagcaatgtagctacagcaacaacagttttatcagttggtcaatctttaagtaacactttaaccaccagcctcacatcaacttccagtgagagtgacacaggtcaggaagcakaatattccttatatgatttccttgatagctgccgtgccagtactctattggctgagctcgatgatgatgaggacttacctgagccagatgaagaagatgatgagaatgaagatgacaatcaggaggaccaagaatacgaggaggttatgattctgagacgcccatccctgcaacgtcgagctggctcccgctctgatgtaacgcatcatgctgttacctcgcagctaccacaggtacctgctggagcagggagccgacctattggggagcaggaagaagaagagtacgaaactaaaggaggacgccggagaacatgggatgatgattatgtgctaaagagacagttttctgcattggttcctgcttttgatcctagacctggtcgtactaatgtccagcagacaactgatctagaaataccacccccagggacccctcattcagagctcttggaagaagtcgaatgtactccgtcacctcgattagctctcactttgaaagtaacaggtcttggaacgactcgtgaagttgaattaccactcaccaatttcagatcaaccatcttttactatgtacaaaaattgcttcaattgtcctgtaatggcaatgtgaaatcagataaacttaggcgtatttgggagccmamatacacaatcatgtacagagaaatgaaggattctgataaagaaaaggaaaatggaaaaatgggttgctggtctatagagcatgtggagcagtaccttggcactgatgaattaccaaagaatgacttgataacctacctgcagaagaatgcagacgctgctttcctgcgccactggaaattaactggcactaataaaagtattaggaaaaacagaaattgttctcagctcatagctgcatataaggatttttgtgagcatggaacaaagtctgggttaaaccagggggccatttctactcttcaaagtagtgatattcttaatttaacaaaagaacaacctcaggccaaagcaggcaatggacagaactcttgtggagtagaagatgtccttcagcttctgcgtattctrtatatagttgcaagtgacccttattcaagaatatcccaggaagatggtgatgaacagcytcagtttacttttccaccagatgaattcactagcaaaaaaattacaacaaaaatattacagcagattgaggaaccattggcactggcaagtggggctctgccagactggtgtgaacaattaaccagcaaatgtccttttctaataccatttgaaactagacagctttatttcacatgtacagcatttggcgcctcaagagcaatagtatggttacagaaccgacgtgaagccactgtggarcgaacgagaaccacaagcagtgttaggcgagatgaccctggagagtttcgagttggtcgtctcaagcatgaaagagtaaaagttccacgtggcgagtcactgatggaatgggctgagaatgtcatgcaaatacatgcagatcggaaatcagttcttgaggttgaatttttaggagaagaaggaactggcttgggacccacattagagttttatgctctggtggcagcagaattccagagaactgacttgggagcttggctttgtgatgataattttccagatgatgaatctcgtcacgttgatcttggaggtggattgaaacctcctggatattatgtgcagaggtcatgtggactgttcacagcaccatttccacaggatagtgatgagcttgaaaggatcacgaaactgtttcatttccttggaattttcttggccaaatgcattcaagacaatagacttgtggacttacctatttctaaacctttttttaaacttatgtgtatgggtgacattaaaagcaatatgagtaaactgatttatgagtcacgaggtgatagagacttacactgtactgaaagtcagtctgaagcttctacagaagaaggtcatgattcactctcggtaggaagctttgaagaggattcaaaatcagaatttattcttgatccccctaaaccaaaacccccagcttggtttaatggaattttgacttgggaagactttgaattagtaaacccacacagagccagatttttaaaagaaattaaagaccttgctatcaagaggcgccaaattttaagcaacaaaggtctttctgaagatgagaagaacacaaaattacaggaactagtgctgaagaatccatcaggttctgggcctccacttagcatagaggatttaggtttaaatttccagttttgcccttcctcaagaatatatggttttacagctgtggatctcaagccaagtggtgaagatgagatgataacaatggataatgcagaagaatatgtggatttgatgtttgacttttgtatgcatacgggtattcagaaacaaatggaagcctttagagatgggtttaataaagtttttccaatggagaaattaagttccttcagccatgaagaagtccaaatgattctttgtggaaaccagtcaccatcctgggcagcagaggatattatcaattacactgaacctaagctgggttatacacgtgacagccctggtttcctgaggtttgtgagggttttatgtggcatgtcttctgatgaaaggaaagcattcttgcagtttaccactggttgttcaactctacccccaggtggactggctaacctgcatcccaggctyacggttgtacgcaaggttgatgctactgatgcaagctatccatcagtcaatacatgtgtgcattaccttaagttgcctgaatattcttccgaggagatcatgagagagcgcctgctagctgctacaatggagaaaggctttcatctcaattgagctttgaagtgcaatgggagacatcagagactttaaaaatactagtgaagcctcttgtgtttgtgtgcagagaagtatatgatccaccatgctaatgacacttgcctttttttccaccattaaggctttaagaacatgtggaataagttttttagctgctaatgacaaaacaaatcctgtaactacccagccagcaagtatatagcacagaacactgtgttactttacaagggcttatgtgactggaataaggtggtcccacttgactgttccaaagagcagcttctcagatcttcagtgttcactggtaaatttctaacagtgtatttgtgtaaagtttgtcatttcatactccatacactacagttgctgtcactgatccctgttttgctggcttttaagctacttggtcaaaaatcctgcttccttaaaacatagagaattaatgagcatctcaagctttttcttttcctttttaatgatgcctgcactatcaagagtattctagtgttctctctttgtttggcatataatcatgcaccaaactttttatttctttaaggtgggagtatatttttatttcctaaatgccatactatgaagatcaaagtcttaagtgtgtttgcagctcaaaaataaagatgtattaaggggggaaaacctggtytaagtgcaaggcacacttacagcgagttttactttcggttgtattttctttktatattataaacatttatttaacttgttgccrtttgaagtaaaaaatttccaaaatgtatgctcaacaataatcattaaaatgtttgcagcgtacag

SEQ ID NO: 1935 - DNA, 540 bp, Homo sapiens
ttaattttaattgtacacaaattcttcatgaagttagaaaaaagcaagacactattcaatccattttataaagaaagcacaactttgataacaamacctgacaaagttattccaataaaaggcaattataggccaatctttcacatgattgtagattcaaaattatgccatagaatgtggaagtcagtgtggcgattcctcagggatctagaactagaaataccatttgacccagccatcacattactgggtatatacccaaaggattgtaaatcatgctgctataaagacacatgcacacatatgtttatagctgcactcttcacaatagcaaagacttggaaccaacccaaatgtccaacaaygatagactggattaagaaaatgtggcacatatacaccatggaatactatgcagccataaaaaatgatgaattcatgtcctttgtagggacatgaatgaaagtggaaaccatcattctcagcaaactatcacaaggacaaaaaaccaaacaccgcatattctcactcataggtggg

SEQ ID NO: 1936 - DNA, 1536 bp, Homo sapiens
aacctgtgagaagtttctacaatggtgggctcagctctcaggagaggtgcccatgcatatgtctacctggtgagtaaggccagtcacatctccagaggccatcagcaccaggcctggggatcgaggcctcctgcagcagagtgtgccacccaaagagctccaggcagtgtggtggagctgctgggcaaatsctaccctcaggacgaccacagcaacctcacccggaaggtcctcaccagagttggcaggaacctgcacaaccagcagcatcaccctctgtggctgatcaaggagagggtgaaggagcacttctacaagcagtatgtgggccgctttgggaccccgttgttctcggtctacgacaacctttctccagtggtcacgacctggcagaactttgacagcctgctcatcccagctgatcaccccagcaggaagaagggggacaactattacctgaatcggactcacatgctgagagcgcacacgtctgcacaccagtgggacttgctgcacgcgggactggatgccttcctggtggtgggtgatgtctacaggcgtgaccagatcgactcccagcactaccctattttccaccagctggaggccgtgcggctcttctccaagcatgagttatttgctggtataaaggatggagaaagcctgcagctctttgaacaaagttctcgctctgcgcataaacaagagacacacaccatggaggccgtgaagcttgtagagtttgatcttaagcaaacgcttaccaggctcatggcacatctttttggagatgagctggagataagatgggtagactgctacttcccttttacacatccttcctttgagatggagatcarctttcatggagaatggctggaagttcttggctgcggggtgatggaacaacaactggtcaattcagctggtgctcaagaccgaatcggctgggcttttggcctaggattagaaaggctagccatgatcctctacgacatccctgatatccgtctcttctggtgtgaggacgagcgcttcctgaagcagttctgtgtatccaacattaatcagaaggtgaagtttcagcctcttagcaaatatccggctgtgatcaatgatatttcattctggttgccctctgagaattacgcagaaaatgatttctatgacttagtccgaacaattggaggagacctggtggaaaaggttgatctcatagacaagtttgtacatccaaagacgcacaagaccagccactgctaccgcatcacgtaccgccacatggaacggactctgtcccagagagaggtcaggcacatccaccaggccttgcaggaggctgcagtccagctgttgggtgtggagggcaggttctgatgtcaccacttcactcaggctgcagccctcttggggctccaggatttgctgaaagagaaaaagatatggtttgtgaactggggcatcaatcatcttttgataaatggatcagttttaggactttcagaaaataaaagatcgctcttgaaaagctgttga

SEQ ID NO: 1937 - DNA, 2303 bp, Homo sapiens
atgcctccgccccgccccgatcccgcccccgcccggaggctcggracccagcagccgctccacgcggcgggagggcggggaaataagaggactggccgcccgtgcatccagccaagctsctggcggacggatatcggaggcccaggcattcgagggacgtgcagttgcatcacggagagcctttgggaaccgtctggggtcttggcggagacatttgtgtttcgggggcagcgccccttcctacctccaggaggccgcgttgcccgggttaccgaaggccgccgcaccgacgccccgcccctgaccgccgatgcccctcccacgccggctgcggtcgccctcggcgctgcctgagagagcttgcgggatttcaagggtgacttgactccgcccgatcctggtcggcagggtggggtttcttggcattcctcaggccgggggatgcgacgtctgggtgtggaggtgrtgagctaggggttctgtggcactccggctctgctcagggcgacctgcgtaggggcctctggggcaggcccgctttctgtcaaaatggcagcgcccagcgtgcgcgggtatctctgaagttggggtttaagattcttgcccgtgagagcgaacgagcctgccgtrcttctgattttgaaacacctgggtctgggcttcccgggcgagcggtggagatgagatttcactatgatgtccagggtggtctcaaactcctcagtgcctctcctgtcttggcttcccaaagagctcagattatagctaacctgtgagaagtttctacaatggtgggctcagctctcaggagaggtgcccatgcatatgtctacctggtgagtaaggccagtcacatctccagaggccatcagcaccaggcctggggatcgaggcctcctgcagcagagtgtgccacccaaagagctccaggcagtgtggtggagctgctgggcaaatsctaccctcaggacgaccacagcaacctcacccggaaggtcctcaccagagttggcaggaacctgcacaaccagcagcatcaccctctgtggctgatcaaggagagggtgaaggagcacttctacaagcagtatgtgggccgctttgggaccccgttgttctcggtctacgacaacctttctccagtggtcacgacctggcagaactttgacagcctgctcatcccagctgatcaccccagcaggaagaagggggacaactattacctgaatcggactcacatgctgagagcgcacacgtctgcacaccagtgggacttgctgcacgcgggactggatgccttcctggtggtgggtgatgtctacaggcgtgaccagatcgactcccagcactaccctattttccaccagctggaggccgtgcggctcttctccaagcatgagttatttgctggtataaaggatggagaaagcctgcagctctttgaacaaagttctcgctctgcgcataaacaagagacacacaccatggaggccgtgaagcttgtagagtttgatcttaagcaaacgcttaccaggctcatggcacatctttttggagatgagctggagataagatgggtagactgctacttcccttttacacatccttcctttgagatggagatcarctttcatggagaatggctggaagttcttggctgcggggtgatggaacaacaactggtcaattcagctggtgctcaagaccgaatcggctgggcttttggcctaggattagaaaggctagccatgatcctctacgacatccctgatatccgtctcttctggtgtgaggacgagcgcttcctgaagcagttctgtgtatccaacattaatcagaaggtgaagtttcagcctcttagcaaatatccggctgtgatcaatgatatttcattctggttgccctctgagaattacgcagaaaatgatttctatgacttagtccgaacaattggaggagacctggtggaaaaggttgatctcatagacaagtttgtacatccaaagacgcacaagaccagccactgctaccgcatcacgtaccgccacatggaacggactctgtcccagagagaggtcaggcacatccaccaggccttgcaggaggctgcagtccagctgttgggtgtggagggcaggttctgatgtcaccacttcactcaggctgcagccctcttggggctccaggatttgctgaaagagaaaaagatatggtttgtgaactggggcatcaatcatcttttgataaatggatcagttttaggactttcagaaaataaaagatcgctcttgaaaagctgttga

SEQ ID NO: 1938 - DNA, 3664 bp, Homo sapiens
gtcactgtcccggaacctggggcagcggagtcccgtgcgccctgtggtgacagctcaggagggtgtgtgcgctcagcaggggccagcatggaccagtctgtggcaatccaggagacgctggctgagggggaatactgccygcaggcggtgcaaggtgtgctgtgtgagggggacagccggcagagccgcctcctgggactcgtgcgctaccgcctggagcayrgcggccaggaacacgctctcttcctctatacgcaccggaggatggccattaccggggacgatgtctctctggaccagatagtgccagtctcgcgggattttacgctggaagaagtgtccccagatggtgaactctacatccttggctcagatgtgaccgtccagctggacacagcagagcttagcctcgtattccaactgccctttggttcacaaaccaggatgttcctccacgaagttgccagggcctgtccaggcttcgattctgcgacccgggatcctgaattcctgtggctgtctcggtataggtgcgcagagctggagctggagatgccaacgccgcgcggttgtaactcggccctagttacctggccagggtacgcgacaattggcggaggcaggtggttctaactttgatggtttgagaccaaatgggaagggagtgcctatggaccaaagctccaggggtcaagataaaccagaaagcttgcaaccaagacagaataaatccaagtccgaaattactgacatggttcgctcctccactatcacagtgtcggacaaggctcatattttatccatgcagaagtttggactgcgagatacaattgtgaaatcacatctactacagaaagaagaggattacacctatatccagaacttcaggttttttgcgggaacatacaatgtaaatgggcagtcccccaaagaatgcctccggctgtggctgagcaatggtatmcaggccccagatgtctattgtgtagggttccaggagcttgatctgagtaaggaagcttttttctttcacgataccccaaaggaggaagagtggttcaaagctgtgtcagagggtcttcatccagatgccaaatatgcaaaggtgaagcttatccgactggttgggattatgctgctgttatatgtcaaacaggagcatgcagcttatatctcagaagtggaagccgagactgtggggacaggaatcatggggaggatgggcaacaagggaggcgtggcgatcaggttccagttccacaacaccagcatctgcgttgtgaattctcacttggcagcccacattgaagagtatgagaggaggaaccaggactataaggacatttgttctcgaatgcagttttgtcagcctgacccaagccttccccctctcaccatcagcaaccatgatgtgatcttgtggctgggggacctcaactacaggatagaagagctggatgtggaaaaagtgaaaaagctcatcgaagagaaggaytttcaaatgctgtatgcatatgatcagctgaaaattcaggtggccgcaaagactgtctttgaaggcttcacagagggtgagctcacattccagcctacttacaagtatgatacgggctctgacgactgggataccagtgagaagtgccgtgctcctgcctggtgtgatcggattctctggaaagggaagaacatcactcagctgagttaccagagccacatggccctgaagaccagtgaccacaagcctgtcagctcagtgtttgacatcggggtgagggtcgtaaatgacgagctttaccggaagacactggaggaaattgttcgctccctggataagatggaaaatgccaacattccttctgtgtccctgtccaagcgagagttctgttttcagaatgtgaagtacatgcaattgaaagtagaatcctttacaattcataatggacaagtaccctgtcattttgaattcatcaacaagcctgatgaagagtcttactgtaagcagtggctgaatgccaaccccagcagaggcttcctcctgccagattctgatgttgagattgacttggagctcttcgtaaataagaygacagctacaaagctcaactcgggtgaagacaaaattgaggacattctggttctgcacttggacaggggaaaggattactttttgtctgtgtctgggaactacctgcccagctgttttgggtctcccattcatacactgtgttacatgagagagccaatcttggacctaccacttgaaaccattagtgagctgactctgatgccagtatggactggagatgatgggagccagttggatagccccatggaaatccccaaagagctctggatgatggttgattacctgtaccgaaatgctgtccagcaggaagatctgtttcagcaaccaggcctgaggtcagaatttgaacatatcagggactgcttggatactggaatgattgataacctctctgccagcaatcattctgtagccgaagccctgctgcttttcctggagagccttccagagcctgtcatctgttacagcacctaccataactgcttggagtgttctggcaactacacagcaagcaaacaggtcatttctastctccccatattccacaaaaatgtcttccactacttgatggcgtttttgcgagaactgctgaaaaattcagcaaaaaatcatttgsatgagaatattctagctagcatatttggcagcttattgcttcgaaacccagctggtcaccaaaagcttgatatgacagagaagaagaaggctcaagaatttattcaccagttcctctgcaacccamtctgagcctmtctctcctcctattttacttgaggctgccaattaccagccccacctgtttcagctcaagagatgccttaagataattatgtgaggccacttggtagcaagaatggcagctatttcctgagcctagtaccccarttaagcccaccattggttagcacactcagcgctgtgagtcgtgaagacacgggagaaaatccaccataataaaactgacattcaattttcaactttagttatttaacacagatttttttattttttatttttttttattttgagacggagttttgctctgtcgcgcagggtggagkgcggtggcacgatctcggctcactgcaacctctgcctcctgggtgcaagcaattatcctgcctcagcctcccgagtagctgggactacaggcacacactgccacgcccagctaattttttgcattttagtagagacggggtttcaccgtgttgcccaggctgttctaaaactcctgaactcaggtaatctgcctgcctcggcctccccaagtgctaggattacagrtgtgagccaccacgcccggccttttttttttttttttcttttttgagatggagtttcactctygttgcccaggctggagtgcgttggctgacctatgaccacatcactgtacrccagcccgggtgagagagggagaccccgtctctaaaaataaaatgtaaaatcactgaaaaaatgagtgttcggtgaaacaagtgggattttytgggccagcaagtcttccaaactgtatatgatgcatcctgtctccatgtgtaatatattttaatgataaatgtatttttaacagtg

SEQ ID NO: 1939 - DNA, 3654 bp, Homo sapiens
gtcccggaacctggggcagcggagtcccgtgcgccctgtggtgacagctcaggagggtgtgtgcgctcagcaggggccagcatggaccagtctgtggcaatccaggagacgctggctgagggggaatactgcgtcatcgcggtgcaaggtgtgctgtgtgagggggacagccggcagagccgcctcctgggactcgtgcgctaccgcctggagcayrgcggccaggaacacgctctcttcctctatacgcaccggaggatggccattaccggggacgatgtctctctggaccagatagtgccagtctcgcgggattttacgctggaagaagtgtccccagatggtgaactctacatccttggctcagatgtgaccgtccagctggacacagcagagcttagcctcgtattccaactgccctttggttcacaaaccaggatgttcctccacgaagttgccagggcctgtccaggcttcgattctgcgacccgggatcctgaattcctgtggctgtctcggtataggtgcgcagagctggagctggagatgccaacgccgcgcggttgtaactcggccctagttacctggccagggtacgcgacaattggcggaggtggttctaactttgatggtttgagaccaaatgggaagggagtgcctatggaccaaagctccaggggtcaagataaaccagaaagcttgcaaccaagacagaataaatccaagtccgaaattactgacatggttcgctcctccactatcacagtgtcggacaaggctcatattttatccatgcagaagtttggactgcgagatacaattgtgaaatcacatctactacagaaagaagaggattacacctatatccagaacttcaggttttttgcgggaacatacaatgtaaatgggcagtcccccaaagaatgcctccggctgtggctgagcaatggtatmcaggccccagatgtctattgtgtagggttccaggagcttgatctgagtaaggaagcttttttctttcacgataccccaaaggaggaagagtggttcaaagctgtgtcagagggtcttcatccagatgccaaatatgcaaaggtgaagcttatccgactggttgggattatgctgctgttatatgtcaaacaggagcatgcagcttatatctcagaagtggaagccgagactgtggggacaggaatcatggggaggatgggcaacaagggaggcgtggcgatcaggttccagttccacaacaccagcatctgcgttgtgaattctcacttggcagcccacattgaagagtatgagaggaggaaccaggactataaggacatttgttctcgaatgcagttttgtcagcctgacccaagccttccccctctcaccatcagcaaccatgatgtgatcttgtggctgggggacctcaactacaggatagaagagctggatgtggaaaaagtgaaaaagctcatcgaagagaaggaytttcaaatgctgtatgcatatgatcagctgaaaattcaggtggccgcaaagactgtctttgaaggcttcacagagggtgagctcacattccagcctacttacaagtatgatacgggctctgacgactgggataccagtgagaagtgccgtgctcctgcctggtgtgatcggattctctggaaagggaagaacatcactcagctgagttaccagagccacatggccctgaagaccagtgaccacaagcctgtcagctcagtgtttgacatcggggtgagggtcgtaaatgacgagctttaccggaagacactggaggaaattgttcgctccctggataagatggaaaatgccaacattccttctgtgtccctgtccaagcgagagttctgttttcagaatgtgaagtacatgcaattgaaagtagaatcctttacaattcataatggacaagtaccctgtcattttgaattcatcaacaagcctgatgaagagtcttactgtaagcagtggctgaatgccaaccccagcagaggcttcctcctgccagattctgatgttgagattgacttggagctcttcgtaaataagaygacagctacaaagctcaactcgggtgaagacaaaattgaggacattctggttctgcacttggacaggggaaaggattactttttgtctgtgtctgggaactacctgcccagctgttttgggtctcccattcatacactgtgttacatgagagagccaatcttggacctaccacttgaaaccattagtgagctgactctgatgccagtatggactggagatgatgggagccagttggatagccccatggaaatccccaaagagctctggatgatggttgattacctgtaccgaaatgctgtccagcaggaagatctgtttcagcaaccaggcctgaggtcagaatttgaacatatcagggactgcttggatactggaatgattgataacctctctgccagcaatcattctgtagccgaagccctgctgcttttcctggagagccttccagagcctgtcatctgttacagcacctaccataactgcttggagtgttctggcaactacacagcaagcaaacaggtcatttctastctccccatattccacaaaaatgtcttccactacttgatggcgtttttgcgagaactgctgaaaaattcagcaaaaaatcatttgsatgagaatattctagctagcatatttggcagcttattgcttcgaaacccagctggtcaccaaaagcttgatatgacagagaagaagaaggctcaagaatttattcaccagttcctctgcaacccamtctgagcctmtctctcctcctattttacttgaggctgccaattaccagccccacctgtttcagctcaagagatgccttaagataattatgtgaggccacttggtagcaagaatggcagctatttcctgagcctagtaccccarttaagcccaccattggttagcacactcagcgctgtgagtcgtgaagacacgggagaaaatccaccataataaaactgacattcaattttcaactttagttatttaacacagatttttttattttttatttttttttattttgagacggagttttgctctgtcgcgcagggtggagkgcggtggcacgatctcggctcactgcaacctctgcctcctgggtgcaagcaattatcctgcctcagcctcccgagtagctgggactacaggcacacactgccacgcccagctaattttttgcattttagtagagacggggtttcaccgtgttgcccaggctgttctaaaactcctgaactcaggtaatctgcctgcctcggcctccccaagtgctaggattacagrtgtgagccaccacgcccggccttttttttttttttttcttttttgagatggagtttcactctygttgcccaggctggagtgcgttggctgacctatgaccacatcactgtacrccagcccgggtgagagagggagaccccgtctctaaaaataaaatgtaaaatcactgaaaaaatgagtgttcggtgaaacaagtgggattttytgggccagcaagtcttccaaactgtatatgatgcatcctgtctccatgtgtaatatattttaatgataaatgtatttttaacagtg

SEQ ID NO: 1940 - DNA, 4451 bp, Homo sapiens
gaaccctgattgctgtccttcaayrtgttcattatgaagttattagtaatactttygttttctggacttataactggttttagaagtgactcttcctctagtttgccacctaagttactactagtatcctttgatggcttcagagctgattatctgaagaactatgaatttcctcatctccagaattttatcaaagaaggtgttttggtagagcatgttaaaaatgtttttatcacaaaaacatttccaaaccactacagtattgtgacaggcttgtatgaagaaagccatggcattgtggctaattccatgtatgatgcagtcacaaagaaacacttttctgactctaatgacaaggatcctttttggtggaatgaggcagtacctatttgggtgaccaatcagcttcaggaaaacagatcaagtgctgctgctatgtggcctggtactgatgtacccattcasgataccatctcttcctattttatgaattacaactcctcagtgtcatttgaggaaagactaaataatattactatgtggctaaacaattcgaacccaccagtcacctttgcaacactatattgggaagaaccagatgcaagtggccacaaatacggacctgaagataaagaaaacatgagcagagtgttgaaaaaaatagatgatcttatcggtgacttagtccaaagactcaagatgttagggctatgggaaaatcttaatgtgatcattacaagtgatcatgggatgacccagtgttctcaggacagactgataaacctggattcctgcatcgatcattcatactacactcttatagatttgagcccagttgctgcaatacttcccaaaataaatagaacagaggtttataacaaactgaaaaactgtagccctcatatgaatgtttatctcaaagaagacattcctaacagattttattaccaacataatgatcgaattcagcccattattttggttgccgatgaaggctggacaattgtgctaaatgaatcatcacaaaaattaggtgaccatggttatgataattctttgcctagtatgcatccatttctagctgcccacggacctgcatttcacaaaggctacaagcatagcacaattaacattgtggatatttatccaatgatgtgccacatcctgggattaaaaccacatcccaataatgggacctttggtcatactaagtgcttgttagttgaccagtggtgcattaatctcccagaagccatcgcgattgttatcggttcactcttggtgttaaccatgctaacatgcctcataataatcatgcagaatagactttctgtacctcgtccattttctcgacttcagctacaagaagatgatgatgatcctttaattgggtgacatgtgctagggcttatacaaagtgtctttgattaatcacaaaactaagaatacatccaaagaatagtgttgtaactatgaaaaagaatactttgaaagacaaagaacttagactaagcatgttaaaattattactttgttttccttgkgttttgtttcggtgcatttgctaataagataacgctgaccatagtaaaattgttagtaaatcattaggtaacatcttgtggtaggaaatcattaggtaacatcaatcctaactagaaatactaaaaatggcttttgagaaaaatactwcctstgcwtgtattttgcgatgaagatgtgatacatctttaaatgaaaatataccaaaatttagtaggcatgtttttctaataaatttatatatttgtaaagaaaacaacagaaatctttatgcaatttgtgaattttgtatattagggaggaaaagcttcctatatttttatatttacctttaattagtttgtatctcaagtaccctcttgaggtaggaaatgctctgtgatggtaaataaaattggagcagacagaaaagatatagcaaatgaagaaatattttaaggaaacctatttgaaaaaaaaagcaaagaccatttgataaaagcctgagttgtcaccattatgtcttaagctgttagtcttaaagattattgttaaaaaattcagaagaaaagagagacaagtgctcttctctctatctatgcttaatgcctttatgtaagttacttagttgtttgcgtgtgcctgtgcaagtgtgtttgtgtgtggttgtgtggacattatgtgatttactatataaggaggtcagagatggactgtggccaggcttccacattcctgaagcacacagatctcaggaaaggttatttttgcacttcatatttgtttactttctcctaactcacaagttaaaatcataacttaatttcattaacttttatcatttaactctctcatgtttgttgtaaccygaggtatccaaatgctrcagaaaaatttatgacccaaatacaaatctcaatwtgactgggacagaatgaggaatggagatttttgtatttatctttgggactttatgccttactttttaggctatagaatagttaagaaattttaaacaaaatttagtatcttttggtctttcacaccattcatatgttaagtggcagaatagccttagtgctacctccacttttttctccagtatttgcatcacagaaataatccctctgtttaacatgtttgttcagagccaagggtttattgtgaagaactgtcatcctgcctttgctagctggtaccttctagtaatcaaaattaatatgaagaaactaggttgtgacagactagattatatttagtaggggaaaaattgggctcaagaaccattcatcagtacgtgagacaagcagttaatagtatgatctttaaagttttgacaatataaaataaacttggtaactgttttacaaatataaaagtatartaaatatgcagcccagttaaatattgattatctgtgatggtaaagaacaacagtggtgccagtcatcaaacatacagtgcgtcctattgagtcactgctaatttcttgagcctggtatttgctgcctattgtatttgtggttgttgagaggcattttcaaaccctgtataaataatccatgctgttggtcataagttaactgtattaagaacagtaaaataaataaaaaccaatagtactaattttgctttaaaaaaatttctaatttttttcacataaaacaattatcctaaaggttaatagttgatcgaaacagaataatagaaaaattctwctttaatttccattaaaaagcaaatagcattgacacatttaaagcttttcatttaaagtagtggatgtttttgaagtatctaaaatagtagcagaatattttatacttggtccttgcawtggtgtgagttttaatgattgcattatcgtgattggtggttatgagtttcagaaatctatacttggcatccaactcatgagtggattttatataggatggaacaggaaggtatgtcctgtcagtatcttaaccctttcaacaagacatttacctatttgtctttccttacgttctcaaaatattaactcgaattgtaaattaagcaaaaatktaaaaagtatatgttgatgggacaagaagaatagtatttatttaataaaacatatattatattgaactatgtgttaattcatttgtatcttttaaaaaattatcactgttaaagccattgactcctttagtacactgagaaaaatcttatagtaaaactagcctttcacattaaggttttggtgtgtattttgttaaataactaacatgctgctctattttctgggtgtagaaagtatttggctctaggaaacatttacttgtttgtgaaaacaataccccaaggtaataggaaaagtttgarttaagtgtttttaattcagtcagtgaattcagaataagtacattcatgtataacatagggacagttctgctgctgttatttatatgcaattcttctggtaaatagcaatagaataaaacatatttcaatgtttgtgtataggttttatattattattccactaggaatggcataagaatttatagataaattcttgtaacattaaaggattaaaatgtttttacattgtttwtgggtgtctccttcttgtgcccatatctgataagctttatggattattgcatttaattccttttatttggagggttttacttccttgttaacatataaagttataaatgaaggacaaggaggagatggaaaatgtgtatttattgttaattcttaaaatagtgtgtaaataaaataacatcagtgtgctttaaagaaatgtgtatgtagtgccttaatttaaattaaaatatttttgactgttacttgagttcagaattaatgactttgttcatgatttttaaaatgtgtgtgaataaaatctaccaaaaaattcttactgtaattattaaatataaagttcagtg

SEQ ID NO: 1941 - DNA, 4651 bp, Homo sapiens
ctcggagcgccccgagcggcgcagatagggasgttggggctgwgccccgcggcgcggcgcctgccactgcgcaggcgcctcaggaagagctcggcatcgcccctcttcctccaggtcccccttccccgcaacttcccacgagtgccaggtgccgcgagcgccgagttccgcgcattggaaagaagcgaccgcggcggctggaaccctgattgctgtccttcaayrtgttcattatgaagttattagtaatactttygttttctggacttataactggttttagaagtgactcttcctctagtttgccacctaagttactactagtatcctttgatggcttcagagctgattatctgaagaactatgaatttcctcatctccagaattttatcaaagaaggtgttttggtagagcatgttaaaaatgtttttatcacaaaaacatttccaaaccactacagtattgtgacaggcttgtatgaagaaagccatggcattgtggctaattccatgtatgatgcagtcacaaagaaacacttttctgactctaatgacaaggatcctttttggtggaatgaggcagtacctatttgggtgaccaatcagcttcaggaaaacagatcaagtgctgctgctatgtggcctggtactgatgtacccattcasgataccatctcttcctattttatgaattacaactcctcagtgtcatttgaggaaagactaaataatattactatgtggctaaacaattcgaacccaccagtcacctttgcaacactatattgggaagaaccagatgcaagtggccacaaatacggacctgaagataaagaaaacatgagcagagtgttgaaaaaaatagatgatcttatcggtgacttagtccaaagactcaagatgttagggctatgggaaaatcttaatgtgatcattacaagtgatcatgggatgacccagtgttctcaggacagactgataaacctggattcctgcatcgatcattcatactacactcttatagatttgagcccagttgctgcaatacttcccaaaataaatagaacagaggtttataacaaactgaaaaactgtagccctcatatgaatgtttatctcaaagaagacattcctaacagattttattaccaacataatgatcgaattcagcccattattttggttgccgatgaaggctggacaattgtgctaaatgaatcatcacaaaaattaggtgaccatggttatgataattctttgcctagtatgcatccatttctagctgcccacggacctgcatttcacaaaggctacaagcatagcacaattaacattgtggatatttatccaatgatgtgccacatcctgggattaaaaccacatcccaataatgggacctttggtcatactaagtgcttgttagttgaccagtggtgcattaatctcccagaagccatcgcgattgttatcggttcactcttggtgttaaccatgctaacatgcctcataataatcatgcagaatagactttctgtacctcgtccattttctcgacttcagctacaagaagatgatgatgatcctttaattgggtgacatgtgctagggcttatacaaagtgtctttgattaatcacaaaactaagaatacatccaaagaatagtgttgtaactatgaaaaagaatactttgaaagacaaagaacttagactaagcatgttaaaattattactttgttttccttgkgttttgtttcggtgcatttgctaataagataacgctgaccatagtaaaattgttagtaaatcattaggtaacatcttgtggtaggaaatcattaggtaacatcaatcctaactagaaatactaaaaatggcttttgagaaaaatactwcctstgcwtgtattttgcgatgaagatgtgatacatctttaaatgaaaatataccaaaatttagtaggcatgtttttctaataaatttatatatttgtaaagaaaacaacagaaatctttatgcaatttgtgaattttgtatattagggaggaaaagcttcctatatttttatatttacctttaattagtttgtatctcaagtaccctcttgaggtaggaaatgctctgtgatggtaaataaaattggagcagacagaaaagatatagcaaatgaagaaatattttaaggaaacctatttgaaaaaaaaagcaaagaccatttgataaaagcctgagttgtcaccattatgtcttaagctgttagtcttaaagattattgttaaaaaattcagaagaaaagagagacaagtgctcttctctctatctatgcttaatgcctttatgtaagttacttagttgtttgcgtgtgcctgtgcaagtgtgtttgtgtgtggttgtgtggacattatgtgatttactatataaggaggtcagagatggactgtggccaggcttccacattcctgaagcacacagatctcaggaaaggttatttttgcacttcatatttgtttactttctcctaactcacaagttaaaatcataacttaatttcattaacttttatcatttaactctctcatgtttgttgtaaccygaggtatccaaatgctrcagaaaaatttatgacccaaatacaaatctcaatwtgactgggacagaatgaggaatggagatttttgtatttatctttgggactttatgccttactttttaggctatagaatagttaagaaattttaaacaaaatttagtatcttttggtctttcacaccattcatatgttaagtggcagaatagccttagtgctacctccacttttttctccagtatttgcatcacagaaataatccctctgtttaacatgtttgttcagagccaagggtttattgtgaagaactgtcatcctgcctttgctagctggtaccttctagtaatcaaaattaatatgaagaaactaggttgtgacagactagattatatttagtaggggaaaaattgggctcaagaaccattcatcagtacgtgagacaagcagttaatagtatgatctttaaagttttgacaatataaaataaacttggtaactgttttacaaatataaaagtatartaaatatgcagcccagttaaatattgattatctgtgatggtaaagaacaacagtggtgccagtcatcaaacatacagtgcgtcctattgagtcactgctaatttcttgagcctggtatttgctgcctattgtatttgtggttgttgagaggcattttcaaaccctgtataaataatccatgctgttggtcataagttaactgtattaagaacagtaaaataaataaaaaccaatagtactaattttgctttaaaaaaatttctaatttttttcacataaaacaattatcctaaaggttaatagttgatcgaaacagaataatagaaaaattctwctttaatttccattaaaaagcaaatagcattgacacatttaaagcttttcatttaaagtagtggatgtttttgaagtatctaaaatagtagcagaatattttatacttggtccttgcawtggtgtgagttttaatgattgcattatcgtgattggtggttatgagtttcagaaatctatacttggcatccaactcatgagtggattttatataggatggaacaggaaggtatgtcctgtcagtatcttaaccctttcaacaagacatttacctatttgtctttccttacgttctcaaaatattaactcgaattgtaaattaagcaaaaatktaaaaagtatatgttgatgggacaagaagaatagtatttatttaataaaacatatattatattgaactatgtgttaattcatttgtatcttttaaaaaattatcactgttaaagccattgactcctttagtacactgagaaaaatcttatagtaaaactagcctttcacattaaggttttggtgtgtattttgttaaataactaacatgctgctctattttctgggtgtagaaagtatttggctctaggaaacatttacttgtttgtgaaaacaataccccaaggtaataggaaaagtttgarttaagtgtttttaattcagtcagtgaattcagaataagtacattcatgtataacatagggacagttctgctgctgttatttatatgcaattcttctggtaaatagcaatagaataaaacatatttcaatgtttgtgtataggttttatattattattccactaggaatggcataagaatttatagataaattcttgtaacattaaaggattaaaatgtttttacattgtttwtgggtgtctccttcttgtgcccatatctgataagctttatggattattgcatttaattccttttatttggagggttttacttccttgttaacatataaagttataaatgaaggacaaggaggagatggaaaatgtgtatttattgttaattcttaaaatagtgtgtaaataaaataacatcagtgtgctttaaagaaatgtgtatgtagtgccttaatttaaattaaaatatttttgactgttacttgagttcagaattaatgactttgttcatgatttttaaaatgtgtgtgaataaaatctaccaaaaaattcttactgtaattattaaatataaagttcagtg

SEQ ID NO: 1942 - DNA, 5469 bp, Homo sapiens
cgcccgcccagccccgggggcagggagagcctagattacggaagtaccgcgagcaaggagcgcggaatcggggagcgtccggagctagctggatcctctaggcaggatggtgatgggaatctttgcaaattgtatcttctgtttgaaagtgaagtacttacctcagcagcagaagaaaaagctacaaactgacattaaggaamatggcggaaagttttccttttcgttaaatcctcagtgcacacatataatcttagataatgctgatgttctgagtcagtaccaactgaattctatccaaaagaaccacgttcatattgcaaacccagattttatatggaaatctatcagrgaaaagagactcttggatgtaaagaattatgatccttataagcccctggacatcacaccacctcctgatcagaaggcgagcagttctgaagtgaaaacagaaggtctatgcccggacagtgccacagaggaggaagacactgtggaactcactgagtttggtatgcagaatgttgaaattcctcatcttcctcaagattttgaagttgcaaaatataacaccttggagaaagtgggaatggagggaggccaggaagctgtggtggtggagcttcagtgttcgcgggactccagggactgtcctttcctgatatcctcacacttcctcctggatgatggcatggagactagaagacagtttgctataaagaaaacctctgaagatgcaagtgaatactwtgaaaattacattgaagaactgaagaaacaaggatttctactaagagaacatttcacacctgaagcaacccaattagcatctgaacaattgcaagcattgcttttggaggaagtcatgaattcaagcactctgagccaagaggtgagcgatttagtagagatgatttgggcagaggccctgggccacctggaacacatgcttctcaagccagtgaacaggattagcctcaacgatgtgagcaaggcagaggggattctccttctagtaaaggcagcactgaaaaatggagaaacagcagagcaattgcaaaagatgatgacagagttttacagactgatacctcacaaaggcacaatgcccaaagaagtgaacctgggactattggctaagaaagcagacctctgccagctaataagagacatggttaatgtctgtgaaactaatttgtccaaacccaacccaccatccctggccaaataccgagctttgaggtgcaaaattgagcatgttgaacagaatactgaagaatttctcagggttagaaaagaggttttgcagaatcatcacagtaagagcccagtggatgtcttgcagatatttagagttggcagagtgaatgaaaccacagagtttttgagcaaacttggtaatgtgaggcccttgttgcatggttctcctgtacaaaacatcgtgggaatcttgtgtcgagggttgcttttacccaaagtagtggaagatygtggtgtgcaaagaacagacgtcggaaaccttggaagtgggatttatttcagtgattcgctcagtacaagtatcaagtactcacaccygggagagacagatggcaccagactcctgctcatttgtgacgtagccctcggaaagtgtatggacttacatgagaaggacttttccttaactgaagcaccaccaggctacgacagtgtgcatggagtttcrcaaacagcctctgtcaccacagactttgaggatgatgaatttgttgtctataaaaccaatcaggttaaaatgaaatatattattaaattttccatgcctggagatcagataaaggactttcatcctagtgatcatactgaattagaggaatacagacctgagttttcaaatttttcaaaggttgaagattaccagttaccagatgccaaaacttccagcagcaccaaggccggcctccaggatgcctctgggaacttggttcctctggaggatgtccacatcaaagggagaatcatagacactgtagcccaggtcattgtttttcagacatacacaaataaaagtcacgtgcccattgaggcaaaatatatctttcctttggatgacaaggcygctgtgtgtggcttcgaagccttcatcaatgggaagcacatagttggagagattaaagagaaggaagaagcccagcaagagtacctagaagccgtgacccagggccatggcgcttacctgatgagtcaggatgctccggacgtttttactgtaagtgttggaaacttaccccctaaggctaaggttcttataaaaattacctacatcacagaactcagcatcctgggcactgttggtgtctttttcatgcccgccaccgtagcaccctggcaacaggacaaggctttgaatgaaaaccttcaggatacagtagagaagatttgtataaaagaaataggaacaaagcaaagcttctctttgactatgtctattgagatgccgtaygtgattgaattcattttcagtgatacwcatgaactgaaacaaaagcgcacagactgcaaagctgtcattagcaccatggaaggcagctccttagacagcagtggattttctctccacatcggtttgtctgctgcctatctcccaagaatgtgggttgaaaaacatccagaaaaagaaagcgaggcttgcatgcttgtctttcaacccgatctcgatgtcgacctccctgacctagccartgagagcgaagtgattatttgtcttgactgctccagttccatggagggtgtgacattcttgcaagccaagcaaatcrccttgcatgcgctgtccttggtgggtgagaagcagaaagtaaatattatccagttcggcacaggttacaaggagctattttcgtatcctaagcatatcacaagcaataccryggcagcagagttcatcatgtctgccacacctaccatggggaacacagacttctggaaaacactccgatatcttagcttattgtaccctgctcgagggtcacggaacatcctcctggtgtctgatgggcacctccaggatgagagcctgacattacagctcgtgargaggagccgcccgcacaccaggttattcgcctgcggtatcggttctacagcaaatcgtcacrtcttaaggattttgtcccagtgtggtgccggagtatttgaatattttaatgcaaaatccaagcatagttggagaaaacagatagaagaccaaatgaccaggctatgttctccgagttgccactctgtctccgtcaaatggcagcaactcaatccagatgygcccgaggccctgcaggccccagcccaggtgccrtccttgtttckcaatgatcgactccttgtctatggattcattcctcactgcacacargcaactctgtgtgcactaattcaagagaaagaattttgtacaatggtgtcgactactgagcttcagaagacaactggaactatgatccacaagctggcagcccgagctctaatcagagattatgaagatggcattcttcacgaaaatgaaaccagtcatgagatgaaaaaacaaaccttgaaatctctgattattaaactcagtaaagaaaactctctcataacacaatttacaagctttgtggcagttgagaaaagggatgagaatgagtcgccttttcctgatattccaaaagtttctgaacttattgccaaagaagatgtagacttcctgccctacatgagctggcagggggagccccaagaagccgtcaggaaccagtctcttttagcatcctctgagtggccagaattacgtttatccaaacgaaaacataggaaaattccattttccaaaagaaaaatggaattatctcagccagaagtttctgawgattttgaagaggatgscttaggtgtactaccagctttcacatcaaatttggaacgtggasgtgtggaaaagctattggatttaagttggacagagtcatgtaaaccaacagcaactgaaccactatttaagaaagtcagtccatgggaaacatctacttctagcttttttcctattttggctccggccgttggttcctatcttmccccgactrcccgcgctcacagtcctgcttccttgtcttttgcctcatatcgtcaggtagctagtttcggttcagctgctcctcccagacagtttgatgmatctcaattcagccaaggccctgtgcctggcacttgtgctgactggatcccacagtcggcgtcttgtcccacaggacctccccagaacccaccttctkcaccctattgtggcattgttttttcagggagctcattaagctctgcacagtctgctccactgcaacatcctggaggctttactaccaggccttctgctggcaccttccctgagctggattctccccagcttcatttctctcttcctacagaccctgatcccatcagaggttttgggtcttatcatccctctgcttmctctccttttcattttcaaccttccgcagsctctttgactgccaaccttaggctgccaatggcctctgctttacctgaggctctttgcagtcagtcccggactaccccagtagatctctgtcttctagaagaatcagtaggcagtctcgaaggaagtcgatgtcctgtctttgcttttcaaagttctgacacagaaagtgatgagctatcagaagtacttcaagacagctgctttttacaaataaaatgtgatacaaaagatgacagtatccygtgctttctggaagtaaaagaagaggatgaaatagtgtgcayacaacactggcaggatgctgtgccttggacagaactcctcagtctacagacagaggatggcttctggaaacttacaccagaactgggacttatattaaatcttaatacaaatggtttgcacagctttcttaaacaaaaaggcattcaatctctaggtgtaaaaggaagagaatgtctcctggacctaattgccacaatgctggtactacagtttattcgcaccaggttggaaaaagagggaatagtgttcaaatcactgatgaaaatggatgacgcttctatttccaggaatattccctgggcttttgaggcaataaagcaagcaagtgaatgggtaagaagaactgaaggacagtacccatctatctgcccacggcttgaactggggaacgactgggactctgccaccaagcagttgctgggactccagcccataagcactgtgtcccctcttcatagagtcctccattacagtcaaggctaagtcaaatgaaactgaattttaaactttttgcatgcttctatgtagaaaataatcaaatgataatagatacttataatgaaacttcattaaggtttcattcagtgtagcaattactgtctttaaaaattaagtggaagaagaattactttaatcaactaacaagcaataataaaatgaaacttaaaata

SEQ ID NO: 1943 - DNA, 3210 bp, Homo sapiens
agggcaaggcagtggcggcggccgccccaacggagctgcagacgaaaggcaagaacggcgatggccgccgtagttctagctaaagatcatcaccctggtaaaactttgccagagaacccagcaggattcaccagcacagccactgcagactccagagccctgcttcaggcctatatagacggtcactctgtggtcatcttcagtaggtccacatgcacacgctgtactgaggtaaagaagttatttaaatctctgtgtgttccttattttgtgcttgaacttgatcaaacagaggacggtcgggccctggaaggaacgctctcggaattggccgcggaaaccgatctgcccgttgtgtttgtgaaacagagaaagataggcggccatggtccaaccttgaaggcttatcaggagggcagacttcaaaagctactaaaaatgaacggccctgaagatcttcccaagtcctatgactatgaccttatcatcattggaggtggctcaggaggtctggcagctgctaaggaggcagcccaatatggcaagaaggtgatggtcctggactttgtcactcccacccctcttggaactagatggggtctyggaggaacatgtgtgaatgtgggttgcatacctaaaaaactgatgcatcaagcagctttgttaggacaagccctgcaagactctcgaaattatggatggaaagtcgaggagacagttaagcatgattgggacagaatgatagaagctgtacagaatcacattggctctttgaattggggctaccgagtagctctgcgggagaaaaaagtcgtctatgagaatgcttatgggcaatttattggtcctcacaggattaaggcaacaaataataaaggcaaagaaaaaatttattcagcagagagwtttctcattgccactggtgaaagaccacgttacttgggcatccctggtgacaaagaatactgcatcagcagtgatgatcttttctccttgccttactgcccgggtaagaccctggttgttggagcatcctatgtcgctttggagtgcgctggatttcttgctggtattggtttagrcgtcactgttatggttaggtccattcttcttagaggatttgaccaggacatggccaacaaaattggtgaacacatggaagaacatggcatcaagtttataagacagttcgtaccaattaaagttgaacaaattgaagcagggacaccaggccgactcagagtagtagctcagtccaccaatagtgaggaaatcattgaaggagaatataatacggtgatgctggcaataggaagagatgcttgcacaagaaaaattggcttagaaaccgtaggggtgaagataaatgaaaagactggaaaaatacctgtcacagatgaagaacagaccaatgtgccttacatctatgccattggcgatatattggaggataaggtggagctcaccccagttgcaatccaggcaggaagattgctggctcagaggctctatgcaggttccactgtcaagtgtgactatgaaaatgttccaaccactgtatttactcctttggaatatggtgcttgyggcctttctgaggagaaagctgtggagaagtttggggaagaaaatattgaggtttaccatagttacttttggccattggaatggacgattccgtcaagagataacaacaaatgttatgcaaaaataatctgtaatactaaagacaatgaacgtgttgtgggctttcacgtactgggtccaaatgctggagaagttacacaaggctttgcagctgcgctcaaatgtggactgaccaaaaagcagctggacagcacaattggaatccaccctgtctgtgcagaggtattcacaacattgtctgtgaccaagcgctctggggcaagcatcctccaggctggctgctgaggttaagccccagtgtggatgctgttgccaagactgcaaaccactggctcgtttccgtgcccaaatccaaggcgaagttttctagagggttcttgggctcttggcacctgcgtgtcytgtgcttacyaccgcccaaggyccccttggatctcttggataggagttggtgaatagaaggcaggcagcatcacactggggycactgacagacttgaagctgacatttggcagggcatcgaagggatgcatccatgaagtcaccagtctcaagcccatgtggtaggcggtgatggaacaactgtcaaatcagttttagcatgacctttccttgtggattttcttattctcgttttctttctaagactacattagtaggaaaataagtcttttcatgcttatgatttagctgttttgtggtaattgctttttaaaggaagttattaatatcataagttattattaatattttgaacacaggtggatgtgaaggattttcatttaaaaaccaagtggttttgactttttctgttgaatgaacaactgtgccttgtggaatttttgcagaagtgtttatgctttgttagcatttcaacttgcattattataaagaggtattaatgcctcagttatgtgtttgtcaatgtactggctgaggattctatctcagctgtcttttctaactgtgtaggttgagttttgaacacgtgcttgtggacatcaggcctcctgccagcagttcttgaagcttctttttcattcctgctactctacctgtatttctcagttgcagcactgagtggtcaaaatacatttctgggccacctcagggaacccatgcatctgcctggcatttaggcagcagagcccctgaccgtccsccacagggctctgcctcacgtcctcatctcatttggctgtgtaaagaaatgggaaaagggaaaaggagagagcaattgaggcagttgaccatattcagttttatttatttatttttaatttgtttttttctccaagtccaccagtctctgaaattagaacagtaggcggtatgagataatcaggcctaatcatgttgtgattctyttttyttagtggagtggaatgttctatccccacaagaaggattatatcttatagacttgtcttgttcagattctgtatttacccattttattgaaayayatactaagttccatgtatttttgttacaaatcttctgaaaaaaaacaaaacaatgtgaaacattaaaattaaaaggcattaataatatccacgtgtg

SEQ ID NO: 1944 - DNA, 3811 bp, Homo sapiens
agggcaaggcagtggcggcggccgccccaacggagctgcagacgaaaggcaagaacggcgatggccgccgtagttctagctaaagatcatcaccctggtaaaactttgccagagaacccagcaggattcaccagcacagccactgcagactccagagccctgcttcaggcctatatagacggtcactctgtggtcatcttcagtaggtccacatgcacacgctgtactgaggtaaagaagttatttaaatctctgtgtgttccttattttgtgcttgaacttgatcaaacagaggacggtcgggccctggaaggaacgctctcggaattggccgcggaaaccgatctgcccgttgtgtttgtgaaacagagaaagataggcggccatggtccaaccttgaaggcttatcaggagggcagacttcaaaagctactaaaaatgaacggccctgaagatcttcccaagtcctatgactatgaccttatcatcattggaggtggctcaggaggtctggcagctgctaaggaggcagcccaatatggcaagaaggtgatggtcctggactttgtcactcccacccctcttggaactagatggggtctyggaggaacatgtgtgaatgtgggttgcatacctaaaaaactgatgcatcaagcagctttgttaggacaagccctgcaagactctcgaaattatggatggaaagtcgaggagacagttaagcatgattgggacagaatgatagaagctgtacagaatcacattggctctttgaattggggctaccgagtagctctgcgggagaaaaaagtcgtctatgagaatgcttatgggcaatttattggtcctcacaggattaaggcaacaaataataaaggcaaagaaaaaatttattcagcagagagwtttctcattgccactggtgaaagaccacgttacttgggcatccctggtgacaaagaatactgcatcagcagtgatgatcttttctccttgccttactgcccgggtaagaccctggttgttggagcatcctatgtcgctttggagtgcgctggatttcttgctggtattggtttagrcgtcactgttatggttaggtccattcttcttagaggatttgaccaggacatggccaacaaaattggtgaacacatggaagaacatggcatcaagtttataagacagttcgtaccaattaaagttgaacaaattgaagcagggacaccaggccgactcagagtagtagctcagtccaccaatagtgaggaaatcattgaaggagaatataatacggtgatgctggcaataggaagagatgcttgcacaagaaaaattggcttagaaaccgtaggggtgaagataaatgaaaagactggaaaaatacctgtcacagatgaagaacagaccaatgtgccttacatctatgccattggcgatatattggaggataaggtggagctcaccccagttgcaatccaggcaggaagattgctggctcagaggctctatgcaggttccactgtcaagtgtgactatgaaaatgttccaaccactgtatttactcctttggaatatggtgcttgyggcctttctgaggagaaagctgtggagaagtttggggaagaaaatattgaggtttaccatagttacttttggccattggaatggacgattccgtcaagagataacaacaaatgttatgcaaaaataatctgtaatactaaagacaatgaacgtgttgtgggctttcacgtactgggtccaaatgctggagaagttacacaaggctttgcagctgcgctcaaatgtggactgaccaaaaagcagctggacagcacaattggaatccaccctgtctgtgcagaggtattcacaacattgtctgtgaccaagcgctctggggcaagcatcctccaggctggctgctgaggttaagccccagtgtggatgctgttgccaagactgcaaaccactggctcgtttccgtgcccaaatccaaggcgaagttttctagagggttcttgggctcttggcacctgcgtgtcytgtgcttacyaccgcccaaggyccccttggatctcttggataggagttggtgaatagaaggcaggcagcatcacactggggycactgacagacttgaagctgacatttggcagggcatcgaagggatgcatccatgaagtcaccagtctcaagcccatgtggtaggcggtgatggaacaactgtcaaatcagttttagcatgacctttccttgtggattttcttattctcgttgtcaagttttctagggttgaatttttttcttttttctccatggtgttaatgatattagagatgaaaaacgttagcagttgatttttgtccaaaagcaagtcatggctagagtatccatgcaaggtgtcttgttgcatggaagggatagtttggctcccttggaggctatgtaggcttgtcccgggaaagagaactgtcctgcagctgaaatggactgttctttactgacctgctcagcagtttcttctctcatatattcccaaaacaagtacatctgcgatcaactctagccaaatttgcccctgtgtgctacatgatggatgattattattttaaggtctgtttaggaagggaaatggctacttggccagccattgcctggcatttggtagtatagtatgattctcaccattatttgtcatggaggcagacayacaccagaaatgggggagaaacagtacatatctttctgtctttagtttattgtgtgctggtctaagcaagctgagatcatttgcaatggaaaacacgtaacttgtttaaaagtttttctggtagctttagctttatgctaaaaaaaataatgacattgggtatctatttctttctaagactacattagtaggaaaataagtcttttcatgcttatgatttagctgttttgtggtaattgctttttaaaggaagttattaatatcataagttattattaatattttgaacacaggtggatgtgaaggattttcatttaaaaaccaagtggttttgactttttctgttgaatgaacaactgtgccttgtggaatttttgcagaagtgtttatgctttgttagcatttcaacttgcattattataaagaggtattaatgcctcagttatgtgtttgtcaatgtactggctgaggattctatctcagctgtcttttctaactgtgtaggttgagttttgaacacgtgcttgtggacatcaggcctcctgccagcagttcttgaagcttctttttcattcctgctactctacctgtatttctcagttgcagcactgagtggtcaaaatacatttctgggccacctcagggaacccatgcatctgcctggcatttaggcagcagagcccctgaccgtccsccacagggctctgcctcacgtcctcatctcatttggctgtgtaaagaaatgggaaaagggaaaaggagagagcaattgaggcagttgaccatattcagttttatttatttatttttaatttgtttttttctccaagtccaccagtctctgaaattagaacagtaggcggtatgagataatcaggcctaatcatgttgtgattctyttttyttagtggagtggaatgttctatccccacaagaaggattatatcttatagacttgtcttgttcagattctgtatttacccattttattgaaayayatactaagttccatgtatttttgttacaaatcttctgaaaaaaaacaaaacaatgtgaaacattaaaattaaaaggcattaataatatccacgtgtg

SEQ ID NO: 1945 - DNA, 6784 bp, Homo sapiens
ggccgcccggggctctggggactcgggtgtccaggtgccgaagtcgccgcttccacgggggactcaggcccgtgagtgggtttcctaagaacttaccagattccacggctcgggtttcctgccttggatcctgctttttattccccagggggagttatttatagacaggaatcgtgtgttcaaggcctggctcttcggactcggcgtttttcttgttcgaggtgcttcaatgggggctggatgccatcatcttccagtccattgaagacttgaacaagtgggccctatttcttgtgtctccttttatacttgaagcagaacacatagcatttgtgacggagagcatttgggtacaaagtgagaatttacagagatcatcctcttcagaaacagttcggtttttgcccactagggatgatgtggtttctcatgaggttacttgctctaaaggactttatattttggaaccataagagcacccttgtggcccaggcactttatggatgatcccttttagtgctcccagtaaccttccaagattgtcaagtggtcagactgttgtttgccattagcttgcagacctggggatccttatcggctaattgctgaagcaagtgtggacaacttcagcaagctgggggtggcgttcatggaagatagactccacatggataatggactggtaccccaaaagattgtgtcggtgcacttgcaggactccactctgaaggaagttaaggatcaggtctcaaacaagcaagcccagatcctagakccgaagcctgaaccttctcttgagattaagcctgagcaggacggtatggagcatgttggcagagatgacccaaaggctcttggtgaagaacccaaacaaaggagaggcagtgcctctgggagtgagcctgctggggacagtgacaggggagggggcccyrttgagcattatcacctccatctgtctagttgccacgagtgtctggaacttgagaacagcaccattgagtcagtcaagtttgcgtctgccgagaacattccagaccttccctacgattatagcagcagtttggagagtgttgctgatgagacctcccccgaaagagaagggaggagagtcaacctcacgggaaaggcacccaacatcctcctctatgtgggctccgactcccaggaagccctcggccggttccacgaggtccsgtctgtgctggccgactgtgtggacattgacagttatattctctaccacctgctggaggacagtgctctcagagacccgtggacggacaactgtctgckgttggtcattgctaccagggagtccattcccgaagacctgtaccagaagttcatggcctatcyttctcagggagggaaggtgttgggcctgtcttcatccttcacctttggtggctttcaggtgacaagcaagggtgcactgcacaagacagtccagaacttggttttctccaaggctgaccagagygaggtgaagctcagcgtcttgagcagtggctgcaggtaccaggaaggccccgtccggctcagccccggcaggctccagggccacctggagaatgaggacaaggacaggatgattgtgcatgtgccttttggaactcrcgggggagaagctgttctttgccaggtgcacttagaactacctcccagctccaacatagtgcaaactccagaagattttaacttgctcaagtcaagcaattttagaagmtacgaagwccttagagagattctgacaacccttggcctcagctgtgacatgaaacaagttcctgccttaactcctctttacttgctgtcagctgcggaggaaatcagggatcctcttatgcagtggcttgggaaacatgtggactccgagggagaaataaaatccggccagctctctcttagatttgtttcatcctacgtgtctgaagtagaaataaccccatcttgtatacctgtggtgaccaacatggaggccttctcatcagaacatttcaacttagagatctrtcgccaaaatctgcagaycaagcagttggggaaagtaatttygtttgccgaagtgacccccacaacgatgcgtctcctggatgggctgatgtttcagacaccgcaggaaatgggcttaatagtgatcgcggcccggcagaccgagggcaaaggayggggagggaawgtgtggctgagccctgtgggatgtgctctttctactctgctcatctccattccactgagatcccagctgggacagaggatcccgtttgtccagcatctgatgtccgtggctgtcgtggaagcagtgaggtccattcccgagtatcaggatatcaacttaygagtgaagtggcccaacgatatttattacagtgacctcatgaagatcrgcrgagttctggttaactcaacactcatgggagaaacattttatatacttattggctgtggatttaatgtgactaacagtaaccctaccatctgcatcaacgacctcatcacagaatacaataaacaacacaaggcagaactgaagcccttaagagcckattatctcatcgccagagtygtgactgtgctggagaaactgatcaaagagtttcaggacaaagggcccaacagcgtccttcccctttattaccgatactgggtccacagtggtcagcaagtccatctgggcagcgcagagggaccaaaggtgtccatcgttggcctggacgattctggcttcctccaggttcaccaggagggcggcgaggttgtgactgtgcacccggacggcaactccttcgacatgctgagaaacctcatcctccccaaacggcggtaatgccgggcgtccccgagaygcggctgcctgtccgtgcccrtgcatctggaaatctaatttagagttgtaggtgaattttcttttcctccaattcatttgttaagtctttgttctttttctgtgtttctgtttgtttttaggtttgttttgttgtcgttttctttggtgtttgaagaggctctgggatagatggttaagaagtagaaaatttagtttagggaaagccctcccacaggtgggaaattgctctcccctctgtggcttggacttacgtttattgtcaaggggagtttttacatggaaatgacaatgggaaaattcagatattttcttagtagtgcagacctttacccctagtctatgaaaaaacaaaccaaaatatgctcttgcgcccaggccagtggtgagttagaggtatgctatcactgtttgtaagcatctggggaggtactgaactgtaagaacatgcttggacacttagtcattgttctgtgtttttattaatgaagaaaagggaagacagacttccaagagttactgtccacccggtggtgtggccccatagcgaagtctaaatgcctgtagagatagagctagctggtgtggttgcagtgaccttgtagaggaaatcagttcattactttgacatcattcagtgagctctcctttcctaaggaagtttaaatgtccttagttagggactgactttcttaagtaagtttaaatttactacatattgtgaagagacaggatcaagttcagaatccttaaatgtctgattaggcatcacttggatgaggaggtgggcgatttggctctgacagctggagatgaaggcacactcataccacatacaagggaggatttggagcttttaagccagtttcagatttactctgaaatgtggagcattcctgcaagactgtgcagctcacggaatatagaagacatggcattttactcagaagtcataagtttttgcccccctcatttacctcgtattaccaagaaagaaaatgttatcgatactaaacaccatcagttcagagggaggatgtgtgtgtgtgcccgcatatgtgtgtgcgtgcgtgtgtgcgcacatagctttaaaagaagacattcaaaatttgatgtgctacaagcctcatgaaagaacaaaagaaatgaagccttttgatatgcattcgytattcccagatgtacgccatgccttttccatgtccctcctatctctgttgaacttatgaatcatactcattacttttcagctttttaaaaggccaatttttgtccagttttctctcttccagtcccagctgaaattagtggaaagaaagtttgatggagctttcagctttgaacaaaatcccttcattgtaaactagcaccatctttatccaggtcttacccagtcaggctaattccagaaacttgtggtttttagtatagtctgtctacctttagccaggcacaggacagccctatgaaaaaatacccaatatatattttttggaaatgaaacattaaaagaacttaaaaagtaatttttggaaatgaggcttcaattagaattatttttctcaaaaaacaaacaaacaaaaaamamaaaaaaaaccactcttctccaaatgcccaagccttctttcaaaattagttagaaacttaagtaaaatacaagtccacaccatccccaaattacaaaatggacttacccttgagagggcatctgcagaatatcatcagggacaaagatctcgaggctaacgatgtaggtttcatttctcagactttgtaatataaggcaagccctctctcagagctgccatcatcactttttgaatttctttgggggttatttaatgaaaaacatgctatgttttgttttaagctgaagtcctattctggacactctgctttgggaaaaaatgttatcatttaatttcctttctgcaaattaaaactaatgaagtgtggccttgtcaaaggctatggagatgttccgggcatactgctgtgctctgtgctttccagcaggcgctcctccctcacgcaggagactcagttgtcctgagagagatgaagcagccttgaagcagatgctgcgttttccataaacctgattttgcctcacatgaaccaaagactctcaaaactccgcttctatagaattagctgaataaaggcattttactgatagctgttcgtgttagcgaaacctgtctacctgctatagcacactctccgatttgggccatttatgcaccccgcaacctgggatctcaaggagctttaaagtcttaatgggaacttggcattttcctgatgatctttaaaatgtggtcactaaactcaggattggcgtgtgcttttagaacactggagtagcccttgttttagaggctgtgcattgagtatcgaccgtattttgtaaaaggcaagatatcctcccttccaggctggtaacgggtttcaaggggactcttgaggaagtgccccctaaaatagaacacagcaataactgggcttcctgtccccacccccaccccagcagtgctctctggcactgggaactctgctagggagtggtggaagtaggaaggatttgtgtgcaaaggaaaatcrtggttgagtttcactgcagcaggctgacgttgcctgatgtgagagcaagtggccgactggggtgcgggtgcacaggtcgggggagcacaggccacagagcgcagcctctgggggtcccccaaggcacagcatatacagcatggtcgccccttgccctggagtctgggaacaaagagaggagccagcctccccgcactgcttcagatggaaaagggaggcagggtgggcttccgttctccagatctgtttgctcttaacaggcagaacatgggagaatccttattcctggttaatcactatgcatatttgaaataaaagaaagygtaagcctctgcaattttaacttctcaaaggatgtctctgaaaagaatcactttaaaccaatgcctataaaaagcaagtctaccaaaataaactaagactttctatgtggtttgggctccctcttatttttacaagtttcatttttaaaagtaggcaactactttgggttacagtatttttattcatatttaaacatatttttacaaaataaataaagtgttttacatagtaaggaatatgtacgtatttccaagtattaagaagccaagtgtttttttttttgacgtattattgacaaatgtattcagcgccatacacaagagaaatattattactccaaagaacgaaagttaacaaaactccaaagcaaaaacccttttaatggaggtgagaaataaatttaatgtaacaacagctagattgtttttaggatttttcttttcttttgtggaaacttcttgacttgacttttcatctgaacagtttttccccccaagattttaatcttatatgtcatacttaagtttaggaacagcttgaataattagcattctagataacacaagggccatgattcactaaaattccaagctactgtaattttatggcatttatttgcaaatgttctttgtatctcattttatctgtagcagtccccactagtctaccttaaccatcttatagctctggtaaattaaaacttacgtagactttatacaagatccattggccgtattaaacctcccccactcttagggcttagggcggaagggacgaaggcagggctgataggacttttaaaaggataaaaggagtgggggcaagggaggcggaaaatacaggctcttgcagataccctccgcgctgccctccacacccagcccactgctctacaaaggtatgaatggaatggcttttctagaaaagggcttccaagaacataaaggaattcctttccctgggaggccccgtggagggctgagccagccttgaattgggcttatttct

SEQ ID NO: 1946 - DNA, 7336 bp, Homo sapiens
tccattgaagacttgaacaagtgggccctatttcttgtgtctccttttatacttgaagcagaacacatagcatttgtgacggagagcatttgggtacaaagtgagaatttacagagatcatcctcttcagaaacaacggagtgtcgttctgtcgtccaggctggagtgcagtggtgtggtctcggctcaccacaacctctgcctactgggttccagtgattctcctgcctcagcatcccgagtagctgggactacaggtgcacgctaccatgcccggctaatttttgtatttttagtagaggcgggggtttcaccatgccatccaggctggtttcgaactcctgacctcgtgatccacctgtctcggcctcccaaagtgctgggattacaggtgtgagccaccgcgcctggccctgtattttcaaattctttacctctgcgtttccagccttgctccatccaatttgttactagagctttttaacaatttcacgttgaattaagatgatttggaagaggagaaacaagagtcagaaaaattagcagcatccgtgatctgactctgggtaccagtgggttgttgagatttctgttccccactcactgcagagctgctgcctgccaatgccccctgttgggcagggccacctgtgctagtttaacctggggtctttcactcccggactgcttcttggatgtgagttttaagttgagcmsagaagatatgccttgcctgctgccatacattgtaacatcaagtcaagagctttagttacttaacagatttctgctggctgctattataggaggaaactcctttgtttagggacagccagggcttccttagctttgatctttgggagtgagccttttgcttgacttcccttctcttttccatgcctttgtttccatctcgaagtgcaaatttaaagtgtcctgtttgcctttatccactggaaggcaaacaccctggaygacgtatcagtgacagcgcggttctgctttgatcggagcacccagcgctgcttgaaggcgtttgcatggtccatggctcatggaccacgctcctagaaaacggaaatgcacttagattgtcaagtggtcagactgttgtttgccattagcttgcagacctggggatccttatcggctaattgctgaagcaagtgtggacaacttcagcaagctgggggtggcgttcatggaagatagactccacatggataatggactggtaccccaaaagattgtgtcggtgcacttgcaggactccactctgaaggaagttaaggatcaggtctcaaacaagcaagcccagatcctagakccgaagcctgaaccttctcttgagattaagcctgagcaggacggtatggagcatgttggcagagatgacccaaaggctcttggtgaagaacccaaacaaaggagaggcagtgcctctgggagtgagcctgctggggacagtgacaggggagggggcccyrttgagcattatcacctccatctgtctagttgccacgagtgtctggaacttgagaacagcaccattgagtcagtcaagtttgcgtctgccgagaacattccagaccttccctacgattatagcagcagtttggagagtgttgctgatgagacctcccccgaaagagaagggaggagagtcaacctcacgggaaaggcacccaacatcctcctctatgtgggctccgactcccaggaagccctcggccggttccacgaggtccsgtctgtgctggccgactgtgtggacattgacagttatattctctaccacctgctggaggacagtgctctcagagacccgtggacggacaactgtctgckgttggtcattgctaccagggagtccattcccgaagacctgtaccagaagttcatggcctatcyttctcagggagggaaggtgttgggcctgtcttcatccttcacctttggtggctttcaggtgacaagcaagggtgcactgcacaagacagtccagaacttggttttctccaaggctgaccagagygaggtgaagctcagcgtcttgagcagtggctgcaggtaccaggaaggccccgtccggctcagccccggcaggctccagggccacctggagaatgaggacaaggacaggatgattgtgcatgtgccttttggaactcrcgggggagaagctgttctttgccaggtgcacttagaactacctcccagctccaacatagtgcaaactccagaagattttaacttgctcaagtcaagcaattttagaagmtacgaagwccttagagagattctgacaacccttggcctcagctgtgacatgaaacaagttcctgccttaactcctctttacttgctgtcagctgcggaggaaatcagggatcctcttatgcagtggcttgggaaacatgtggactccgagggagaaataaaatccggccagctctctcttagatttgtttcatcctacgtgtctgaagtagaaataaccccatcttgtatacctgtggtgaccaacatggaggccttctcatcagaacatttcaacttagagatctrtcgccaaaatctgcagaycaagcagttggggaaagtaatttygtttgccgaagtgacccccacaacgatgcgtctcctggatgggctgatgtttcagacaccgcaggaaatgggcttaatagtgatcgcggcccggcagaccgagggcaaaggayggggagggaawgtgtggctgagccctgtgggatgtgctctttctactctgctcatctccattccactgagatcccagctgggacagaggatcccgtttgtccagcatctgatgtccgtggctgtcgtggaagcagtgaggtccattcccgagtatcaggatatcaacttaygagtgaagtggcccaacgatatttattacagtgacctcatgaagatcrgcrgagttctggttaactcaacactcatgggagaaacattttatatacttattggctgtggatttaatgtgactaacagtaaccctaccatctgcatcaacgacctcatcacagaatacaataaacaacacaaggcagaactgaagcccttaagagcckattatctcatcgccagagtygtgactgtgctggagaaactgatcaaagagtttcaggacaaagggcccaacagcgtccttcccctttattaccgatactgggtccacagtggtcagcaagtccatctgggcagcgcagagggaccaaaggtgtccatcgttggcctggacgattctggcttcctccaggttcaccaggagggcggcgaggttgtgactgtgcacccggacggcaactccttcgacatgctgagaaacctcatcctccccaaacggcggtaatgccgggcgtccccgagaygcggctgcctgtccgtgcccrtgcatctggaaatctaatttagagttgtaggtgaattttcttttcctccaattcatttgttaagtctttgttctttttctgtgtttctgtttgtttttaggtttgttttgttgtcgttttctttggtgtttgaagaggctctgggatagatggttaagaagtagaaaatttagtttagggaaagccctcccacaggtgggaaattgctctcccctctgtggcttggacttacgtttattgtcaaggggagtttttacatggaaatgacaatgggaaaattcagatattttcttagtagtgcagacctttacccctagtctatgaaaaaacaaaccaaaatatgctcttgcgcccaggccagtggtgagttagaggtatgctatcactgtttgtaagcatctggggaggtactgaactgtaagaacatgcttggacacttagtcattgttctgtgtttttattaatgaagaaaagggaagacagacttccaagagttactgtccacccggtggtgtggccccatagcgaagtctaaatgcctgtagagatagagctagctggtgtggttgcagtgaccttgtagaggaaatcagttcattactttgacatcattcagtgagctctcctttcctaaggaagtttaaatgtccttagttagggactgactttcttaagtaagtttaaatttactacatattgtgaagagacaggatcaagttcagaatccttaaatgtctgattaggcatcacttggatgaggaggtgggcgatttggctctgacagctggagatgaaggcacactcataccacatacaagggaggatttggagcttttaagccagtttcagatttactctgaaatgtggagcattcctgcaagactgtgcagctcacggaatatagaagacatggcattttactcagaagtcataagtttttgcccccctcatttacctcgtattaccaagaaagaaaatgttatcgatactaaacaccatcagttcagagggaggatgtgtgtgtgtgcccgcatatgtgtgtgcgtgcgtgtgtgcgcacatagctttaaaagaagacattcaaaatttgatgtgctacaagcctcatgaaagaacaaaagaaatgaagccttttgatatgcattcgytattcccagatgtacgccatgccttttccatgtccctcctatctctgttgaacttatgaatcatactcattacttttcagctttttaaaaggccaatttttgtccagttttctctcttccagtcccagctgaaattagtggaaagaaagtttgatggagctttcagctttgaacaaaatcccttcattgtaaactagcaccatctttatccaggtcttacccagtcaggctaattccagaaacttgtggtttttagtatagtctgtctacctttagccaggcacaggacagccctatgaaaaaatacccaatatatattttttggaaatgaaacattaaaagaacttaaaaagtaatttttggaaatgaggcttcaattagaattatttttctcaaaaaacaaacaaacaaaaaamamaaaaaaaaccactcttctccaaatgcccaagccttctttcaaaattagttagaaacttaagtaaaatacaagtccacaccatccccaaattacaaaatggacttacccttgagagggcatctgcagaatatcatcagggacaaagatctcgaggctaacgatgtaggtttcatttctcagactttgtaatataaggcaagccctctctcagagctgccatcatcactttttgaatttctttgggggttatttaatgaaaaacatgctatgttttgttttaagctgaagtcctattctggacactctgctttgggaaaaaatgttatcatttaatttcctttctgcaaattaaaactaatgaagtgtggccttgtcaaaggctatggagatgttccgggcatactgctgtgctctgtgctttccagcaggcgctcctccctcacgcaggagactcagttgtcctgagagagatgaagcagccttgaagcagatgctgcgttttccataaacctgattttgcctcacatgaaccaaagactctcaaaactccgcttctatagaattagctgaataaaggcattttactgatagctgttcgtgttagcgaaacctgtctacctgctatagcacactctccgatttgggccatttatgcaccccgcaacctgggatctcaaggagctttaaagtcttaatgggaacttggcattttcctgatgatctttaaaatgtggtcactaaactcaggattggcgtgtgcttttagaacactggagtagcccttgttttagaggctgtgcattgagtatcgaccgtattttgtaaaaggcaagatatcctcccttccaggctggtaacgggtttcaaggggactcttgaggaagtgccccctaaaatagaacacagcaataactgggcttcctgtccccacccccaccccagcagtgctctctggcactgggaactctgctagggagtggtggaagtaggaaggatttgtgtgcaaaggaaaatcrtggttgagtttcactgcagcaggctgacgttgcctgatgtgagagcaagtggccgactggggtgcgggtgcacaggtcgggggagcacaggccacagagcgcagcctctgggggtcccccaaggcacagcatatacagcatggtcgccccttgccctggagtctgggaacaaagagaggagccagcctccccgcactgcttcagatggaaaagggaggcagggtgggcttccgttctccagatctgtttgctcttaacaggcagaacatgggagaatccttattcctggttaatcactatgcatatttgaaataaaagaaagygtaagcctctgcaattttaacttctcaaaggatgtctctgaaaagaatcactttaaaccaatgcctataaaaagcaagtctaccaaaataaactaagactttctatgtggtttgggctccctcttatttttacaagtttcatttttaaaagtaggcaactactttgggttacagtatttttattcatatttaaacatatttttacaaaataaataaagtgttttacatagtaaggaatatgtacgtatttccaagtattaagaagccaagtgtttttttttttgacgtattattgacaaatgtattcagcgccatacacaagagaaatattattactccaaagaacgaaagttaacaaaactccaaagcaaaaacccttttaatggaggtgagaaataaatttaatgtaacaacagctagattgtttttaggatttttcttttcttttgtggaaacttcttgacttgacttttcatctgaacagtttttccccccaagattttaatcttatatgtcatacttaagtttaggaacagcttgaataattagcattctagataacacaagggccatgattcactaaaattccaagctactgtaattttatggcatttatttgcaaatgttctttgtatctcattttatctgtagcagtccccactagtctaccttaaccatcttatagctctggtaaattaaaacttacgtagactttatacaagatccattggccgtattaaacctcccccactcttagggcttagggcggaagggacgaaggcagggctgataggacttttaaaaggataaaaggagtgggggcaagggaggcggaaaatacaggctcttgcagataccctccgcgctgccctccacacccagcccactgctctacaaaggtatgaatggaatggcttttctagaaaagggcttccaagaacataaaggaattcctttccctgggaggccccgtggagggctgagccagccttgaattgggcttatttct

SEQ ID NO: 1947 - DNA, 479 bp, Homo sapiens
tttaggaagcagaatctgaaactttctgaggagagcatttgagcttcagatttctaacagcctctttgcaacaaaatagaccagtagctgaaggcaactgcaatccttcatgatgtttcccttggccagaaatgcactaagcagtctcaagattcaaagcattctgcaaagcatggcaagacatagccatgtaaaacactcaccagattttcatgataaatatggtaatgctgtgctagccagtggaactgctttctgtgttgctacatgggtgtttacagccactcagattggaatagaatggaacctatcccctgttggcagagttaccccaaaagagtggaaacatcagtaaccatcacagttgctgtaatgacagaattgtttaaaaaaccaacttgtcatgtaagcactctactgcttattaaaatatagcacaattgaaaaaataaaatgtrttttaaawctttaaaaagtca

SEQ ID NO: 1948 - DNA, 2511 bp, Homo sapiens
gagcgcaggtgagctmctgcgcgttccgggggcgttcctccagtcaccctcccgccgttacccgcggcgcgcccgagggagtctcctccagaccctccctcccgttgctccaaactaatacggactgaacggatcgctgcgaggatgacttcgaaatttctcttggtgtccttcatacttgctgcactgagtctttcaaccaccttttctctccaaccagaccagcaaaaggttctactagtttcttttgatggattccgttgggattacttatataaagttccaacgccccattttcattatattatgaaatatggtgttcacgtgaagcaagttactaatgtttttattacaaaaacctaccctaaccattatactttggtaactggcctctttgcagagaatcatgggattgttgcaaatgatatgtttgatcctattcggaacaaatctttctccttggatcacatgaatatttatgattccaagttttgggaagaagcgacaccartatggatcacaaaccagagggcaggacatactagtggtgcagccatgtggcccggaacagatgtaaaaatacataagcgctttcctactcattacatgccttacaatgagtcagtttcatttgaagatagagttgccaaaattattgaatggtttacgtcaaaagagcccataaatctkggtcttctctattgggaagaccctgaygacatgggccaccatttgggacctgacagtccgctcatggggcctgtcatttcagatattgacaagaagttaggatatctcatacaaatgctgaaaaaggcaaagttgtggaacactctgaacctaatcatcacaagtgatcatggaatgacgcagtgctctgaggaaaggttaatagaacttgaccagtacctggataaagaccactataccctgattgatcaatctccagtagcagccatcttgccaaaagaaggtaaatttgatgaagtctatgaagcactaactcacgctcatcctaatcttactgtttacaaaaaagaagacgttccagaaaggtggcattacaaatacaacagtcgaattcaaccaatcatagcagtggctgatgaagggtggcacattttacagaataagtcagatgactttctgttaggcaaccacggttacgataatgcgttagcagatatgcatccaatatttttagcccatggtcctgccttcagaaagaatttctcaaaagaagccatgaactccacagatttgtacccactactatgccacctcctcaatatcactgccatgccacacaatggatcattctggaatgtccaggatctgctcaattcagcaatgccaagggtggtcccttatacacagagtactatactcctccctggtagtgttaaaccagcagaatatgaccaagaggggtcatacccttatttcataggggtctctrttggcagcattatagtgattgtattttttgtaattttcattaagcatttaattcacagtcaaatacctgcyttacaagatatgcatgctgaaatagctcaaccattattacaagcctaatgttactmtgaagtggatttgcatattgaagtggagattccataattatgtcagtgtttaaaggtttcaaattctgggaaaccagttccaaacatttgcagaaaccattaagcagttacatattraggtatacacacacacacacacacacatacacacacacggaccaaaatrcttacacctgcaaaggaataaagatgtgagagtatgtctccattgttcactgtagcstagggatagataagatcctgctttatttggacttggcgcagataatgtatatatttagcaactttgcactatgtaaagtaccttatgtattgcactttaaatttctctcctgatgrgtactttaatttgaaatgcactttatgcacagttatgtcttataacttgattgaaaatgacaactttttgcacccatgtcacagaatacttgttacgcattgttcaaactgaaggaaatttctaataatcccgaataatgaacatagaaatctatctccataaattgagagaagaagaaggtgataagtgttgaaaattaaatgtgataacctttgaaccttgaattttggagatgtattcccaacagcagaatgcaactgtgggcatttcttgtcttatttctttccagagaacgtggtttycatttatttttccctcaaaagagagtcaaatactgacagattcgttctaaatatattgtttctgtcataaaattattgtgatttcctgatgagtcatattactgtgattttcataataatgaagacaccatgaatatacttttcttctatatagttcagcaatggcctgaatagaagcaaccaggcaccatctcagcaatgttttctcttgtttgtaattatttgctcctttgaaaattaaatcactattaattacattaaaaatcaaattggataaaacaat

SEQ ID NO: 1949 - DNA, 2367 bp, Homo sapiens
atgacttcgaaatttmtcttggtgtccttcatacttgctgcactgagtctttcaaccaccttttctctccaaccagaccagcaaaaggttctactagtttcttttgatggattccsttgggattacttatataaagttccaacgccccattttcattatattatgaaatatggtgttcacgtgaagcaagttactaatgtttttrttacaaaaacctaccctaaccattatactttggtaactggcctctttgcagagaatcatgggattgttgcaaatgatatgtttgatcctattcggaacaaatctttctccttggatcacatgaatatttatgattccaagttttgggaagaagcgacaccaatatggatcacaaaccagagggcaggacatactagtggtgcagccatgtggcccggaacagatgtaaaaatacataagcgctttcctactcattacatgccttacaatgagtcagtttcatttgaagatagagttgccaaaattrttgaatggtttacgtcaaaagagcccataaatcttggtcttctctattgggaagaccctgatgacatgggccaccatttgggacctgacagtccgctcatggggcctgtcatttcagatattgacaagaagttaggatatctcatacaaatgctgaaaaaggcaaagttrtggaacackctgaacctaatcatcacaagtgatcayggaatgacgcagtgctctgaggaaaggttaatagaacttgaccagtacctggataaagaccactataccctgattgatcaatctccagtagcagccatcttgccaaaagaaggtaaatttgatgaagtctatgaagcactaactcacgctcatcctaatcttactgtttacaaaaaagaagacgttccagaaaggtggcattacaaatacaacagtcgaattcaaccaatcatagcagtggctgatgaagggtggcacattttacagaataagtcagatgactttctgttaggcaaccacggttacgataatgcgttagcagatatgcatccaatatttttagcccatggtcctgccttcagaaagaatttctcaaaagaagccatgaactccacagatttgtacccactactatgccacctcctcaatatcacygccatgccacacaatggatcattctggaatgtccaggatctgctcaattcagcaatgccaagggtggtcccttatacacagagtactatactcctccctggtagtgttaaaccagcagaatatgaccaagaggggtcatacccttatttcataggggtctctcttggcagcattatagtgattgtattttttgtaattttcattaagcatttaattcacagtcaaatacctgccttacaagatatgcatgctgaaatagctcaaccattattacaagcctaatgttactttgaagtggatttgcatrttgaagtggagattccataattatgtcagtgtttaaaggtttcaaattctgggaaaccagttccaaacatytgcagaaaccattaagcagttacatatttaggtatacacacacacacacacacacmtacacacacacggaccaaaatacttacacctgcaaaggaataaagatgtgagagtatgtctccattgttcactgtagcatagggatagataagatcctgctttatttggacttggcrcagataatgtatatatttagcaactttgcactatgtaaagtaccttatrtattgcactttaaatttctctcctgatgggtactttaatttgaaatgcactttatgsacagttatgtcttataacttgattgaaaatgacaactttttgcacccatgtcacagaatacttgttacgcattgttcaaactgaaggaaatttctaataatcccgaataatgaacrtagaaatctatctccataaattgagagaagaagaaggtgataagtgttgaaaattaaatgtgataacctttgaaccttgaattttggagatgtattcccaacagcagaatgcaactgtgggcatttcttgtcttatttctttccagagaacgtggttttcatttatttttccctcaaaagagagtcaaatactgacagattcgttctaaatatattgtttctgtcataaaattattgtgatttcctgatgagtcatattactgtgattttcataataatgaagacaccatgaatatacttttyttctatatagttcagcaatggcctgaatagaagcaaccaggcaccatctcagcaatgttttctcttgtttgtaattatttgctcctttgaaaattaaatcactattaattacattaaaaatcaaattggataaaacaat

SEQ ID NO: 1950 - DNA, 3874 bp, Homo sapiens
ccaagaagtgggtacactggctcggttaactctctctccccagaaatttcactactgaaaagattattatttgggggcggggaaggggatgtagaggtctttaggacccagcaggcggcggcaggcggcagttgtgtagatcgctgagagactacgagggtccggttcagttttaattctgtctctaatctcygcaacagccgcgcttcccgggtcccgcggctcccgcgcgcgatctgccgcggccggctgctgggcaaaaatcagagccgcctccgccccattacccatcatggaaaccctccaggaaaaagtggccccggacgcgcgagcctgaggattctgcacaaaagaggtgyccaaaatgaagaccctgatgcgccatggtctggcagtgtgtttagcgctcaccaccatgtgcaccagcttgttgctagtgtacagcagcctcggcggccagaaggagcggcccccgcagcagcagcagcarcagcagcaacagcagcagcaggcgtcggccaccggcagctcgcagccggcggcggagagcagcacccagcagcgccccggggtccccgcgggaccgcggccactggacggatacctcggagtggcggaccacaagcccctgaaaatgcactgcagggactgtgccctggtgaccagctcagggcatctgctgcacagtcggcaaggctcccagattgaccagacagagtgtgtcatccgcatgaatgacgccccyacacgcggctatgggcgtgacgtgggcaatcgcaccagcctgagggtcatcgcgcattccagcatccagaggatcctccgcwaccgccatgacctgctcaacgtgagccagggcaccgtgttcatcttctggggccccagcagctacatgcggcgggacggcaagggccaggtctacaacaacctgcatctcctgagccaggtgctgccccggctgaaggccttcatgattactcgccacaagatgctgcagtttgatgagctcttcaagcaggagactggcaaagacaggaagatatccaacacttggctcagcactggctggtttacaatgacaattgcactggagctctgtgacaggatcaatgtttatggcatggtgcccccagacttctgcagggatcccaatcacccttcagtaccttatcattattatgaaccttttggacctgatgaatgtacaatgtacctctcccatgagcgaggacgcaagggcagtcatcaccgctttatcacagagaaacgagtctttaagaactgggcacggacattcaatattcacttttttcaaccagactggaaaccagaatcacttgctataaatcatcctgagaataaacctgtgttctaaggaatgagcatgccagactgtaatcccaggtattcactgcatcagacaccgagacactgaacttcctgagccaccagacaggaaagggtagcagaaaacagcttcactcctcaggaagtaccatggacagacgcctaccaggggtgacaaagcagtgcagttggattgtaaggaaaaattccggaattaatgcatcctaatgaatgttgtccccttcaatggtgttaccttaggagctgaacattcaattcagttacaccactatgactaaaaacagtttggatctcttagtattgcctttgaaactgcaacataagcaactcaacaatattagttgcattcctttatagacataccatgtcaaagacgtttttctatcaagttgtattctttcctgttctataacctttgtcatctgttagactctgtatgtgtgatttgtaaaaagcaggctgaaactatggacatgatttctgaagagcacatctccactgactttcataaagcaaatgtccaatatttatttattgagagttttttagtgcaatctgggccagtatttttatagattatgattatgtggtaatttatccttcctaactctttaatcctgaatgatggttggaaatggcctagaattaggttactctgttcacaatgctcattgttagcatgcaattggtatttgacttggaagtgttgtgttgtattttttgaacccctaggcttcaggaaaactgctcttttgtaaaaagaatagcgatgacattttctaatgtgcagaaatgttccaaaaggacaaaattgaaaaccaaaaactatgttattaaaacaaaaaaatgctaacaagagaaatttaaaggtagttttctttagtaataatttatgtaagtgtcctctcttgagccctagtttcctttttggcagaatgatgtcactgtaccagacaacctcttaggtttcatcccaaatctaaacttgtggcctcttcttgacccatttgaagactctgcacttggagtgatggggccccaacagtagcaggaactttattttggggagccttatctacattcatattacttatatcactcttgtggttaaaactacacttcttcctgtgtccacatgggctaaaatctaccccctgcttctctcgaagcatcaccatccgcctcttccccagcctctcaacacaaaaacacaggatacacacacacacacacamaaaagacatagctccaaggggttccctggctacaatagcaaacagctgcccttctgtgaggaaaagagactacaaggacatgccctatcattcaactcatttatgctatgaactgtttagactcactacaaatcttcttagattatattcattaccattccctggtctgaaggagtataaaggacttattttattcagagccaagataaattcatattatagatttttatttaaacaagtaatattgttcaaaaatagtctcttataaatatactagtgttttctttacacatgacttagaaggcattagtttctctaatgccaaatttgaaggcaccagcaaatattatgtatgaagactgacattgttttacagacatgacctggcttatgataaaagaagttttatcgcattaccacttcttttcccttttcttaattagtacactaactagtactattaattacacggagtattgttgttaaaatgcaaacacaatcagggtactcacataacataaacaaagttgatattgatgtgtatggcttgggctgttcaaagccagtaagattgaaatggccgtccaaaacatactggaatatgttctttaagttttctcatagtttttaaagggactatgaattttattccaacacattgtcttccacagcatggactctgaacacatcatactttatcaacatatgaaaaagtgtattaattttatacaatttacttataggccacctttataatcacttgaagacgttatgttgctcaaacataagtggctcctttggcaatttctatatttgtggaaatttggaaaggcatagtttcaacrtgcaagaatgtaattatattgcttcatctaataatatctcacatatctgtctatcttcagattttagattttctttattaaaaaaaccatcatggtagctccatctcgtttgtaacttctccctctcaaatactcagaagaatgaagaggccaaattcagaaaatcatggcttcactgggaaatgttttaaatctacatgtagctaggatatgtgatttcatattttttaaaaatgtggtgtaaataagtgtaaaamattaccacttgcaaagtggttttattacagcgttaaagaaaatgactagaattctgatagattgtgctgatgaacctggttgtgggcaattgaattcttgtcttcccactaccatttcatgactgtcgtctgaacactattcaacaccattaaatataaactctgatat

SEQ ID NO: 1951 - DNA, 297 bp, Homo sapiens
atgatcatttctaaagtgaaaataaacagtgaaaagccattagctttgatgcggcctggaagaattgatagaatcatctatgtgcctttaccggatgcagcaacaagaagggaaatatttaagctgcagtttcactccatgcctgtcagtaatgaagttgacctggatgaactcatccttcaaacckacgcatactcaggagcagagaattcagtttttgatttgagacgagggctggcatcttgtatgatgatatggcaatttgcaggaaacagcaagaggaagacgaagaaacca

SEQ ID NO: 1952 - DNA, 2980 bp, Homo sapiens
gcgcacattgagtcggcttttctactgcttcggctagggtaccttgtgaccatgtcttccaagaagaatagaaagcggttgaaccaaagcgcggaaaatggttcgtccttgccctctgctgcttcctcttstgcggaggcacgggctccttctgctggatcagacttcgcggcaacctccgggactctgacggtgaccaacttattagaaaagggtaaagaattccgggtgtatacagcctggcctatggcaggatttcctggaggcaaggtcggcctgagtgaaatggcacagaaaaatgtgggtgtgaggcctggtgatgccatccaggtccagcctcttgtgggtgctgtgctacaggctgaggaaatggatgtggcactgagtgacaaagatatggaaattaatgaagaagaactgactggttgtatcctgagaaaactagatggcaagattgttttaccaggcaactttctgtattgtacattctatggacgaccgtacaagctgcaagtattgcgagtgaaaggggcagatggcatgatattgggagggcctcagagtgactctgacactgatgcccaaagaatggcctttgaacagtccagcatggaaaccagtagcctggagttatccttacagctaagccagttagatctggaggatacccagatcccaacatcaagaagtactccttataaaccaattgatgacagaattacaaataaagccagtgatgttttgctkgatgttacacagagccctggagatggcagtggacttatgctagaggaagtcacaggtcttaaatgtaattttgaatctgccagagaaggaaatgagcaacttactgaagaagagagactgctaaagttcagcataggagcaaagtgcaatactgatactttttattttatttcttcaacaacaagagtcaattttacagagattgataaaaattcaaaagagcaagacaaccaattcaaagtaacttatgacatgataggaggattaagtagccagctgaaagcaattagagaaataattgaattgcccctcaaacagcctgagcttttcaagagttatggaattcctgcccctagaggagtgttactttatggtcctccaggtactggaaaaacaatgatcgccagggctgttgctaatgaagttggagcctatgtttctgtaattaatggtcctgaaattataagcaaattctatggtgagactgaagcaaagttacgtcagatatttgctgaagccactctacgacacccatcaattatttttattgatgagctggatgcactttgtccgaaaagagagggggcccagaatgaagtggaaaaaagagttgtggcttcactcttaacactgatggatggcattggttcagaagtaagtgaaggacaagtgttggttcttggggccacaaatcgccctcatgccttggatgctgctctccgaagacctgggcgatttgataaagagattgagattggagttcccaatgctcaggaccggctagatattctccagaaactgcttcgaagggtaccccatttgctcactgaggctgagctgctgcagctggcaaatagtgctcatggatacgttggagcagacttgaaagtcttgtgtaatgaagcaggtctctgtgccttgcggagaatcctgaaaaaacagcctaacctccctgatgtcaaggtggctggactggtgaagattactctgaaggatttcttgcaggcaatgaatgatatcagacccagtgccatgagggaaatagcaattgatgtcccaaatgtatcctggtcagatataggaggactggaaagtatcaaactgaagttgsaacaggctgtggaatggcccttaaaacatccagagtctttcattcgaatgggtattcagccacctaaaggagttcttctctatgggccacctgggtgctmtaaaacaatgatagcaaaggctttggccaatgagagtggactgaattttctagctataaaggggcctgaattaatgaataaatatgttggtgaatctgaaagagcagttagagagaccttccgaaaagcaagagcagtggcgccttccattattttctttgatgaactggatgccttagcagttgaaaggggcagttctttaggtgctgggaatgtagccgatcgtgttttggctcagctcttaacagaaatggatgggattgaacagctaaaggatgtgaccattttggcagctactaaccgtccagataggatagacaaggctttgatgcggcctggaagaattgatagaatcatctatgtgcctttaccggatgcagcaacaagaagggaaatatttaagctgcagtttcactccatgcctgtcagtaatgaagttgacctggatgaactcatccttcaaacckacgcatactcaggagcagagattgtagctgtctgcagagaggcagctcttctggctctggaagaagacattcaagccaatctcatcatgaaaagacatttcactcaggccttgagcactgtgacacctagaattcctgagtcattgagacgtttttatgaagattatcaagagaagagtgggctgcatacactctgagaaaatatatatattcaagatgctgaaaatcctttccagagaaaatttgtttctttttaaaattttttgagagtgttaaaaaaaattttactaggcaaaatgtttgaagtatgttcagtagaatttaggggctttggttcttacagattttcaagtcatgtaagtacagtgaaaatatctctgagcataagtttcaatcagttttacctggaaatttgtggtgtggtttaaaaaacaaatgtttagctttttcatttgcgacctagtctgttcatcccatgaagcgatttctttttccagaatctgtttgagtgtctttctaaaatgccaaacatgttggcatcaattttatacaggg

SEQ ID NO: 1953 - DNA, 3081 bp, Homo sapiens
cgcacattgagtcggcttttctactgcttcggctagggtaccttgtgaccatgtcttccaagaagaatagaaagcggttgaaccaaagcgcggaaaatggttcgtccttgccctctgctgcttcctcttstgcggaggcacgggctccttctgctggatcagacttcgcggcaacctccgggactctgacggtgaccaacttattagaaaaggtagatgacaaaattcctaaaacattccagaattcccttattcatcttggactcaacactatgaagtctgcaaatatatgtataggtcgaccagtgttgcttactagtttgaacggaaagcaagaggtgtatacagcctggcctatggcaggatttcctggaggcaaggtcggcctgagtgaaatggcacagaaaaatgtgggtgtgaggcctggtgatgccatccaggtccagcctcttgtgggtgctgtgctacaggctgaggaaatggatgtggcactgagtgacaaagatatggaaattaatgaagaagaactgactggttgtatcctgagaaaactagatggcaagattgttttaccaggcaactttctgtattgtacattctatggacgaccgtacaagctgcaagtattgcgagtgaaaggggcagatggcatgatattgggagggcctcagagtgactctgacactgatgcccaaagaatggcctttgaacagtccagcatggaaaccagtagcctggagttatccttacagctaagccagttagatctggaggatacccagatcccaacatcaagaagtactccttataaaccaattgatgacagaattacaaataaagccagtgatgttttgctkgatgttacacagagccctggagatggcagtggacttatgctagaggaagtcacaggtcttaaatgtaattttgaatctgccagagaaggaaatgagcaacttactgaagaagagagactgctaaagttcagcataggagcaaagtgcaatactgatactttttattttatttcttcaacaacaagagtcaattttacagagattgataaaaattcaaaagagcaagacaaccaattcaaagtaacttatgacatgataggaggattaagtagccagctgaaagcaattagagaaataattgaattgcccctcaaacagcctgagcttttcaagagttatggaattcctgcccctagaggagtgttactttatggtcctccaggtactggaaaaacaatgatcgccagggctgttgctaatgaagttggagcctatgtttctgtaattaatggtcctgaaattataagcaaattctatggtgagactgaagcaaagttacgtcagatatttgctgaagccactctacgacacccatcaattatttttattgatgagctggatgcactttgtccgaaaagagagggggcccagaatgaagtggaaaaaagagttgtggcttcactcttaacactgatggatggcattggttcagtaagacaagtgttggttcttggggccacaaatcgccctcatgccttggatgctgctctccgaagacctgggcgatttgataaagagattgagattggagttcccaatgctcaggaccggctagatattctccagaaactgcttcgaagggtaccccatttgctcactgaggctgagctgctgcagctggcaaatagtgctcatggatacgttggagcagacttgaaagtcttgtgtaatgaagcaggtctctgtgccttgcggagaatcctgaaaaaacagcctaacctccctgatgtcaaggtggctggactggtgaagattactctgaaggatttcttgcaggcaatgaatgatatcagacccagtgccatgagggaaatagcaattgatgtcccaaatgtatcctggtcagatataggaggactggaaagtatcaaactgaagttgsaacaggctgtggaatggcccttaaaacatccagagtctttcattcgaatgggtattcagccacctaaaggagttcttctctatgggccacctgggtgctmtaaaacaatgatagcaaaggctttggccaatgagagtggactgaattttctagctataaaggggcctgaattaatgaataaatatgttggtgaatctgaaagagcagttagagagaccttccgaaaagcaagagcagtggcgccttccattattttctttgatgaactggatgccttagcagttgaaaggggcagttctttaggtgctgggaatgtagccgatcgtgttttggctcagctcttaacagaaatggatgggattgaacagctaaaggatgtgaccattttggcagctactaaccgtccagataggatagacaaggctttgatgcggcctggaagaattgatagaatcatctatgtgcctttaccggatgcagcaacaagaagggaaatatttaagctgcagtttcactccatgcctgtcagtaatgaagttgacctggatgaactcatccttcaaacckacgcatactcaggagcagagattgtagctgtctgcagagaggcagctcttctggctctggaagaagacattcaagccaatctcatcatgaaaagacatttcactcaggccttgagcactgtgacacctagaattcctgagtcattgagacgtttttatgaagattatcaagagaagagtgggctgcatacactctgagaaaatatatatattcaagatgctgaaaatcctttccagagaaaatttgtttctttttaaaattttttgagagtgttaaaaaaaattttactaggcaaaatgtttgaagtatgttcagtagaatttaggggctttggttcttacagattttcaagtcatgtaagtacagtgaaaatatctctgagcataagtttcaatcagttttacctggaaatttgtggtgtggtttaaaaaacaaatgtttagctttttcatttgcgacctagtctgttcatcccatgaagcgatttctttttccagaatctgtttgagtgtctttctaaaatgccaaacatgttggcatcaattttatacaggg

SEQ ID NO: 1954 - DNA, 3949 bp, Homo sapiens
aaccagaactccagagagggaaaacatctatcttgctgtgtttggacaggccagcccctgaaacatcttgggcaatggagggttaacttctcaaagtttaataggcaagaccagcaaccatgcaacaaggacttcaactaaccaactaaagaactgttccccagagcattgttcctgagaaggaaaagagtccaaacacctacccacacctgctttgtgccaagaatccacagttggattgcaaggacagtgcgttcaaracccagctgttgagagtagaaaagcagaagaaaggacccgaggtcagcaagtgccctccccacaatggggcagatctgccagcgagaatcggctacagcagctgaaaaaccaaaacttcatctacttgctgaaagtgagccgccggaggaccacggctcgccagggctgcggaggaccgaccgtccccacgcctgccgccccgcgaccccgaccgccagcatgatcgccgcgcagctcctggcctattacttcacggagctgaaggatgaccaggtcaaaaagattgacaagtatctstatgccatgcggctctccgatgaaactctcatagatatcatgactcgcttcaggaaggagatgaagaatggcctctcccgggattttaatccaacagccacagtcaagatgttgccaacwttcgtaaggtccattcctgatggctctgaaaagggagatttcattgccctggatcttggtgggtcttcctttcgaattctgcgggtgcaagtgaatcatgagaaaaaccagaatgttcacatggagtccgaggtttatgacaccccagagaacatcgtgcacggcagtggaagccagctttttgatcatgttgctgagtgcctgggagatttcatggagaaaaggaagatcaaggacaagaagttacctgtgggattcacgttttcttttccttgccaacartccaaaatagatgaggccatcctgatcacctggacaaagcgatttaaagcgagcggagtggaaggagcagatgtggtcaaactgcttaacaaagccatcaaaaagcgaggggactatgatgccaacatcgtagctgtggtgaatgacacagtgggcaccatgatgacctgtggctatgacgaccagcactgtgaagtcggcctgatcatcggcactggcaccaatgcttgctacatggaggaactgaggcacattgatctggtggaaggagacgaggggaggatgtgtatcaatacagaatggggagcctttggagaygatggatcattagaagacatccggacagagtttgacagggagatagaccggggatccctcaaccctggaaaacagctgtttgagaagatggtcagtggcatgtacttgggagagctggttcgactgatcctagtcaagatggccaaggagggcctcttatttgaagggcggatcaccccggagctgctcacccgagggaagtttaacaccagtgatgtgtcagccatcgaaaagaataaggaaggcctccacaatgccaaagaaatcctgacccgcctgggagtggagccgtccgatgatgactgtgtctcagtccagcacgtttgcaccattgtctcatttcgctcagccaacttggtggctgccacactgggcgccatcttgaaccgcctgcgtgataacaagggcacacccaggctgcggaccacggttggtgtcgacggatctctttacaagacgcacccacagtattcccggcgtttccacaagactctaaggcgcttggtgccagactccgatgtgcgcttcctcctctcggagagtggcagcggcaagggggctgccatggtgacggcggtggcctaccgcttggccgagcagcaccggcagatagaggagaccctggctcatttccacctcaccaargacatgctgctggaggtgaagaagaggatgcgggccgagatggagctggggctgaggaagcagacgcacaacaatgccgtggttaagatgctgccctccttcgtccggagaactcccgacgggaccgagaatggtgacttctyggccctggatcttggaggaaccaatttccgtgtgctgctggtgaaaatccgtagtgggaaaaagagaacggtggaaatgcacaacaagatctacgccattcctattgaaatcatgcagggcactggggaagagctgtttgatcacattgtctcctgcatctctgacttcttggactacatggggatcaaaggccccaggatgcctctgggcttcacgttctcatttccctgccagcagacgagtctggacgcgggaatcttgatcacgtggacaaagggttttaaggcaacagactgcgtgggccacgatgtagtcaccttactaagggatgcgataaaaaggagagaggaatttgacctggacgtggtggctgtggtcaacgacacagtgggcaccatgatgacctgtgcttatgaggagcccacctgtgaggttggactcattgttgggasyggcagcaatgcctgctacatggaggagatgaagaacgtggagatggtggagggggaccaggggcagatgtgcatcaacatggagtggggggcctttggggacaacgggtgtctggatgatatcaggacacactacgacagactggtggacgaatattccctaaatgctgggaaacaaaggtatgagaagatgatcagtggtatgtacctgggtgaaatcgtccgcaacatcttaatcgacttcaccaagaagggattcctcttccgagggcagatctctgagacgmtgaagacccggggcatctttgagaccaagtttctctctcagatcgagagtgaccgattagcactgctccaggtccgggctatcctccagcagctaggtctgaatagcacctgcgatgacagtatcctcgtcaagacagtgtgcggggtggtgtccaggagggccgcacagctgtgtggcgcaggcatggctgcggttgtggataagatccgcgagaacagaggactggaccgtctgaatgtgactgtgggagtggacgggacactctacaagcttcatccacacttytccagaatcatgcaccagacggtgaaggaactgtcaccaaaatgtaacgtgtccttcctcctgtctgaggatggcagyggcaagggggccgccctcatcacggccgtgggcgtgcggttacgcacagaggcaagcagctaagagtcygggatccccagcctastgcctctccagcacttctctcttcaagcggcgaccccctaccctcccagcgagttgckctgggagacgctggcgccagggcctgccggcgcggggaggaaagcaaaatccaactaatggtatatattgtagggtacagaatagagcgtgtgctgttgataatatctctcacccggatccctcctcacttgccctgccactttgcatggtttgattttgacctggtcccccacgtgtgaagtgtagtggcatccatttctaatgtatgcattcatccaacagagttatttattggctggagatggaawatcacaccacctgacaggccttctgggcctccaaagcccatccttggggttccccctcccygtgtgaaatgtattatcaccagcagacactgccgggcctccctcccgggggcactgcctgaaggcgagtgtgggcatagcattagctgcttcctcccctcctggcacccactgtggcctggcatcgcatcgtggtgtgtcaatgccacaaaatcgtgtgtccgtggaaccagtcctagccgcgtgtgacagtcttgcattctgtttktctcgtggggggaggtggacagtcctgcggaaatgtgtcttgaaacaatgccatcactggaatttcccaccgctttgtgagccgtgtcgtatgacctagtaaactttgtaccaattca

SEQ ID NO: 1955 - DNA, 3901 bp, Homo sapiens
aaccagaactccagagagggaaaacatctatcttgctgtgtttggacaggccagcccctgaaacatcttgggcaatggagggttaacttctcaaagtttaataggcaagaccagcaaccatgcaacaaggacttcaactaaccaactaaagaactgttccccagagcattgttcctgagaaggaaaagagtccaaacacctacccacacctgctttgtgccaagaatccacagttggattgcaaggacagtgtatgttgtccttttggaaaaatgagagtgagcccaaatgaagaacaagcaaaggcgttcaaracccagctgttgagagtagaaaagcagaagaaaggacccgaggtcagcaagtgccctccccacaatggggcagatctgccagcgagaatcggctacagcagctgaaaaaccaaaacttcatctacttgctgaaagtgagattgacaagtatctstatgccatgcggctctccgatgaaactctcatagatatcatgactcgcttcaggaaggagatgaagaatggcctctcccgggattttaatccaacagccacagtcaagatgttgccaacwttcgtaaggtccattcctgatggctctgaaaagggagatttcattgccctggatcttggtgggtcttcctttcgaattctgcgggtgcaagtgaatcatgagaaaaaccagaatgttcacatggagtccgaggtttatgacaccccagagaacatcgtgcacggcagtggaagccagctttttgatcatgttgctgagtgcctgggagatttcatggagaaaaggaagatcaaggacaagaagttacctgtgggattcacgttttcttttccttgccaacartccaaaatagatgaggccatcctgatcacctggacaaagcgatttaaagcgagcggagtggaaggagcagatgtggtcaaactgcttaacaaagccatcaaaaagcgaggggactatgatgccaacatcgtagctgtggtgaatgacacagtgggcaccatgatgacctgtggctatgacgaccagcactgtgaagtcggcctgatcatcggcactggcaccaatgcttgctacatggaggaactgaggcacattgatctggtggaaggagacgaggggaggatgtgtatcaatacagaatggggagcctttggagaygatggatcattagaagacatccggacagagtttgacagggagatagaccggggatccctcaaccctggaaaacagctgtttgagaagatggtcagtggcatgtacttgggagagctggttcgactgatcctagtcaagatggccaaggagggcctcttatttgaagggcggatcaccccggagctgctcacccgagggaagtttaacaccagtgatgtgtcagccatcgaaaagaataaggaaggcctccacaatgccaaagaaatcctgacccgcctgggagtggagccgtccgatgatgactgtgtctcagtccagcacgtttgcaccattgtctcatttcgctcagccaacttggtggctgccacactgggcgccatcttgaaccgcctgcgtgataacaagggcacacccaggctgcggaccacggttggtgtcgacggatctctttacaagacgcacccacagtattcccggcgtttccacaagactctaaggcgcttggtgccagactccgatgtgcgcttcctcctctcggagagtggcagcggcaagggggctgccatggtgacggcggtggcctaccgcttggccgagcagcaccggcagatagaggagaccctggctcatttccacctcaccaargacatgctgctggaggtgaagaagaggatgcgggccgagatggagctggggctgaggaagcagacgcacaacaatgccgtggttaagatgctgccctccttcgtccggagaactcccgacgggaccgagaatggtgacttctyggccctggatcttggaggaaccaatttccgtgtgctgctggtgaaaatccgtagtgggaaaaagagaacggtggaaatgcacaacaagatctacgccattcctattgaaatcatgcagggcactggggaagagctgtttgatcacattgtctcctgcatctctgacttcttggactacatggggatcaaaggccccaggatgcctctgggcttcacgttctcatttccctgccagcagacgagtctggacgcgggaatcttgatcacgtggacaaagggttttaaggcaacagactgcgtgggccacgatgtagtcaccttactaagggatgcgataaaaaggagagaggaatttgacctggacgtggtggctgtggtcaacgacacagtgggcaccatgatgacctgtgcttatgaggagcccacctgtgaggttggactcattgttgggasyggcagcaatgcctgctacatggaggagatgaagaacgtggagatggtggagggggaccaggggcagatgtgcatcaacatggagtggggggcctttggggacaacgggtgtctggatgatatcaggacacactacgacagactggtggacgaatattccctaaatgctgggaaacaaaggtatgagaagatgatcagtggtatgtacctgggtgaaatcgtccgcaacatcttaatcgacttcaccaagaagggattcctcttccgagggcagatctctgagacgmtgaagacccggggcatctttgagaccaagtttctctctcagatcgagagtgaccgattagcactgctccaggtccgggctatcctccagcagctaggtctgaatagcacctgcgatgacagtatcctcgtcaagacagtgtgcggggtggtgtccaggagggccgcacagctgtgtggcgcaggcatggctgcggttgtggataagatccgcgagaacagaggactggaccgtctgaatgtgactgtgggagtggacgggacactctacaagcttcatccacacttytccagaatcatgcaccagacggtgaaggaactgtcaccaaaatgtaacgtgtccttcctcctgtctgaggatggcagyggcaagggggccgccctcatcacggccgtgggcgtgcggttacgcacagaggcaagcagctaagagtcygggatccccagcctastgcctctccagcacttctctcttcaagcggcgaccccctaccctcccagcgagttgckctgggagacgctggcgccagggcctgccggcgcggggaggaaagcaaaatccaactaatggtatatattgtagggtacagaatagagcgtgtgctgttgataatatctctcacccggatccctcctcacttgccctgccactttgcatggtttgattttgacctggtcccccacgtgtgaagtgtagtggcatccatttctaatgtatgcattcatccaacagagttatttattggctggagatggaawatcacaccacctgacaggccttctgggcctccaaagcccatccttggggttccccctcccygtgtgaaatgtattatcaccagcagacactgccgggcctccctcccgggggcactgcctgaaggcgagtgtgggcatagcattagctgcttcctcccctcctggcacccactgtggcctggcatcgcatcgtggtgtgtcaatgccacaaaatcgtgtgtccgtggaaccagtcctagccgcgtgtgacagtcttgcattctgtttktctcgtggggggaggtggacagtcctgcggaaatgtgtcttgtctccatttggataaaaggaaccaaccaacaaacaatgccatcactggaatttcccaccgctttgtgagccgtgtcgtatgacctagtaaactttgtaccaattcaaagacccgagtg

SEQ ID NO: 1956 - DNA, 3994 bp, Homo sapiens
aaccagaactccagagagggaaaacatctatcttgctgtgtttggacaggccagcccctgaaacatcttgggcaatggagggttaacttctcaaagtttaataggcaagaccagcaaccatgcaacaaggacttcaactaaccaactaaagaactgttccccagagcattgttcctgagaaggaaaagagtccaaacacctacccacacctgctttgtgccaagaatccacagttggattgcaaggacagtgtatgttgtccttttggaaaaatgagagtgagcccaaatgaagaacaagcaaaggcgttcaaracccagctgttgagagtagaaaagcagaagaaaggacccgaggtcagcaagtgccctccccacaatggggcagatctgccagcgagaatcggctacagcagctgaaaaaccaaaacttcatctacttgctgaaagtgagcattgttgatgctcttgagagcatcagccaggacattaatgtgcaccactgtggtggcgtggaaagatggcaaaaagagccctgcrtgattttattgacaagtatctstatgccatgcggctctccgatgaaactctcatagatatcatgactcgcttcaggaaggagatgaagaatggcctctcccgggattttaatccaacagccacagtcaagatgttgccaacwttcgtaaggtccattcctgatggctctgaaaagggagatttcattgccctggatcttggtgggtcttcctttcgaattctgcgggtgcaagtgaatcatgagaaaaaccagaatgttcacatggagtccgaggtttatgacaccccagagaacatcgtgcacggcagtggaagccagctttttgatcatgttgctgagtgcctgggagatttcatggagaaaaggaagatcaaggacaagaagttacctgtgggattcacgttttcttttccttgccaacartccaaaatagatgaggccatcctgatcacctggacaaagcgatttaaagcgagcggagtggaaggagcagatgtggtcaaactgcttaacaaagccatcaaaaagcgaggggactatgatgccaacatcgtagctgtggtgaatgacacagtgggcaccatgatgacctgtggctatgacgaccagcactgtgaagtcggcctgatcatcggcactggcaccaatgcttgctacatggaggaactgaggcacattgatctggtggaaggagacgaggggaggatgtgtatcaatacagaatggggagcctttggagaygatggatcattagaagacatccggacagagtttgacagggagatagaccggggatccctcaaccctggaaaacagctgtttgagaagatggtcagtggcatgtacttgggagagctggttcgactgatcctagtcaagatggccaaggagggcctcttatttgaagggcggatcaccccggagctgctcacccgagggaagtttaacaccagtgatgtgtcagccatcgaaaagaataaggaaggcctccacaatgccaaagaaatcctgacccgcctgggagtggagccgtccgatgatgactgtgtctcagtccagcacgtttgcaccattgtctcatttcgctcagccaacttggtggctgccacactgggcgccatcttgaaccgcctgcgtgataacaagggcacacccaggctgcggaccacggttggtgtcgacggatctctttacaagacgcacccacagtattcccggcgtttccacaagactctaaggcgcttggtgccagactccgatgtgcgcttcctcctctcggagagtggcagcggcaagggggctgccatggtgacggcggtggcctaccgcttggccgagcagcaccggcagatagaggagaccctggctcatttccacctcaccaargacatgctgctggaggtgaagaagaggatgcgggccgagatggagctggggctgaggaagcagacgcacaacaatgccgtggttaagatgctgccctccttcgtccggagaactcccgacgggaccgagaatggtgacttctyggccctggatcttggaggaaccaatttccgtgtgctgctggtgaaaatccgtagtgggaaaaagagaacggtggaaatgcacaacaagatctacgccattcctattgaaatcatgcagggcactggggaagagctgtttgatcacattgtctcctgcatctctgacttcttggactacatggggatcaaaggccccaggatgcctctgggcttcacgttctcatttccctgccagcagacgagtctggacgcgggaatcttgatcacgtggacaaagggttttaaggcaacagactgcgtgggccacgatgtagtcaccttactaagggatgcgataaaaaggagagaggaatttgacctggacgtggtggctgtggtcaacgacacagtgggcaccatgatgacctgtgcttatgaggagcccacctgtgaggttggactcattgttgggasyggcagcaatgcctgctacatggaggagatgaagaacgtggagatggtggagggggaccaggggcagatgtgcatcaacatggagtggggggcctttggggacaacgggtgtctggatgatatcaggacacactacgacagactggtggacgaatattccctaaatgctgggaaacaaaggtatgagaagatgatcagtggtatgtacctgggtgaaatcgtccgcaacatcttaatcgacttcaccaagaagggattcctcttccgagggcagatctctgagacgmtgaagacccggggcatctttgagaccaagtttctctctcagatcgagagtgaccgattagcactgctccaggtccgggctatcctccagcagctaggtctgaatagcacctgcgatgacagtatcctcgtcaagacagtgtgcggggtggtgtccaggagggccgcacagctgtgtggcgcaggcatggctgcggttgtggataagatccgcgagaacagaggactggaccgtctgaatgtgactgtgggagtggacgggacactctacaagcttcatccacacttytccagaatcatgcaccagacggtgaaggaactgtcaccaaaatgtaacgtgtccttcctcctgtctgaggatggcagyggcaagggggccgccctcatcacggccgtgggcgtgcggttacgcacagaggcaagcagctaagagtcygggatccccagcctastgcctctccagcacttctctcttcaagcggcgaccccctaccctcccagcgagttgckctgggagacgctggcgccagggcctgccggcgcggggaggaaagcaaaatccaactaatggtatatattgtagggtacagaatagagcgtgtgctgttgataatatctctcacccggatccctcctcacttgccctgccactttgcatggtttgattttgacctggtcccccacgtgtgaagtgtagtggcatccatttctaatgtatgcattcatccaacagagttatttattggctggagatggaawatcacaccacctgacaggccttctgggcctccaaagcccatccttggggttccccctcccygtgtgaaatgtattatcaccagcagacactgccgggcctccctcccgggggcactgcctgaaggcgagtgtgggcatagcattagctgcttcctcccctcctggcacccactgtggcctggcatcgcatcgtggtgtgtcaatgccacaaaatcgtgtgtccgtggaaccagtcctagccgcgtgtgacagtcttgcattctgtttktctcgtggggggaggtggacagtcctgcggaaatgtgtcttgtctccatttggataaaaggaaccaaccaacaaacaatgccatcactggaatttcccaccgctttgtgagccgtgtcgtatgacctagtaaactttgtaccaattcaaagacccgagtg

SEQ ID NO: 1957 - DNA, 3592 bp, Homo sapiens
ccgccggaggaccacggctcgccagggctgcggaggaccgaccgtccccacgcctgccgccccgcgaccccgaccgccagcatgatcgccgcgcagctcctggcctattacttcacggagctgaaggatgaccaggtcaaaaagattgacaagtatctstatgccatgcggctctccgatgaaactctcatagatatcatgactcgcttcaggaaggagatgaagaatggcctctcccgggattttaatccaacagccacagtcaagatgttgccaacwttcgtaaggtccattcctgatggctctgaaaagggagatttcattgccctggatcttggtgggtcttcctttcgaattctgcgggtgcaagtgaatcatgagaaaaaccagaatgttcacatggagtccgaggtttatgacaccccagagaacatcgtgcacggcagtggaagccagctttttgatcatgttgctgagtgcctgggagatttcatggagaaaaggaagatcaaggacaagaagttacctgtgggattcacgttttcttttccttgccaacartccaaaatagatgaggccatcctgatcacctggacaaagcgatttaaagcgagcggagtggaaggagcagatgtggtcaaactgcttaacaaagccatcaaaaagcgaggggactatgatgccaacatcgtagctgtggtgaatgacacagtgggcaccatgatgacctgtggctatgacgaccagcactgtgaagtcggcctgatcatcggcactggcaccaatgcttgctacatggaggaactgaggcacattgatctggtggaaggagacgaggggaggatgtgtatcaatacagaatggggagcctttggagaygatggatcattagaagacatccggacagagtttgacagggagatagaccggggatccctcaaccctggaaaacagctgtttgagaagatggtcagtggcatgtacttgggagagctggttcgactgatcctagtcaagatggccaaggagggcctcttatttgaagggcggatcaccccggagctgctcacccgagggaagtttaacaccagtgatgtgtcagccatcgaaaagaataaggaaggcctccacaatgccaaagaaatcctgacccgcctgggagtggagccgtccgatgatgactgtgtctcagtccagcacgtttgcaccattgtctcatttcgctcagccaacttggtggctgccacactgggcgccatcttgaaccgcctgcgtgataacaagggcacacccaggctgcggaccacggttggtgtcgacggatctctttacaagacgcacccacagtattcccggcgtttccacaagactctaaggcgcttggtgccagactccgatgtgcgcttcctcctctcggagagtggcagcggcaagggggctgccatggtgacggcggtggcctaccgcttggccgagcagcaccggcagatagaggagaccctggctcatttccacctcaccaargacatgctgctggaggtgaagaagaggatgcgggccgagatggagctggggctgaggaagcagacgcacaacaatgccgtggttaagatgctgccctccttcgtccggagaactcccgacgggaccgagaatggtgacttctyggccctggatcttggaggaaccaatttccgtgtgctgctggtgaaaatccgtagtgggaaaaagagaacggtggaaatgcacaacaagatctacgccattcctattgaaatcatgcagggcactggggaagagctgtttgatcacattgtctcctgcatctctgacttcttggactacatggggatcaaaggccccaggatgcctctgggcttcacgttctcatttccctgccagcagacgagtctggacgcgggaatcttgatcacgtggacaaagggttttaaggcaacagactgcgtgggccacgatgtagtcaccttactaagggatgcgataaaaaggagagaggaatttgacctggacgtggtggctgtggtcaacgacacagtgggcaccatgatgacctgtgcttatgaggagcccacctgtgaggttggactcattgttgggasyggcagcaatgcctgctacatggaggagatgaagaacgtggagatggtggagggggaccaggggcagatgtgcatcaacatggagtggggggcctttggggacaacgggtgtctggatgatatcaggacacactacgacagactggtggacgaatattccctaaatgctgggaaacaaaggtatgagaagatgatcagtggtatgtacctgggtgaaatcgtccgcaacatcttaatcgacttcaccaagaagggattcctcttccgagggcagatctctgagacgmtgaagacccggggcatctttgagaccaagtttctctctcagatcgagagtgaccgattagcactgctccaggtccgggctatcctccagcagctaggtctgaatagcacctgcgatgacagtatcctcgtcaagacagtgtgcggggtggtgtccaggagggccgcacagctgtgtggcgcaggcatggctgcggttgtggataagatccgcgagaacagaggactggaccgtctgaatgtgactgtgggagtggacgggacactctacaagcttcatccacacttytccagaatcatgcaccagacggtgaaggaactgtcaccaaaatgtaacgtgtccttcctcctgtctgaggatggcagyggcaagggggccgccctcatcacggccgtgggcgtgcggttacgcacagaggcaagcagctaagagtcygggatccccagcctastgcctctccagcacttctctcttcaagcggcgaccccctaccctcccagcgagttgckctgggagacgctggcgccagggcctgccggcgcggggaggaaagcaaaatccaactaatggtatatattgtagggtacagaatagagcgtgtgctgttgataatatctctcacccggatccctcctcacttgccctgccactttgcatggtttgattttgacctggtcccccacgtgtgaagtgtagtggcatccatttctaatgtatgcattcatccaacagagttatttattggctggagatggaawatcacaccacctgacaggccttctgggcctccaaagcccatccttggggttccccctcccygtgtgaaatgtattatcaccagcagacactgccgggcctccctcccgggggcactgcctgaaggcgagtgtgggcatagcattagctgcttcctcccctcctggcacccactgtggcctggcatcgcatcgtggtgtgtcaatgccacaaaatcgtgtgtccgtggaaccagtcctagccgcgtgtgacagtcttgcattctgtttktctcgtggggggaggtggacagtcctgcggaaatgtgtcttgtctccatttggataaaaggaaccaaccaacaaacaatgccatcactggaatttcccaccgctttgtgagccgtgtcgtatgacctagtaaactttgtaccaattcaaagacccgagtg

SEQ ID NO: 1958 - DNA, 3991 bp, Homo sapiens
aaccagaactccagagagggaaaacatctatcttgctgtgtttggacaggccagcccctgaaacatcttgggcaatggagggttaacttctcaaagtttaataggcaagaccagcaaccatgcaacaaggacttcaactaaccaactaaagaactgttccccagagcattgttcctgagaaggaaaagagtccaaacacctacccacacctgctttgtgccaagaatccacagttggattgcaaggacagtgcgttcaaracccagctgttgagagtagaaaagcagaagaaaggacccgaggtcagcaagtgccctccccacaatggggcagatctgccagcgagaatcggctacagcagctgaaaaaccaaaacttcatctacttgctgaaagtgagccgccggaggaccacggctcgccagggctgcggaggaccgaccgtccccacgcctgccgccccgcgaccccgaccgccagcatgatcgccgcgcagctcctggcctattacttcacggagctgaaggatgaccaggtcaaaaagattgacaagtatctstatgccatgcggctctccgatgaaactctcatagatatcatgactcgcttcaggaaggagatgaagaatggcctctcccgggattttaatccaacagccacagtcaagatgttgccaacwttcgtaaggtccattcctgatggctctgaaaagggagatttcattgccctggatcttggtgggtcttcctttcgaattctgcgggtgcaagtgaatcatgagaaaaaccagaatgttcacatggagtccgaggtttatgacaccccagagaacatcgtgcacggcagtggaagccagctttttgatcatgttgctgagtgcctgggagatttcatggagaaaaggaagatcaaggacaagaagttacctgtgggattcacgttttcttttccttgccaacartccaaaatagatgaggccatcctgatcacctggacaaagcgatttaaagcgagcggagtggaaggagcagatgtggtcaaactgcttaacaaagccatcaaaaagcgaggggactatgatgccaacatcgtagctgtggtgaatgacacagtgggcaccatgatgacctgtggctatgacgaccagcactgtgaagtcggcctgatcatcggcactggcaccaatgcttgctacatggaggaactgaggcacattgatctggtggaaggagacgaggggaggatgtgtatcaatacagaatggggagcctttggagaygatggatcattagaagacatccggacagagtttgacagggagatagaccggggatccctcaaccctggaaaacagctgtttgagaagatggtcagtggcatgtacttgggagagctggttcgactgatcctagtcaagatggccaaggagggcctcttatttgaagggcggatcaccccggagctgctcacccgagggaagtttaacaccagtgatgtgtcagccatcgaaaagaataaggaaggcctccacaatgccaaagaaatcctgacccgcctgggagtggagccgtccgatgatgactgtgtctcagtccagcacgtttgcaccattgtctcatttcgctcagccaacttggtggctgccacactgggcgccatcttgaaccgcctgcgtgataacaagggcacacccaggctgcggaccacggttggtgtcgacggatctctttacaagacgcacccacagtattcccggcgtttccacaagactctaaggcgcttggtgccagactccgatgtgcgcttcctcctctcggagagtggcagcggcaagggggctgccatggtgacggcggtggcctaccgcttggccgagcagcaccggcagatagaggagaccctggctcatttccacctcaccaargacatgctgctggaggtgaagaagaggatgcgggccgagatggagctggggctgaggaagcagacgcacaacaatgccgtggttaagatgctgccctccttcgtccggagaactcccgacgggaccgagaatggtgacttctyggccctggatcttggaggaaccaatttccgtgtgctgctggtgaaaatccgtagtgggaaaaagagaacggtggaaatgcacaacaagatctacgccattcctattgaaatcatgcagggcactggggaagagctgtttgatcacattgtctcctgcatctctgacttcttggactacatggggatcaaaggccccaggatgcctctgggcttcacgttctcatttccctgccagcagacgagtctggacgcgggaatcttgatcacgtggacaaagggttttaaggcaacagactgcgtgggccacgatgtagtcaccttactaagggatgcgataaaaaggagagaggaatttgacctggacgtggtggctgtggtcaacgacacagtgggcaccatgatgacctgtgcttatgaggagcccacctgtgaggttggactcattgttgggasyggcagcaatgcctgctacatggaggagatgaagaacgtggagatggtggagggggaccaggggcagatgtgcatcaacatggagtggggggcctttggggacaacgggtgtctggatgatatcaggacacactacgacagactggtggacgaatattccctaaatgctgggaaacaaaggtatgagaagatgatcagtggtatgtacctgggtgaaatcgtccgcaacatcttaatcgacttcaccaagaagggattcctcttccgagggcagatctctgagacgmtgaagacccggggcatctttgagaccaagtttctctctcagatcgagagtgaccgattagcactgctccaggtccgggctatcctccagcagctaggtctgaatagcacctgcgatgacagtatcctcgtcaagacagtgtgcggggtggtgtccaggagggccgcacagctgtgtggcgcaggcatggctgcggttgtggataagatccgcgagaacagaggactggaccgtctgaatgtgactgtgggagtggacgggacactctacaagcttcatccacacttytccagaatcatgcaccagacggtgaaggaactgtcaccaaaatgtaacgtgtccttcctcctgtctgaggatggcagyggcaagggggccgccctcatcacggccgtgggcgtgcggttacgcacagaggcaagcagctaagagtcygggatccccagcctastgcctctccagcacttctctcttcaagcggcgaccccctaccctcccagcgagttgckctgggagacgctggcgccagggcctgccggcgcggggaggaaagcaaaatccaactaatggtatatattgtagggtacagaatagagcgtgtgctgttgataatatctctcacccggatccctcctcacttgccctgccactttgcatggtttgattttgacctggtcccccacgtgtgaagtgtagtggcatccatttctaatgtatgcattcatccaacagagttatttattggctggagatggaawatcacaccacctgacaggccttctgggcctccaaagcccatccttggggttccccctcccygtgtgaaatgtattatcaccagcagacactgccgggcctccctcccgggggcactgcctgaaggcgagtgtgggcatagcattagctgcttcctcccctcctggcacccactgtggcctggcatcgcatcgtggtgtgtcaatgccacaaaatcgtgtgtccgtggaaccagtcctagccgcgtgtgacagtcttgcattctgtttktctcgtggggggaggtggacagtcctgcggaaatgtgtcttgtctccatttggataaaaggaaccaaccaacaaacaatgccatcactggaatttcccaccgctttgtgagccgtgtcgtatgacctagtaaactttgtaccaattcaaagacccgagtg

SEQ ID NO: 1959 - DNA, 405 bp, Homo sapiens
atggaaagtactatggatcaaattggaaatccatctctcctctcaaaggcagctaaagctatgtggtcaggctctgggccccagattccagtcctgatttctgagtctgctttccaggcgttcaaracccagctgttgagagtagaaaagcagaagaaaggacccgaggtcagcaagtgccctccccacaatggggcagatctgccagcgagaatcgaggggtgtgttggggtccatcttagaggagggaaaactctgaccaagagcacagcaggaaagcgtcatgaggcaaggcaggagccccctcagacccagcctctaagtcttggtgcagcaggggccacttgtgttctgaccaagggaagcccagaggatcgttctgtatccccctggttaattgctttt

SEQ ID NO: 1960 - DNA, 3805 bp, Homo sapiens
aaccagaactccagagagggaaaacatctatcttgctgtgtttggacaggccagcccctgaaacatcttgggcaatggagggttaacttctcaaagtttaataggcaagaccagcaaccatgcaacaaggacttcaactaaccaactaaagaactgttccccagagcattgttcctgagaaggaaaagagtccaaacacctacccacacctgctttgtgccaagaatccacagttggattgcaaggacagtgcgttcaaracccagctgttgagagtagaaaagcagaagaaaggacccgaggtcagcaagtgccctccccacaatggggcagatctgccagcgagaatcggctacagcagctgaaaaaccaaaacttcatctacttgctgaaagtgagattgacaagtatctstatgccatgcggctctccgatgaaactctcatagatatcatgactcgcttcaggaaggagatgaagaatggcctctcccgggattttaatccaacagccacagtcaagatgttgccaacwttcgtaaggtccattcctgatggctctgaaaagggagatttcattgccctggatcttggtgggtcttcctttcgaattctgcgggtgcaagtgaatcatgagaaaaaccagaatgttcacatggagtccgaggtttatgacaccccagagaacatcgtgcacggcagtggaagccagctttttgatcatgttgctgagtgcctgggagatttcatggagaaaaggaagatcaaggacaagaagttacctgtgggattcacgttttcttttccttgccaacartccaaaatagatgaggccatcctgatcacctggacaaagcgatttaaagcgagcggagtggaaggagcagatgtggtcaaactgcttaacaaagccatcaaaaagcgaggggactatgatgccaacatcgtagctgtggtgaatgacacagtgggcaccatgatgacctgtggctatgacgaccagcactgtgaagtcggcctgatcatcggcactggcaccaatgcttgctacatggaggaactgaggcacattgatctggtggaaggagacgaggggaggatgtgtatcaatacagaatggggagcctttggagaygatggatcattagaagacatccggacagagtttgacagggagatagaccggggatccctcaaccctggaaaacagctgtttgagaagatggtcagtggcatgtacttgggagagctggttcgactgatcctagtcaagatggccaaggagggcctcttatttgaagggcggatcaccccggagctgctcacccgagggaagtttaacaccagtgatgtgtcagccatcgaaaagaataaggaaggcctccacaatgccaaagaaatcctgacccgcctgggagtggagccgtccgatgatgactgtgtctcagtccagcacgtttgcaccattgtctcatttcgctcagccaacttggtggctgccacactgggcgccatcttgaaccgcctgcgtgataacaagggcacacccaggctgcggaccacggttggtgtcgacggatctctttacaagacgcacccacagtattcccggcgtttccacaagactctaaggcgcttggtgccagactccgatgtgcgcttcctcctctcggagagtggcagcggcaagggggctgccatggtgacggcggtggcctaccgcttggccgagcagcaccggcagatagaggagaccctggctcatttccacctcaccaargacatgctgctggaggtgaagaagaggatgcgggccgagatggagctggggctgaggaagcagacgcacaacaatgccgtggttaagatgctgccctccttcgtccggagaactcccgacgggaccgagaatggtgacttctyggccctggatcttggaggaaccaatttccgtgtgctgctggtgaaaatccgtagtgggaaaaagagaacggtggaaatgcacaacaagatctacgccattcctattgaaatcatgcagggcactggggaagagctgtttgatcacattgtctcctgcatctctgacttcttggactacatggggatcaaaggccccaggatgcctctgggcttcacgttctcatttccctgccagcagacgagtctggacgcgggaatcttgatcacgtggacaaagggttttaaggcaacagactgcgtgggccacgatgtagtcaccttactaagggatgcgataaaaaggagagaggaatttgacctggacgtggtggctgtggtcaacgacacagtgggcaccatgatgacctgtgcttatgaggagcccacctgtgaggttggactcattgttgggasyggcagcaatgcctgctacatggaggagatgaagaacgtggagatggtggagggggaccaggggcagatgtgcatcaacatggagtggggggcctttggggacaacgggtgtctggatgatatcaggacacactacgacagactggtggacgaatattccctaaatgctgggaaacaaaggtatgagaagatgatcagtggtatgtacctgggtgaaatcgtccgcaacatcttaatcgacttcaccaagaagggattcctcttccgagggcagatctctgagacgmtgaagacccggggcatctttgagaccaagtttctctctcagatcgagagtgaccgattagcactgctccaggtccgggctatcctccagcagctaggtctgaatagcacctgcgatgacagtatcctcgtcaagacagtgtgcggggtggtgtccaggagggccgcacagctgtgtggcgcaggcatggctgcggttgtggataagatccgcgagaacagaggactggaccgtctgaatgtgactgtgggagtggacgggacactctacaagcttcatccacacttytccagaatcatgcaccagacggtgaaggaactgtcaccaaaatgtaacgtgtccttcctcctgtctgaggatggcagyggcaagggggccgccctcatcacggccgtgggcgtgcggttacgcacagaggcaagcagctaagagtcygggatccccagcctastgcctctccagcacttctctcttcaagcggcgaccccctaccctcccagcgagttgckctgggagacgctggcgccagggcctgccggcgcggggaggaaagcaaaatccaactaatggtatatattgtagggtacagaatagagcgtgtgctgttgataatatctctcacccggatccctcctcacttgccctgccactttgcatggtttgattttgacctggtcccccacgtgtgaagtgtagtggcatccatttctaatgtatgcattcatccaacagagttatttattggctggagatggaawatcacaccacctgacaggccttctgggcctccaaagcccatccttggggttccccctcccygtgtgaaatgtattatcaccagcagacactgccgggcctccctcccgggggcactgcctgaaggcgagtgtgggcatagcattagctgcttcctcccctcctggcacccactgtggcctggcatcgcatcgtggtgtgtcaatgccacaaaatcgtgtgtccgtggaaccagtcctagccgcgtgtgacagtcttgcattctgtttktctcgtggggggaggtggacagtcctgcggaaatgtgtcttgaaacaatgccatcactggaatttcccaccgctttgtgagccgtgtcgtatgacctagtaaactttgtaccaattca

SEQ ID NO: 1961 - DNA, 762 bp, Homo sapiens
atggggacaggccacgacctgtggcccaagtcccgcccagagggagtgcgccctgagggagagccaccggagctggtgactcgggggcgggtgctctggggtgtcgctttgggttcagcaatacaaatctgccagctggagattaggcggggcacgccggggagaggtgatgcactgccgctgaagacccagccgccggaggaccacggctcgccagggctgcggaggaccgaccgtccccacgcctgccgccccgcgaccccgaccgccagcatgatcgccgcgcagctcctggcctattacttcacggagctgaaggatgaccaggtcaaaaagtactcatatgaaccaaagccaacattcattgttgtattcattgccatgtactgtgctaaaggcatcgtgagcctttgcttagttcatccccacaacgcccttgtgagagaccggctgccgagagcaggacagaaactaggttcccggctgccacccacactactgaggtggggctgggcagccgcagaagccatgtgcagtcaggaagaggagtccggggctgctgggcgggcacagaccacgattgacaagtatctstatgccatgcggctctccgatgaaactctcatagatatcatgactcgcttcaggaaggagatgaagaatggcctctcccgggattttaatccaacagccacagtcaagatgttgccaacwttcgtaaggtccattcctgatggctctggtaagtctgtcacccagaga

SEQ ID NO: 1962 - DNA, 3607 bp, Homo sapiens
tggacagagcactggctgggcatcaggactaggctggagtcctggctcaaaactctaccacaacctgacactgggcaagatggcccacctgtggcatcccaggttcctgccctgtaaagaggagtctgggtgtatatccagatggactgtgagcacagcctgagtttgccctgtcgaggtgctgaggcctgggagattgggattgacaagtatctstatgccatgcggctctccgatgaaactctcatagatatcatgactcgcttcaggaaggagatgaagaatggcctctcccgggattttaatccaacagccacagtcaagatgttgccaacwttcgtaaggtccattcctgatggctctgaaaagggagatttcattgccctggatcttggtgggtcttcctttcgaattctgcgggtgcaagtgaatcatgagaaaaaccagaatgttcacatggagtccgaggtttatgacaccccagagaacatcgtgcacggcagtggaagccagctttttgatcatgttgctgagtgcctgggagatttcatggagaaaaggaagatcaaggacaagaagttacctgtgggattcacgttttcttttccttgccaacartccaaaatagatgaggccatcctgatcacctggacaaagcgatttaaagcgagcggagtggaaggagcagatgtggtcaaactgcttaacaaagccatcaaaaagcgaggggactatgatgccaacatcgtagctgtggtgaatgacacagtgggcaccatgatgacctgtggctatgacgaccagcactgtgaagtcggcctgatcatcggcactggcaccaatgcttgctacatggaggaactgaggcacattgatctggtggaaggagacgaggggaggatgtgtatcaatacagaatggggagcctttggagaygatggatcattagaagacatccggacagagtttgacagggagatagaccggggatccctcaaccctggaaaacagctgtttgagaagatggtcagtggcatgtacttgggagagctggttcgactgatcctagtcaagatggccaaggagggcctcttatttgaagggcggatcaccccggagctgctcacccgagggaagtttaacaccagtgatgtgtcagccatcgaaaagaataaggaaggcctccacaatgccaaagaaatcctgacccgcctgggagtggagccgtccgatgatgactgtgtctcagtccagcacgtttgcaccattgtctcatttcgctcagccaacttggtggctgccacactgggcgccatcttgaaccgcctgcgtgataacaagggcacacccaggctgcggaccacggttggtgtcgacggatctctttacaagacgcacccacagtattcccggcgtttccacaagactctaaggcgcttggtgccagactccgatgtgcgcttcctcctctcggagagtggcagcggcaagggggctgccatggtgacggcggtggcctaccgcttggccgagcagcaccggcagatagaggagaccctggctcatttccacctcaccaargacatgctgctggaggtgaagaagaggatgcgggccgagatggagctggggctgaggaagcagacgcacaacaatgccgtggttaagatgctgccctccttcgtccggagaactcccgacgggaccgagaatggtgacttctyggccctggatcttggaggaaccaatttccgtgtgctgctggtgaaaatccgtagtgggaaaaagagaacggtggaaatgcacaacaagatctacgccattcctattgaaatcatgcagggcactggggaagagctgtttgatcacattgtctcctgcatctctgacttcttggactacatggggatcaaaggccccaggatgcctctgggcttcacgttctcatttccctgccagcagacgagtctggacgcgggaatcttgatcacgtggacaaagggttttaaggcaacagactgcgtgggccacgatgtagtcaccttactaagggatgcgataaaaaggagagaggaatttgacctggacgtggtggctgtggtcaacgacacagtgggcaccatgatgacctgtgcttatgaggagcccacctgtgaggttggactcattgttgggasyggcagcaatgcctgctacatggaggagatgaagaacgtggagatggtggagggggaccaggggcagatgtgcatcaacatggagtggggggcctttggggacaacgggtgtctggatgatatcaggacacactacgacagactggtggacgaatattccctaaatgctgggaaacaaaggtatgagaagatgatcagtggtatgtacctgggtgaaatcgtccgcaacatcttaatcgacttcaccaagaagggattcctcttccgagggcagatctctgagacgmtgaagacccggggcatctttgagaccaagtttctctctcagatcgagagtgaccgattagcactgctccaggtccgggctatcctccagcagctaggtctgaatagcacctgcgatgacagtatcctcgtcaagacagtgtgcggggtggtgtccaggagggccgcacagctgtgtggcgcaggcatggctgcggttgtggataagatccgcgagaacagaggactggaccgtctgaatgtgactgtgggagtggacgggacactctacaagcttcatccacacttytccagaatcatgcaccagacggtgaaggaactgtcaccaaaatgtaacgtgtccttcctcctgtctgaggatggcagyggcaagggggccgccctcatcacggccgtgggcgtgcggttacgcacagaggcaagcagctaagagtcygggatccccagcctastgcctctccagcacttctctcttcaagcggcgaccccctaccctcccagcgagttgckctgggagacgctggcgccagggcctgccggcgcggggaggaaagcaaaatccaactaatggtatatattgtagggtacagaatagagcgtgtgctgttgataatatctctcacccggatccctcctcacttgccctgccactttgcatggtttgattttgacctggtcccccacgtgtgaagtgtagtggcatccatttctaatgtatgcattcatccaacagagttatttattggctggagatggaawatcacaccacctgacaggccttctgggcctccaaagcccatccttggggttccccctcccygtgtgaaatgtattatcaccagcagacactgccgggcctccctcccgggggcactgcctgaaggcgagtgtgggcatagcattagctgcttcctcccctcctggcacccactgtggcctggcatcgcatcgtggtgtgtcaatgccacaaaatcgtgtgtccgtggaaccagtcctagccgcgtgtgacagtcttgcattctgtttktctcgtggggggaggtggacagtcctgcggaaatgtgtcttgaaacaatgccatcactggaatttcccaccgctttgtgagccgtgtcgtatgacctagtaaactttgtaccaattca

SEQ ID NO: 1963 - DNA, 3649 bp, Homo sapiens
tggacagagcactggctgggcatcaggactaggctggagtcctggctcaaaactctaccacaacctgacactgggcaagatggcccacctgtggcatcccaggttcctgccctgtaaagaggagtctgggtgtatatccagatggactgtgagcacagcctgagtttgccctgtcgaggtgctgaggcctgggagattgggattgacaagtatctstatgccatgcggctctccgatgaaactctcatagatatcatgactcgcttcaggaaggagatgaagaatggcctctcccgggattttaatccaacagccacagtcaagatgttgccaacwttcgtaaggtccattcctgatggctctgaaaagggagatttcattgccctggatcttggtgggtcttcctttcgaattctgcgggtgcaagtgaatcatgagaaaaaccagaatgttcacatggagtccgaggtttatgacaccccagagaacatcgtgcacggcagtggaagccagctttttgatcatgttgctgagtgcctgggagatttcatggagaaaaggaagatcaaggacaagaagttacctgtgggattcacgttttcttttccttgccaacartccaaaatagatgaggccatcctgatcacctggacaaagcgatttaaagcgagcggagtggaaggagcagatgtggtcaaactgcttaacaaagccatcaaaaagcgaggggactatgatgccaacatcgtagctgtggtgaatgacacagtgggcaccatgatgacctgtggctatgacgaccagcactgtgaagtcggcctgatcatcggcactggcaccaatgcttgctacatggaggaactgaggcacattgatctggtggaaggagacgaggggaggatgtgtatcaatacagaatggggagcctttggagaygatggatcattagaagacatccggacagagtttgacagggagatagaccggggatccctcaaccctggaaaacagctgtttgagaagatggtcagtggcatgtacttgggagagctggttcgactgatcctagtcaagatggccaaggagggcctcttatttgaagggcggatcaccccggagctgctcacccgagggaagtttaacaccagtgatgtgtcagccatcgaaaagaataaggaaggcctccacaatgccaaagaaatcctgacccgcctgggagtggagccgtccgatgatgactgtgtctcagtccagcacgtttgcaccattgtctcatttcgctcagccaacttggtggctgccacactgggcgccatcttgaaccgcctgcgtgataacaagggcacacccaggctgcggaccacggttggtgtcgacggatctctttacaagacgcacccacagtattcccggcgtttccacaagactctaaggcgcttggtgccagactccgatgtgcgcttcctcctctcggagagtggcagcggcaagggggctgccatggtgacggcggtggcctaccgcttggccgagcagcaccggcagatagaggagaccctggctcatttccacctcaccaargacatgctgctggaggtgaagaagaggatgcgggccgagatggagctggggctgaggaagcagacgcacaacaatgccgtggttaagatgctgccctccttcgtccggagaactcccgacgggaccgagaatggtgacttctyggccctggatcttggaggaaccaatttccgtgtgctgctggtgaaaatccgtagtgggaaaaagagaacggtggaaatgcacaacaagatctacgccattcctattgaaatcatgcagggcactggggaagagctgtttgatcacattgtctcctgcatctctgacttcttggactacatggggatcaaaggccccaggatgcctctgggcttcacgttctcatttccctgccagcagacgagtctggacgcgggaatcttgatcacgtggacaaagggttttaaggcaacagactgcgtgggccacgatgtagtcaccttactaagggatgcgataaaaaggagagaggaatttgacctggacgtggtggctgtggtcaacgacacagtgggcaccatgatgacctgtgcttatgaggagcccacctgtgaggttggactcattgttgggasyggcagcaatgcctgctacatggaggagatgaagaacgtggagatggtggagggggaccaggggcagatgtgcatcaacatggagtggggggcctttggggacaacgggtgtctggatgatatcaggacacactacgacagactggtggacgaatattccctaaatgctgggaaacaaaggtatgagaagatgatcagtggtatgtacctgggtgaaatcgtccgcaacatcttaatcgacttcaccaagaagggattcctcttccgagggcagatctctgagacgmtgaagacccggggcatctttgagaccaagtttctctctcagatcgagagtgaccgattagcactgctccaggtccgggctatcctccagcagctaggtctgaatagcacctgcgatgacagtatcctcgtcaagacagtgtgcggggtggtgtccaggagggccgcacagctgtgtggcgcaggcatggctgcggttgtggataagatccgcgagaacagaggactggaccgtctgaatgtgactgtgggagtggacgggacactctacaagcttcatccacacttytccagaatcatgcaccagacggtgaaggaactgtcaccaaaatgtaacgtgtccttcctcctgtctgaggatggcagyggcaagggggccgccctcatcacggccgtgggcgtgcggttacgcacagaggcaagcagctaagagtcygggatccccagcctastgcctctccagcacttctctcttcaagcggcgaccccctaccctcccagcgagttgckctgggagacgctggcgccagggcctgccggcgcggggaggaaagcaaaatccaactaatggtatatattgtagggtacagaatagagcgtgtgctgttgataatatctctcacccggatccctcctcacttgccctgccactttgcatggtttgattttgacctggtcccccacgtgtgaagtgtagtggcatccatttctaatgtatgcattcatccaacagagttatttattggctggagatggaawatcacaccacctgacaggccttctgggcctccaaagcccatccttggggttccccctcccygtgtgaaatgtattatcaccagcagacactgccgggcctccctcccgggggcactgcctgaaggcgagtgtgggcatagcattagctgcttcctcccctcctggcacccactgtggcctggcatcgcatcgtggtgtgtcaatgccacaaaatcgtgtgtccgtggaaccagtcctagccgcgtgtgacagtcttgcattctgtttktctcgtggggggaggtggacagtcctgcggaaatgtgtcttgtctccatttggataaaaggaaccaaccaacaaacaatgccatcactggaatttcccaccgctttgtgagccgtgtcgtatgacctagtaaactttgtaccaattcaaagacccgagtg

SEQ ID NO: 1964 - DNA, 3847 bp, Homo sapiens
aaccagaactccagagagggaaaacatctatcttgctgtgtttggacaggccagcccctgaaacatcttgggcaatggagggttaacttctcaaagtttaataggcaagaccagcaaccatgcaacaaggacttcaactaaccaactaaagaactgttccccagagcattgttcctgagaaggaaaagagtccaaacacctacccacacctgctttgtgccaagaatccacagttggattgcaaggacagtgcgttcaaracccagctgttgagagtagaaaagcagaagaaaggacccgaggtcagcaagtgccctccccacaatggggcagatctgccagcgagaatcggctacagcagctgaaaaaccaaaacttcatctacttgctgaaagtgagattgacaagtatctstatgccatgcggctctccgatgaaactctcatagatatcatgactcgcttcaggaaggagatgaagaatggcctctcccgggattttaatccaacagccacagtcaagatgttgccaacwttcgtaaggtccattcctgatggctctgaaaagggagatttcattgccctggatcttggtgggtcttcctttcgaattctgcgggtgcaagtgaatcatgagaaaaaccagaatgttcacatggagtccgaggtttatgacaccccagagaacatcgtgcacggcagtggaagccagctttttgatcatgttgctgagtgcctgggagatttcatggagaaaaggaagatcaaggacaagaagttacctgtgggattcacgttttcttttccttgccaacartccaaaatagatgaggccatcctgatcacctggacaaagcgatttaaagcgagcggagtggaaggagcagatgtggtcaaactgcttaacaaagccatcaaaaagcgaggggactatgatgccaacatcgtagctgtggtgaatgacacagtgggcaccatgatgacctgtggctatgacgaccagcactgtgaagtcggcctgatcatcggcactggcaccaatgcttgctacatggaggaactgaggcacattgatctggtggaaggagacgaggggaggatgtgtatcaatacagaatggggagcctttggagaygatggatcattagaagacatccggacagagtttgacagggagatagaccggggatccctcaaccctggaaaacagctgtttgagaagatggtcagtggcatgtacttgggagagctggttcgactgatcctagtcaagatggccaaggagggcctcttatttgaagggcggatcaccccggagctgctcacccgagggaagtttaacaccagtgatgtgtcagccatcgaaaagaataaggaaggcctccacaatgccaaagaaatcctgacccgcctgggagtggagccgtccgatgatgactgtgtctcagtccagcacgtttgcaccattgtctcatttcgctcagccaacttggtggctgccacactgggcgccatcttgaaccgcctgcgtgataacaagggcacacccaggctgcggaccacggttggtgtcgacggatctctttacaagacgcacccacagtattcccggcgtttccacaagactctaaggcgcttggtgccagactccgatgtgcgcttcctcctctcggagagtggcagcggcaagggggctgccatggtgacggcggtggcctaccgcttggccgagcagcaccggcagatagaggagaccctggctcatttccacctcaccaargacatgctgctggaggtgaagaagaggatgcgggccgagatggagctggggctgaggaagcagacgcacaacaatgccgtggttaagatgctgccctccttcgtccggagaactcccgacgggaccgagaatggtgacttctyggccctggatcttggaggaaccaatttccgtgtgctgctggtgaaaatccgtagtgggaaaaagagaacggtggaaatgcacaacaagatctacgccattcctattgaaatcatgcagggcactggggaagagctgtttgatcacattgtctcctgcatctctgacttcttggactacatggggatcaaaggccccaggatgcctctgggcttcacgttctcatttccctgccagcagacgagtctggacgcgggaatcttgatcacgtggacaaagggttttaaggcaacagactgcgtgggccacgatgtagtcaccttactaagggatgcgataaaaaggagagaggaatttgacctggacgtggtggctgtggtcaacgacacagtgggcaccatgatgacctgtgcttatgaggagcccacctgtgaggttggactcattgttgggasyggcagcaatgcctgctacatggaggagatgaagaacgtggagatggtggagggggaccaggggcagatgtgcatcaacatggagtggggggcctttggggacaacgggtgtctggatgatatcaggacacactacgacagactggtggacgaatattccctaaatgctgggaaacaaaggtatgagaagatgatcagtggtatgtacctgggtgaaatcgtccgcaacatcttaatcgacttcaccaagaagggattcctcttccgagggcagatctctgagacgmtgaagacccggggcatctttgagaccaagtttctctctcagatcgagagtgaccgattagcactgctccaggtccgggctatcctccagcagctaggtctgaatagcacctgcgatgacagtatcctcgtcaagacagtgtgcggggtggtgtccaggagggccgcacagctgtgtggcgcaggcatggctgcggttgtggataagatccgcgagaacagaggactggaccgtctgaatgtgactgtgggagtggacgggacactctacaagcttcatccacacttytccagaatcatgcaccagacggtgaaggaactgtcaccaaaatgtaacgtgtccttcctcctgtctgaggatggcagyggcaagggggccgccctcatcacggccgtgggcgtgcggttacgcacagaggcaagcagctaagagtcygggatccccagcctastgcctctccagcacttctctcttcaagcggcgaccccctaccctcccagcgagttgckctgggagacgctggcgccagggcctgccggcgcggggaggaaagcaaaatccaactaatggtatatattgtagggtacagaatagagcgtgtgctgttgataatatctctcacccggatccctcctcacttgccctgccactttgcatggtttgattttgacctggtcccccacgtgtgaagtgtagtggcatccatttctaatgtatgcattcatccaacagagttatttattggctggagatggaawatcacaccacctgacaggccttctgggcctccaaagcccatccttggggttccccctcccygtgtgaaatgtattatcaccagcagacactgccgggcctccctcccgggggcactgcctgaaggcgagtgtgggcatagcattagctgcttcctcccctcctggcacccactgtggcctggcatcgcatcgtggtgtgtcaatgccacaaaatcgtgtgtccgtggaaccagtcctagccgcgtgtgacagtcttgcattctgtttktctcgtggggggaggtggacagtcctgcggaaatgtgtcttgtctccatttggataaaaggaaccaaccaacaaacaatgccatcactggaatttcccaccgctttgtgagccgtgtcgtatgacctagtaaactttgtaccaattcaaagacccgagtg

SEQ ID NO: 1965 - DNA, 1968 bp, Homo sapiens
gtactataggatacaaccagcgaaacagaattgatactctcatgtatctactagcatatccacaaaaacccatggttaagacaaaaaccattgaattgatagaatttgagaaactgccagctggacagaatgcaacagttgctgtgatgagctatagtggctatgatattgaagatgctcttgttttaaacaaggcctctttagacagaggctttgggcgttgccttgtatataaaaatgctaaatgtacgttgaaacgatacaccaatcagacttttgataaagtgatggggcccatgttggatgctgctacaaggaaacctatctggcgacatgaaatcttagatgcagatggtatttgttctccaggtgagaaagtrgaaaacaaacaagtgcttgtaaataagtccatgcccacagtgactcagattcctttggaaggaagtaatgtaccacagcaaccacagtacaaagatgtacccataacctacaaaggagcaacagactcatatattgaaaaagtgatgatatcttcaaatgctgaagatgcttttctgatcaaaatgctgctgagacagacaaggcgtccagaaattggagacaaattcagcagtcgtcatgggcaaaaaggtgtttgtggcttgatcgtcccccaggaagacatgccattttgtgattctggcatctgtccggacatcatcatgaacccacacggcttcccatcacgaatgacggtggggaagctcattgagctgctggctggcaaggccggtgtgctggacggcagattccactacggcactgcgtttggaggcagtaaagtgaaggatgtgtgtgaggacctcgttcgccatggttataactacttggggaaagactatgttacatccggcatcacaggtgagcccttagaagcatacatctattttggccccgtgtactatcagaagctgaaacacatggtgctagataaaatgcatgcccgggcccggggcccacgagccgtccttaccaggcaacccactgaaggacggtctcgtgatggtggcttgcgtctcggggaaatggaacgtgactgtttaatcggttatggagccagtatgcttttgctagagagactaatgatttcaagtgatgcctttgaggttgatgtctgtgggcagtgtggacttctggggtattctggctggtgccattactgcaagtcatcctgccacgtgtcttccctccgtattccgtatgcctgcaagctgctcttccaggaactacagtctatgaacatcatccccaggttaaaactgtccaagtacaaygaatgaggatggaaaaaatgattattaaagagaacaagtgatacatccaatgcaacggaaagcagaagggatttaggactacgtctcctcctgtgaagaattcccttgcgtattctctctctaaaacaaccaaaaaaaaatggagaggctttttatatactctaagactggctaaacaaccttgatcattgagcctcgagccatgggagagatgctgaccatgtggactgcaaggctgcttgattcacagatggatgtgacctaaaggataaataagctattacttatgtgctgatctcttgacattcactcattagaagaccttactccttcaagcaaatgtttggggtcaratttaccatatcttctggctaaccatattcaagattcttctgaaacttggaggatgtaaagaatccatttgatttggtcagcctggcttttgtcgtggtggctggctcggataaattttcccaacaattaaatcttgcctttacacacccaaactttgtaattttagtcttggtgaaatataatgaatttgttcctaccttgtcaagcaagaatgtcgtcttctcctatggactcaattgctattattttaaacctgcatgattgtaccatgcaatactattcgttaaatatctgaatctaa

SEQ ID NO: 1966 - DNA, 5094 bp, Homo sapiens
tcttctgccaatttattttttattaattctatttgttggtgattttttaaaatctgttcagaaaattaaaaattttccgtggaatcataaaatcgtgtttagattataaaatcctttatgatttgactgttgccgtcttgaaagtcttcaacatctcaatgttatgaatatctgcacttacattttcttctaagtttttgttaacatttcaatatttaatccacaaaagattcacttacatgtattttttccccaaatgggtaatcagctcttcaaacattatttactggacaggccatccttcccctactaacgtaaatgtcatcttttcatattaaatttctccatgcgctgggtatttactcctacatcttccatctagtgcttttgagaattttcaacactcttccattacacgcatgtaccatcatttatttaatcaatcttctattggtaggcatttgggacgtttcctgctcttccatactaaacaatgcatagaattttggactacattaaataattctctgcctcagtggttcaagttgcgtaaattatgcgtttacacttttcttcggattacttttaaaatgacaaccactatgttttgctggtctcaattaccagagaattggcaagaaacctgacagctggggcttaggattccctgcgccagacctccgagctacaccagagggcgtactttccttactcggcctcggccacatccgggttccaccgcagattcgggcagggagcgggcggaacctttctaccgcgtctctagctaacacgcacggcggggacagtttaggcctccgcgcaccgttcgccgggagtcttgcagtttgcttggtgcagggaaggcgggcgcggaggttctatctgtttcttcctccttcgtgagcagcatggacgtgctagcggaggagtttgggaacctgactccggagcagctggcggcgccgatcccgactgtagaggaaaaatggaggctgcttccagcatttttaaaggtgaaaggccttgtgaaacagcatatagattcatttaactatttcattaatgtagagataaagaagataatgaaagccaatgaaaaggttacaagtgacgctgaccctatgtggtacttaaaatatcttaatatctatgttgggcttcctgatgttgaagaaagcttcaatgtaactagaccagtgtcccctcatgagtgccgtttgagagacatgacatactctgcccctattacagtggatattgaatatacccgaggcagccagaggatcatccgcaatgccttacctatcggcagaatgcccataatgctacgtagttcaaactgtgttcttacaggaaaaacgccagcagaatttgccaaactgaacgaatgtcccttagatccaggtggctacttcattgttaaaggagtagaaaaagttattcttatccaagagcagctgtctaagaacaggatcatcgtggaggctgatagaaaaggggctgttggagcttcagttaccagaaccaatatggctgtgaaacaaggacgattttatttgaggcataatactttgtcagaagatatacccattgtcatcatatttaaggccatgggtgttgagagtgaccaggaaattgtgcagatgattggaacagaggagcacgtgatggctgcatttgggcccagtctggaagagtgccagaaagctcagattttcacacagatgcaggcattaaaatatatagggaacaaagtaagaaggcaaaggatgtggggaggtggaccaaagaaaaccaaaatagaagaagcaagagagctcctggcttccaccattctgacccatgtcccagttaaggarttcaatttccgagccaaatgtatctatactgcagtgatggtgcgaagagttattctggcccaaggagataataaagttgacgacagagattattatggtaacaagcgactggaattggcaggacagcttttatctcttctttttgaagacttgttcaaaaaatttaattctgaaatgaaaaagattgccgaccaggtgattcctaagcaaagagcagcccagtttgatgttgtcaaacacatgcgccaagaccagatcaccaatggcatggtgaatgctatttctaccggaaattggtctttaaagagatttaaaatggaccgccagggtgtaacccaagtgctgtctcgcttgtcatatatatccgcactgggcatgatgacaagaatctcttcccagtttgaaaaaacgagaaaagtgagtggtcctcgctccctccagccatctcagtggggaatgctgtgtccttcggacactcctgaaggagaggcatgtggtttggttaaaaacttggcccttatgacacacatcacaactgatatggaagatggacccattgttaaattagccagtaacttgggagtagaagatgtgaatttattatgtggggaagagctctcttacccaaatgtgtttcttgtctttcttaatggtgggtatattatagagacatgtgtcattcgagaccacaaaaagctagtgaatacatttcgactcatgagaagagcaggatatrtcaatgaatttgtttccatctcaacaaatcttacagatcgatgtgtctatatttcttctgatgggggaaggctatgcaggtatatatgcaggttactaaaaagagtttttaagaatctctttatatttgctcttgaaagaaatagacttgtttttatttttgaaactgttttaacctctttcattgtgaagataaatttaattckgaattttgaagatttcttacatgagagtctggttgaatatttagatgtgaatgaagaaaatgattgtaacattgcactgtacgaacacacaattaataagctggagtgcagtggcatgatctcagctcactgcaacctccgcctcccgggttcaagcaattctcctgcctcagcctcccaagtagctgcgactacagacaccacccacttggagattgaacccttcactcttctcggcgtgtgtgctggacttatcccataccctcaccataaccagtcaccgagaaacacttaycagtgtgccatggggaaacaagccatgggtactataggatacaaccagcgaaacagaattgatactctcatgtatctactagcatatccacaaaaacccatggttaagacaaaaaccattgaattgatagaatttgagaaactgccagctggacagaatgcaacagttgctgtgatgagctatagtggctatgatattgaagatgctcttgttttaaacaaggcctctttagacagaggctttgggcgttgccttgtatataaaaatgctaaatgtacgttgaaacgatacaccaatcagacttttgataaagtgatggggcccatgttggatgctgctacaaggaaacctatctggcgacatgaaatcttagatgcagatggtatttgttctccaggtgagaaagtrgaaaacaaacaagtgcttgtaaataagtccatgcccacagtgactcagattcctttggaaggaagtaatgtaccacagcaaccacagtacaaagatgtacccataacctacaaaggagcaacagactcatatattgaaaaagtgatgatatcttcaaatgctgaagatgcttttctgatcaaaatgctgctgagacagacaaggcgtccagaaattggagacaaattcagcagtcgtcatgggcaaaaaggtgtttgtggcttgatcgtcccccaggaagacatgccattttgtgattctggcatctgtccggacatcatcatgaacccacacggcttcccatcacgaatgacggtggggaagctcattgagctgctggctggcaaggccggtgtgctggacggcagattccactacggcactgcgtttggaggcagtaaagtgaaggatgtgtgtgaggacctcgttcgccatggttataactacttggggaaagactatgttacatccggcatcacaggtgagcccttagaagcatacatctattttggccccgtgtactatcagaagctgaaacacatggtgctagataaaatgcatgcccgggcccggggcccacgagccgtccttaccaggcaacccactgaaggacggtctcgtgatggtggcttgcgtctcggggaaatggaacgtgactgtttaatcggttatggagccagtatgcttttgctagagagactaatgatttcaagtgatgcctttgaggttgatgtctgtgggcagtgtggacttctggggtattctggctggtgccattactgcaagtcatcctgccacgtgtcttccctccgtattccgtatgcctgcaagctgctcttccaggaactacagtctatgaacatcatccccaggttaaaactgtccaagtacaaygaatgaggatggaaaaaatgattattaaagagaacaagtgatacatccaatgcaacggaaagcagaagggatttaggactacgtctcctcctgtgaagaattcccttgcgtattctctctctaaaacaaccaaaaaaaaatggagaggctttttatatactctaagactggctaaacaaccttgatcattgagcctcgagccatgggagagatgctgaccatgtggactgcaaggctgcttgattcacagatggatgtgacctaaaggataaataagctattacttatgtgctgatctcttgacattcactcattagaagaccttactccttcaagcaaatgtttggggtcaratttaccatatcttctggctaaccatattcaagattcttctgaaacttggaggatgtaaagaatccatttgatttggtcagcctggcttttgtcgtggtggctggctcggataaattttcccaacaattaaatcttgcctttacacacccaaactttgtaattttagtcttggtgaaatataatgaatttgttcctaccttgtcaagcaagaatgtcgtcttctcctatggactcaattgctattattttaaacctgcatgattgtaccatgcaatactattcgttaaatatctgaatctaa

SEQ ID NO: 1967 - DNA, 4880 bp, Homo sapiens
tcttctgccaatttattttttattaattctatttgttggtgattttttaaaatctgttcagaaaattaaaaattttccgtggaatcataaaatcgtgtttagattataaaatcctttatgatttgactgttgccgtcttgaaagtcttcaacatctcaatgttatgaatatctgcacttacattttcttctaagtttttgttaacatttcaatatttaatccacaaaagattcacttacatgtattttttccccaaatgggtaatcagctcttcaaacattatttactggacaggccatccttcccctactaacgtaaatgtcatcttttcatattaaatttctccatgcgctgggtatttactcctacatcttccatctagtgcttttgagaattttcaacactcttccattacacgcatgtaccatcatttatttaatcaatcttctattggtaggcatttgggacgtttcctgctcttccatactaaacaatgcatagaattttggactacattaaataattctctgcctcagtggttcaagttgcgtaaattatgcgtttacacttttcttcggattacttttaaaatgacaaccactatgttttgctggtctcaattaccagagaattggcaagaaacctgacagctggggcttaggattccctgcgccagacctccgagctacaccagagggcgtactttccttactcggcctcggccacatccgggttccaccgcagattcgggcagggagcgggcggaacctttctaccgcgtctctagctaacacgcacggcggggacagtttaggcctccgcgcaccgttcgccgggagtcttgcagtttgcttggtgcagggaaggcgggcgcggaggttctatctgtttcttcctccttcgtgagcagcatggacgtgctagcggaggagtttgggaacctgactccggagcagctggcggcgccgatcccgactgtagaggaaaaatggaggctgcttccagcatttttaaaggtgaaaggccttgtgaaacagcatatagattcatttaactatttcattaatgtagagataaagaagataatgaaagccaatgaaaaggttacaagtgacgctgaccctatgtggtacttaaaatatcttaatatctatgttgggcttcctgatgttgaagaaagcttcaatgtaactagaccagtgtcccctcatgagtgccgtttgagagacatgacatactctgcccctattacagtggatattgaatatacccgaggcagccagaggatcatccgcaatgccttacctatcggcagaatgcccataatgctacgtagttcaaactgtgttcttacaggaaaaacgccagcagaatttgccaaactgaacgaatgtcccttagatccaggtggctacttcattgttaaaggagtagaaaaagttattcttatccaagagcagctgtctaagaacaggatcatcgtggaggctgatagaaaaggggctgttggagcttcagttaccagctctacccatgagaaaaaaagcagaaccaatatggctgtgaaacaaggacgattttatttgaggcataatactttgtcagaagatatacccattgtcatcatatttaaggccatgggtgttgagagtgaccaggaaattgtgcagatgattggaacagaggagcacgtgatggctgcatttgggcccagtctggaagagtgccagaaagctcagattttcacacagatgcaggcattaaaatatatagggaacaaagtaagaaggcaaaggatgtggggaggtggaccaaagaaaaccaaaatagaagaagcaagagagctcctggcttccaccattctgacccatgtcccagttaaggarttcaatttccgagccaaatgtatctatactgcagtgatggtgcgaagagttattctggcccaaggagataataaagttgacgacagagattattatggtaacaagcgactggaattggcaggacagcttttatctcttctttttgaagacttgttcaaaaaatttaattctgaaatgaaaaagattgccgaccaggtgattcctaagcaaagagcagcccagtttgatgttgtcaaacacatgcgccaagaccagatcaccaatggcatggtgaatgctatttctaccggaaattggtctttaaagagatttaaaatggaccgccagggtgtaacccaagtgctgtctcgcttgtcatatatatccgcactgggcatgatgacaagaatctcttcccagtttgaaaaaacgagaaaagtgagtggtcctcgctccctccagccatctcagtggggaatgctgtgtccttcggacactcctgaaggagaggcatgtggtttggttaaaaacttggcccttatgacacacatcacaactgatatggaagatggacccattgttaaattagccagtaacttgggagtagaagatgtgaatttattatgtggggaagagctctcttacccaaatgtgtttcttgtctttcttaatggtaacatcttaggtgtcattcgagaccacaaaaagctagtgaatacatttcgactcatgagaagagcaggatatrtcaatgaatttgtttccatctcaacaaatcttacagatcgatgtgtctatatttcttctgatgggggaaggctatgcagaccctacataattgtcaagaaacagaagccagcagtcacaaataaacatatggaagagctggcccaagggtacaggaattttgaagatttcttacatgagagtctggttgaatatttagatgtgaatgaagaaaatgattgtaacattgcactgtacgaacacacaattaataaagacaccacccacttggagattgaacccttcactcttctcggcgtgtgtgctggacttatcccataccctcaccataaccagtcaccgagaaacacttaycagtgtgccatggggaaacaagccatgggtactataggatacaaccagcgaaacagaattgatactctcatgtatctactagcatatccacaaaaacccatggttaagacaaaaaccattgaattgatagaatttgagaaactgccagctggacagaatgcaacagttgctgtgatgagctatagtggctatgatattgaagatgctcttgttttaaacaaggcctctttagacagaggctttgggcgttgccttgtatataaaaatgctaaatgtacgttgaaacgatacaccaatcagacttttgataaagtgatggggcccatgttggatgctgctacaaggaaacctatctggcgacatgaaatcttagatgcagatggtatttgttctccaggtgagaaagtrgaaaacaaacaagtgcttgtaaataagtccatgcccacagtgactcagattcctttggaaggaagtaatgtaccacagcaaccacagtacaaagatgtacccataacctacaaaggagcaacagactcatatattgaaaaagtgatgatatcttcaaatgctgaagatgcttttctgatcaaaatgctgctgagacagacaaggcgtccagaaattggagacaaattcagcagtcgtcatgggcaaaaaggtgtttgtggcttgatcgtcccccaggaagacatgccattttgtgattctggcatctgtccggacatcatcatgaacccacacggcttcccatcacgaatgacggtggggaagctcattgagctgctggctggcaaggccggtgtgctggacggcagattccactacggcactgcgtttggaggcagtaaagtgaaggatgtgtgtgaggacctcgttcgccatggttataactacttggggaaagactatgttacatccggcatcacaggtgagcccttagaagcatacatctattttggccccgtgtactatcagaagctgaaacacatggtgctagataaaatgcatgcccgggcccggggcccacgagccgtccttaccaggcaacccactgaaggacggtctcgtgatggtggcttgcgtctcggggaaatggaacgtgactgtttaatcggttatggagccagtatgcttttgctagagagactaatgatttcaagtgatgcctttgaggttgatgtctgtgggcagtgtggacttctggggtattctggctggtgccattactgcaagtcatcctgccacgtgtcttccctccgtattccgtatgcctgcaagctgctcttccaggaactacagtctatgaacatcatccccaggttaaaactgtccaagtacaaygaatgaggatggaaaaaatgattattaaagagaacaagtgatacatccaatgcaacggaaagcagaagggatttaggactacgtctcctcctgtgaagaattcccttgcgtattctctctctaaaacaaccaaaaaaaaatggagaggctttttatatactctaagactggctaaacaaccttgatcattgagcctcgagccatgggagagatgctgaccatgtggactgcaaggctgcttgattcacagatggatgtgacctaaaggataaataagctattacttatgtgctgatctcttgacattcactcattagaagaccttactccttcaagcaaatgtttggggtcaratttaccatatcttctggctaaccatattcaagattcttctgaaacttggaggatgtaaagaatccatttgatttggtcagcctggcttttgtcgtggtggctggctcggataaattttcccaacaattaaatcttgctcctaccttgtcaagcaagaatgtcgtcttctcctatggactcaattgctattattttaaacctgcatgattgtaccatgca

SEQ ID NO: 1968 - DNA, 4222 bp, Homo sapiens
aggttcaagtggagctctcctaaccgacgcgcgtctgtggagaagcggcttggtcgggggtggtctcgtggggtcctgcctgtttagtcgctttcagggttcttgagccccttcacgaccgtcaccatggaagtgtcaccattgcagcctgtaaatgaaaatatgcaagtcaacaaaataaagaaaaatgaagatgctaagaaaagactgtctgttgaaagaatctatcaaaagaaaacacaattggaacatattttgctccgcccagacacctacattggttctgtggaattagtgacccagcaaatgtgggtttacgatgaagatgttggcattaactatagggaagtcacttttgttcctggtttgtacaaaatctttgatgagattctagttaatgctgcggacaacaaacaaagggacccaaaaatgtcttgtattagagtcacaattgatccggaaaacaatttaattagtatatggaataatggaaaaggtattcctgttgttgaacacaaagttgaaaagatgtatgtcccagctctcatatttggacagctcctaacttctagtaactatgatgatgatgaaaagaaagtgacaggtggtcgaaatggctatggagccaaattgtgtaacatattcagtaccaaatttactgtggaaacagccagtagagaatacaagaaaatgttcaaacaggcaaacatggatggataatatgggaagagctggtgagatggaactcaagcccttcaatggagaagattatacatgtatcacctttcagcctgatttgtctaagtttaaaatgcaaagcctggacaaagatattgttgcactaatggtcagaagagcrtatgatattgctggatccaccaaagatgtcaaagtctttcttaatggaaataaactgccagtaaaaggatttcgtagttatgtggacatgtatttgaaggacaagttggatgaaactggtaactccttgaaagtaatacatgaacaagtaaaccacaggtgggaagtgtgtttaactatgagtgaaaaaggctttcagcaaattagctttgtcaacagcattgctacatccaagggtggcagacatgttgattatgtagctgatcagattgtgactaaacttgttgatgttgtgaagaagaagaacaagggtggtgttgcagtaaaagcacatcaggtgaaaaatcacatgtggatttttgtaaatgccttaattgaaaacccaacctttgactctcagacaaaagaaaacatgactttacaacccaagagctttggatcracatgccaattgagtgaaaaatttatcaaagctgctcatttgtattctagatttctgatagatcccttcttccctaatatgatccctaatatgaatcttctcgttttcaggccattggctgtggtattgtagaaagcatactaaactgggtgaagtttaaggcccaagtccagttaaacaagaagtgttcagctgtaaaacataatagaatcaagggaattcccaaactcgatgatgccaatgatgcagggggccgaaactccactgagtgtacgcttatcctgactgagggagattcagccaaaactttggctgtttcaggccttggtgtggttgggagagacaaatatggggttttccctcttagaggaaaaatactcaatgttcgagaagcttctcataagcagatcatggaaaatgctgagattaacaatatcatcaagattgtgggtcttcagtacaagaaaaactatgaagatgaagattcattgaagacgcttcgttatgggaagataatgattatgacagatcaggaccaagatggttcccacatcaaaggcttgctgattaattttatccatcacaactggccctctcttctgcgacatcgttttctggaggaatttatcactcccattgtaaaggtatctaaaaacaagcaagaaatggcattttacagccttcctgaatttgaagagtggaagagttctactccaaatcataaaaaatggaaagtcaaatattacaaaggtttgggcaccagcacatcaaaggaagctaaagaatactttgcagatatgaaaagacatcgtatccagttcaaatattctggtcctgaagatgatgctgctatcagcctggcctttakcaaaaaacagatagatgatcgaaaggaatggttaactaatttcatggaggatagaagacaacgaaagttacttgggcttcctgaggattacttgtatggacaaactaccacatatctgacatataatgacttcatcaacaaggaacttatcttgttctcaaattctgataacgagagatctatcccttctatggtggatggtttgaaaccaggtcagagaaaggttttgtttacttgcttcaaacggaatgacaagcgagaagtaaaggttgcccaattagctggatcagtggctgaaatgtcttcttatcatcatggtgagatgtcactaatgatgaccattatcaatttggctcagaattttgtgggtagcaataatctaaacctcttgcagcccattggtcagtttggtaccaggctacatggtggcaaggattctgctagtccacgatacatctttacaatgctcagctctttggctcgattgttatttccaccaaaagatgatcacacgttgaagtttttatatgatgacaaccagcgtgttgagcctgaatggtacattcctattattcccatggtgctgataaatggtgctgaaggaatcggtactgggtggtcctgcaaaatccccaactttgatgtgcgtgaaattgtaaataacatcaggcgtttgatggatggagaagaacctttgccaatgcttccaagttacargaacttcaagggtactattgaagaactggctccaaatcaatatgtgattagtggtgaagtagctattcttaattctacaaccattgaaatctcagagcttcccgtcagaacatggacccagacatacaaagaacaagttctagaacccatgttgaatggcaccgagaagacacctcctctcataacagactatagggaataccatacagataccactgtgaaatttgttgtgaagatgactgaagaaaarctggcagaggcagagagagttggactacacaaagtcttcaaactccaaactagtctcacatgcaactctatggtgctttttgaccacgtaggctgtttaaagaaatatgacacggtgttggatattctaagagacttttttgaactcagacttaaatattatggattaagaaaagaatggctcctaggaatgcttggtgctgaatctgctaaactgaataatcaggctcgctttatcttagagaaaatagatggcaaaataatcattgaaaataagcctaagaaagaattaattaaagttctgattcagaggggatatgattcggatcctgtgaaggcctggaaagaagcccagcaaaaggytccagatgaagaagaaaatgaagagagtgacaacgaaaaggaaactgaaaagagtgactccgtaacagattctggaccaaccttcaactatcttcttgatatgcccctttggtatttaaccaaggaaaagaaagatgaactctgcaggctaagaaatgaaaaagaacaagagctggacacattaaaaagaaagagtccatcagatttgtggaaagaagacttggctacatttattgaagaattggaggctgttgaagccaaggaaaaacaagatgaacaagtcggacttcctgggaaagkggggaaggccaagggraaaaaaacacaaatggctgaagttttgccttctccgcgtggtcaaagagtcattccacgaataaccatagaaatgaaagcagaggcagaaaagaaaaataaaaagaaaattaagaatgaaaatactgaaggaagccctcaagaagatggtgtggaactagaaggcctaaaacaaagattagaaaagaaacagaaaagagaaccaggtacaaagacaaagaaacaaactacattggcatttaagccaatcaaaaaaggaaagaagagaaatccctggtctgattcagaatcagataggagcagtgacgaaagtaattttgatgtccctbcacgagaaacagagccacggagagcagcaacmaaattcacaatggatttggattcagatgaagatttctcagattttgatg

SEQ ID NO: 1969 - DNA, 5718 bp, Homo sapiens
  misc_feature (1)...(5718): n = A,T,C or G
aggttcaagtggagctctcctaaccgacgcgcgtctgtggagaagcggcttggtcgggggtggtctcgtggggtcctgcctgtttagtcgctttcagggttcttgagccccttcacgaccgtcaccatggaagtgtcaccattgcagcctgtaaatgaaaatatgcaagtcaacaaaataaagaaaaatgaagatgctaagaaaagactgtctgttgaaagaatctatcaaaagaaaacacaattggaacatattttgctccgcccagacacctacattggttctgtggaattagtgacccagcaaatgtgggtttacgatgaagatgttggcattaactatagggaagtcacttttgttcctggtttgtacaaaatctttgatgagattctagttaatgctgcggacaacaaacaaagggacccaaaaatgtcttgtattagagtcacaattgatccggaaaacaatttaattagtatatggaataatggaaaaggtattcctgttgttgaacacaaagttgaaaagatgtatgtcccagctctcatatttggacagctcctaacttctagtaactatgatgatgatgaaaagaaagtgacaggtggtcgaaatggctatggagccaaattgtgtaacatattcagtaccaaatttactgtggaaacagccagtagagaatacaagaaaatgttcaaacagacatggatggataatatgggaagagctggtgagatggaactcaagcccttcaatggagaagattatacatgtatcacctttcagcctgatttgtctaagtttaaaatgcaaagcctggacaaagatattgttgcactaatggtcagaagagcrtatgatattgctggatccaccaaagatgtcaaagtctttcttaatggaaataaactgccagtaaaaggatttcgtagttatgtggacatgtatttgaaggacaagttggatgaaactggtaactccttgaaagtaatacatgaacaagtaaaccacaggtgggaagtgtgtttaactatgagtgaaaaaggctttcagcaaattagctttgtcaacagcattgctacatccaagggtggcagacatgttgattatgtagctgatcagattgtgactaaacttgttgatgttgtgaagaagaagaacaagggtggtgttgcagtaaaagcacatcaggtgaaaaatcacatgtggatttttgtaaatgccttaattgaaaacccaacctttgactctcagacaaaagaaaacatgactttacaacccaagagctttggatcracatgccaattgagtgaaaaatttatcaaagctgccattggctgtggtattgtagaaagcatactaaactgggtgaagtttaaggcccaagtccagttaaacaagaagtgttcagctgtaaaacataatagaatcaagggaattcccaaactcgatgatgccaatgatgcagggggccgaaactccactgagtgtacgcttatcctgactgagggagattcagccaaaactttggctgtttcaggccttggtgtggttgggagagacaaatatggggttttccctcttagaggaaaaatactcaatgttcgagaagcttctcataagcagatcatggaaaatgctgagattaacaatatcatcaagattgtgggtcttcagtacaagaaaaactatgaagatgaagattcattgaagacgcttcgttatgggaagataatgattatgacagatcaggaccaagatggttcccacatcaaaggcttgctgattaattttatccatcacaactggccctctcttctgcgacatcgttttctggaggaatttatcactcccattgtaaaggtatctaaaaacaagcaagaaatggcattttacagccttcctgaatttgaagagtggaagagttctactccaaatcataaaaaatggaaagtcaaatattacaaaggtttgggcaccagcacatcaaaggaagctaaagaatactttgcagatatgaaaagacatcgtatccagttcaaatattctggtcctgaagatgatgctgctatcagcctggcctttakcaaaaaacagatagatgatcgaaaggaatggttaactaatttcatggaggatagaagacaacgaaagttacttgggcttcctgaggattacttgtatggacaaactaccacatatctgacatataatgacttcatcaacaaggaacttatcttgttctcaaattctgataacgagagatctatcccttctatggtggatggtttgaaaccaggtcagagaaaggttttgtttacttgcttcaaacggaatgacaagcgagaagtaaaggttgcccaattagctggatcagtggctgaaatgtcttcttatcatcatggtgagatgtcactaatgatgaccattatcaatttggctcagaattttgtgggtagcaataatctaaacctcttgcagcccattggtcagtttggtaccaggctacatggtggcaaggattctgctagtccacgatacatctttacaatgctcagctctttggctcgattgttatttccaccaaaagatgatcacacgttgaagtttttatatgatgacaaccagcgtgttgagcctgaatggtacattcctattattcccatggtgctgataaatggtgctgaaggaatcggtactgggtggtcctgcaaaatccccaactttgatgtgcgtgaaattgtaaataacatcaggcgtttgatggatggagaagaacctttgccaatgcttccaagttacargaacttcaagggtactattgaagaactggctccaaatcaatatgtgattagtggtgaagtagctattcttaattctacaaccattgaaatctcagagcttcccgtcagaacatggacccagacatacaaagaacaagttctagaacccatgttgaatggcaccgagaagacacctcctctcataacagactatagggaataccatacagataccactgtgaaatttgttgtgaagatgactgaagaaaarctggcagaggcagagagagttggactacacaaagtcttcaaactccaaactagtctcacatgcaactctatggtgctttttgaccacgtaggctgtttaaagaaatatgacacggtgttggatattctaagagacttttttgaactcagacttaaatattatggattaagaaaagaatggctcctaggaatgcttggtgctgaatctgctaaactgaataatcaggctcgctttatcttagagaaaatagatggcaaaataatcattgaaaataagcctaagaaagaattaattaaagttctgattcagaggggatatgattcggatcctgtgaaggcctggaaagaagcccagcaaaaggytccagatgaagaagaaaatgaagagagtgacaacgaaaaggaaactgaaaagagtgactccgtaacagattctggaccaaccttcaactatcttcttgatatgcccctttggtatttaaccaaggaaaagaaagatgaactctgcaggctaagaaatgaaaaagaacaagagctggacacattaaaaagaaagagtccatcagatttgtggaaagaagacttggctacatttattgaagaattggaggctgttgaagccaaggaaaaacaagatgaacaagtcggacttcctgggaaagkggggaaggccaagggraaaaaaacacaaatggctgaagttttgccttctccgcgtggtcaaagagtcattccacgaataaccatagaaatgaaagcagaggcagaaaagaaaaataaaaagaaaattaagaatgaaaatactgaaggaagccctcaagaagatggtgtggaactagaaggcctaaaacaaagattagaaaagaaacagaaaagagaaccaggtacaaagacaaagaaacaaactacattggcatttaagccaatcaaaaaaggaaagaagagaaatccctggtctgattcagaatcagataggagcagtgacgaaagtaattttgatgtccctbcacgagaaacagagccacggagagcagcaacaaaaacmaaattcacaatggatttggattcagatgaagatttctcagattttgatgaaaaaackgatgatgaagattttgtcccatcagatgctagtccacctaagaccaaaacttccccaaaacttagtaacaaagaactgaaaccacagaaaagtgtcgtgtcagaccttgaagctgatgatgttaaggrcagtgtaccactgtcttcaagccctcctgctacacatttcccagatgaaactgaaattacaaacccagttcctaaaaagaatgtgacagtgaagaagacagcagcaaaaagtcagtcttccacctccactaccggtgccaaaaaaagggctgccccaaaaggaactaaaagggatccagctttgaattctggtgtctctcaaaagcctgatcctgccaaaaccaagaatcgccgcaaaaggaagccatccacttbtgatgattctgactctaattttgagaaaattgtttcgaaagcagtcacaagcaagaaatccaagggggagagtgatgacttccatatggactttgactcagctgtggctcctcgggcaaaatctgtacggkcaaagaaacctataaagtacctggaagagtcagatgaagatgatctgttttaaaatgtgaggcgattattttaagtaattatcttaccaagcccaagactggttttaaagttacctgaagctcttaacttcctcccctctgaatttagtttggggaaggtgtttttagtacaagacatcaaagtgaagtaaagcccaagtgttctttagctttttataatactgtctaaatagtgaccatctcatgggcattgttttcttctctgctttgtctgtgttttgagtctgctttcttttgtctttaaaacctgatttttaagttcttctgaactgtagaaatagctatctgatcacttcagcgtaaagcagtgtgtttattaaccatccactaagctaaaactagagcagtttgatttaaaagtgtcactcttcctccttttctactttcagtagatatgagatagagcataattatctgttttatcttagttttatacataatttaccatcagatagaactttatggttctagtacagatactctactacactcagcctcttatgtgccaagtttttctttaagcaatgagaaattgctcatgttcttcatcttctcaaatcatcagaggccnaagaaaaacactttggctgtgtctataacttgacacagtcaatagaatgaagaaaattagagtagttatgtgattatttcagctcttgacctgtcccctctggctgcctctgagtctgaatctcccaaagagagaaaccaatttctaagaggactggattgcagaagactcggggacaacatttgatccaagatcttaaatgttatattgataaccatgctcagcaatgdgctattagattcattttgggaaatctccataatttcaatttgtaaactttgttaagacctgtctacattgttatatgtgtgtgacttgagtaatgttatcaacgtttttgtaaatatttactatgtttttctattagctaaattccaacaattttgtactttaataaaatgttctaaacattgcaacc

SEQ ID NO: 1970 - DNA, 8036 bp, Homo sapiens
  misc_feature (1)...(8036): n = A,T,C or G
atctaccaccttaaaaccctgatctagaaaaaatatatattcatgataggaagttataactaagaaaatttatttgcctcttaatgctcctgaatgaaagraattatccctttgttctttgggaggacttgtgtatctgagattgttgtaataatcagtcattttattaaaaccttgacatgatcaccagggaggaaaaatagagcaatagtcaaaacctgtgtgttagtccaagatgacttctgaagaaatgacagcttctgttctcatacctgtgactcagagaaaagtggtttctgcccagtcggctgcagatgaaagtagtgaaaaggtctcagacatcaatatttcaaaagcacatactgtcagacgaagtggggagacttctcataccatctcacaactgaacaaacttaaagaagaaccttctggaagcaacttgccaaagattctctcaatagcgagggagaaaatagtgagtgatgagaacagtaatgaaaaatgttgggagaaaatcatgccagattctgcgaaaaaccttaacattaactgcaacaacatattgagaaaccatcagcatggccttcctcagagacaattttatgaaatgtacaactctgttgctgaggaagacttgtgtttagaaactggaattccttctccactggaaagaaaggtgttccctggaattcaactggaactagacagaccttccatgggcattagtcctttaggaaatcagtcagtgatcatagagacaggcagagcacaccctgacagcagaagggcagtatttcattttcattatgaagttgacagaagaatgtcagacactttctgtaccctatcagaaaacttaattttagacgattgtggaaattgtgtaccactacctgggggtgaggagaagcaaaagaaaaactatgtggcatatacctgtaaactgatggaattggccaaaaattgtgataataagaatgagcagctgcagtgtgatcattgtgacaccttgaatgataaatacttttgctttgaaggctcttgygagaaggttgacatggtatattcaggtgatagcttttgtaggaaagactttactgacagtcaagctgccaagacctttttgagccattttgaggacttccctgataattgtgatgatgtagaagaagacgcttttaaaagcaaaaaggarcgatccactttgttagtcaggagattctgtaaaaatgacagagaagttaagaaatctgtgtatactggaacaagagcaattgtgagaactctgccttctggccacattgggctgactgcatggagttacatagatcagaagagaaatggtcccttactgccttgtgggagagtaatggaacccccgtcaacagtggagataaggcaagatgggagccaacgtctgtcagaagcccagtggtatcctatctacaatgcagtgagaagagaagaaacagaaaatacagttggatctctactccatttcctcaccaagctcccagcctccgagacagcccatggaaggataagcgttggtccatgcttaaagcaatgtgtccgagacactgtatgtgagtatcgcgccaccctccaaaggacttcaatatcgcagtacatcaccggtwctctcctagaagcaaccacgtctttgggagcaagaagtggccttctcagtacttttggaggatccactggacgaatgatgctgaaagaacgccagccaggcccctctgtggccaattccaatgccctcccttcaagttcagctgggatcagcaaggagctgatcgatctgcagcctctcatccagttcccagaggaagtcgccagcatcctgatggagcaagagcagactatttacckcagggtcttgccagtcgactacctttgcttcttaacacgggacttgggcactcctgaatgccagagctccttgccctgcctcaaagcatccatctcagcgtcgattcttaccactcagaatggagagcacaatgcccttgaagatctggtgatgaggtttaatgaggtgagctcctgggtgacatggctgatcctcacggcaggctccatggaggagaagcgagaagtcttttcatatttggtgcatgtggccaaatgctgctggaacatgggcaactacaacgctgtcatggagttcttggctggcctcaggtcaagaaaagttttaaaaatgtggcagttcatggaccagtctgatattgagaccatgaggagcctgaaggatgctatggcccagcatgagtcctcttgtgagtacagaaaggtggtgacacgtgccctgcacatccctggctgtaaggtggttccattctgtggggtgtttctgaaggagctctgtgaagtgcttgacggcgcctccggtctcatgaagctttgcccgcggtacaattcccaagaagaaactttagagtttgtagcagattacagtggacaagataatttcttacaacgagtgggacaaaatggcttaaagaattcggagaaggagtccactgtcaacagcatctttcaggtcatccggagctgcaatcgaagtctggagacagacgaggaggacagccccagtgaaggaaacagctccaggaaaagctccttgaaggataaaagccgatggcagtttataattggagatttgttggattcagacaatgacatctttgagcaatccaaagaatacgactctcatggttcagaggactcacagaaggccttcgaccatgggacggagctcatcccttggtacgtgctgtccatccaagccgatgtgcaccagttcctgctgcagggggccacggtcatccactacgaccaggacacacacctctctgcccgctgcttcctccagcttcagcccgacaatagcaccttgacctgggtaaagcccacaactgcctccccagccagcagtaaagcaaaacttggtgtacttaataacacagctgagcctggaaaattcccactactgggtaatgctggattaastagcctgacggaaggggtcttggatctttttgcagtgaaggctgtatacatgggccaccctggcattgatatacacactgtgtgtgttcagaacaaactgggtagcatgttcctgtcagagactggtgtgacattgctctatgggcttcagaccacagacaacagattattgcacttcgtggcaccaaagcacacagctaaaatgctcttcagcggattattggaactcactagagctgtgagaaagatgaggaaattccctgaccaaagacagcagtggctgcggaaacagtacgtcagcctttatcaggaggatggacggtatgaaggcccaactttggctcaygctgtggagttgtttggtggcagacggtggagtgctcgaaaccccagccccggaacatcagcaaagaatgctgagaagcccaatatgcagagaaacaataccctgggcataagcactaccaagaaaaagaagaaaatcctcatgagggktgagagtggagaggtaactgacgatgagatggcaacccgaaaggccaagatgcacaaagagtgtcgaagccggagtggttctgatcctcaagacattaatgaacaagaagaatcagaggtgaatgccatcgctaaccctccaaaccccctcccttccagaagagcccactctttgaccacagctgggtcccccaacttggctgccgggacgtcatctcccatcaggccagtgtcctcccctgtgctgtcttcttcaaacaagagcccatccagtgcttggagcagtagtagctggcacgggcggatcaaaggcggcatgaagggatttcagagcttcatggtttcagatagcaacatgagttttgttgaatttgttgagctgttcaaatcattcagtgtcaggagccgcaaggacctgaaggatctgtttgatgtctatgcagtgccctgcaaccgatctggctccgagtcagccccactctacaccaacctgacaattgatgaaaacaccagcgatcttcagcctgacctagatctgttgaccagaaatgtctcggatttggggttgttcattaagagtaaacagcagctatcggacaaccagaggcagatatctgatgccattgctgctgcaagcattgtgacaaatggcactgggattgagagcacatctctgggcatttttggggtgggcatacttcagctcaacgatttcctcgtgaattgccaaggagaacactgcacttatgatgaaatcctcagcatcatccagaagttcgagcctagcatcagtatgtgtcatcagggactaatgtcatttgaagggtttgccaggtttctgatggataaagaaaattttgcctcaaaaaatgatgagtcacaggagaacattaaagaactgcagctacccctctcatactattacatcgaatcttcgcacaatacctacctcacgggccatcagctcaaaggagaatcctcrgtagaactctacagccaggtccttttgcaaggctgtcgaagtgtagaattggactgctgggacggagacgatgggatgcccatcatttatcatggacatacgctgacaaccaagatccccttcaaggaagtggttgaagccattgatcgcagtgccttcatcaactctgacctgccaatcatcatatcgattgagaaccactgttcattgcctcagcaacgaaaaatggcagaaattttcaagactgtgtttggagaaaagctggtgactaaattcttatttgagactgatttctcagatgatccaatgcttccttcacctgaccaactcagaaagaaagttcttcttaaaaacaagaagctaaaagcccatcagacgccagtggatatcttaaagcaaaaggctcatcagttagcatctatgcaagtgcaggcttataatggtgggaatgccaacccccsacctgccartaatgaggaagaggaagatgaggaggacgaatatgattatgactatgaatccctttctgatgacaacattctggaagacagacctgaaaataaatcatgtaatgacaagcttcagtttgaatataatgaagaaatcccaaagaggataaagaaagcagataactctgcttgcaacaaaggaaaggtttatgatatggaactgggagaagaattttatcttgatcagaataaaaaggaaagcagacagattgcaccagagctttctgaccttgtaatctattgtcaagcagtaaaatttccaggactgtcaactctaaatgcatctggctctagcagaggaaaagaaaggaaaagcaggaagtccatttttggcaacaatccgggcagaatgagcccaggggagacagcatcatttaacaaaacatctggaaaaagttcctgtgaaggcattcgacagacctgggaggaatcttcttcccctctcaacccaaccacgtccctcagtgctatcattagaactcccaaatgttatcatatctcgtcgctgaatgaaaatgccgccaaacgtctgtgtcgcaggtattctcagaaactgayccagcacaccgcctgtcagctgctgagaacttaccctgctgccacccgcatcgactcttccaacccgaaccccctcatgttctggctccatgggatacagcttgtggcactcaactaccagactgatgatctccctttacatttaaatgctgcaatgtttgaggcaaatggtggttgtggttatgtattgaaacctccagttctgtgggacaagaactgccccatgtatcagaagttttctccactagaaagagatctggacagcatggatcctgcagtctattctttaactattgtctctggtcagaatgtgtgccccagtaatagcatgggaagccygtgcattgaagtcgacgtcctgggcatgcctctggacagctgccatttccgcacaaagcccatccatcgaaacaccctgaaccccatgtggaacgagcagtttctgttccncgttcacttcgaagatcttgtatttcttcgttttgcagttgtggaaaacaatagttcagcggtaactgctcagagaatcattccactgaaagctttaaaacgaggatatcgacatcttcagctgcgaaaccttcacaatgaagtcttggagatttctagtttattcattaacagcagaaggatggaagaaaattcctctggcaataccatgtcagcctcttcgatgtttaatacagaagaaagaaaatgtttgcagactcacagagtcacggtgcatggggtcccagggccagagccctttaccgttttcactattaatggaggcaccaaggcaaagcagcttctgcagcaaattctgacaaatgaacaagacatcaaacctgttaccacagactattttttgatggaagaaaaatattttatatctaaagaaaagaatgaatgtaggaaacaaccattccagagagccattggtccagaagaggagatcatgcaaattttaagcagctggtttccagaagagggatacatgggcaggattgtsttaaaaacccagcaggaaaacctagaagagaaaaacattgttcaagatgacaaagaggtgatcttgagctcagaggaggagagtttctttgtccaagtgcatgatgtttctccagagcaacctcgaacagtcatcaaagcaccccgcgtcagcactgcacaggatgtcattcagcagaccttatgcaaagccaaatattcctacagcatcctgagcaaccccaatccaagcgactatgtgcttttggaagaggtggtgaaagacactaccaacaagaagactaccacaccaaagtcctctcagcgggtccttctggatcaggagtgtgtgtttcaagcccaaagcaagtggaaaggtgcaggaaaattcatccttaagctaaaggagcaggtgcaggcatctcgagaagataaaaagaaaggcatttctttcgcaagtgaactcaagaagctcaccaagtcaactaaacagccccgaggacttacatcaccttctcagctcttgacctcagaaagtatccaaaccaaggaggagaaacctgtgggtggcttgtcctccagtgacacaatggattaccgacagtgactaasggcagcatgtttaacccaggtgaagatctttaagcaagaagttaaagagtgaacatggtggaaaaaatataattattttcatcagacttaaactggaaattgatgatttctgaactgaagccttcacacatgtgagatccatgctgaggagaagcaaaatggcacagggctagttgccaccaaccaatttactgatgaatgaagcccaggggactgccattttataaatgtcagcagttggaaaaatcgtcacgaattgacttagagcaagggtcagcaagcttgtctgtaaagggccaaacagtaaatattttagggctgggggccataaaatatgttgcaaccacccaattctgccattgtagtgcaaaagcagccatagacaacacatacatgaacgaacgtggctgtattccaataaaactttatttatggacactgaaattggaatttcatatatttttcacatgtcacaaatactcttgttttgactttttttcaaccatttaaaaacttaaaaactattcttaattcaggggccatacaaaaacaggtggcaggctagatttggcccaaggaccttaatttgccaacacaactaagagaagagaactgggaacaaggagcacaaagatctgaaaacaggaaaggaagtttagccatacattttatggccgagaattagaagcttagaattagaagctttggggcatttcaagtgtaaatatgtcctataacataagagtcattaaaattcaatttagttcctgtattgtgtaccacagtgcactcctctttaggatttttttacatatagaaataatattgggttttttttaaggttattgcctattcagttaatagggttgctttaaaaaaggttattg

SEQ ID NO: 1971 - DNA, 6877 bp, Homo sapiens
  misc_feature (1)...(6877): n = A,T,C or G
atggtttcagaaggaagtgcagcaggaagagactttgcaggaatggaagaggtgaggcagctccacgtgagattctgcaaagggattaagatttggcaccaggcttggtttctgtgcagcctcttaggcagagagccccaggagagggaagcaggctgtcagctgtggctttgcacgctctcagctgtcttgaaggttggttggctcttcccgctctctgaggtacccaattttaccttgttaaaggatggatgtggatgctggaggcttaaagaagaccagatctacaatgcagtgagaagagaagaaacagaaaatacagttggatctctactccatttcctcaccaagctcccagcctccgagacagcccatggaaggataagcgttggtccatgcttaaagcaatgtgtccgagacactgtatgtgagtatcgcgccaccctccaaaggacttcaatatcgcagtacatcaccggtwctctcctagaagcaaccacgtctttgggagcaagaagtggccttctcagtacttttggaggatccactggacgaatgatgctgaaagaacgccagccaggcccctctgtggccaattccaatgccctcccttcaagttcagctgggatcagcaaggagctgatcgatctgcagcctctcatccagttcccagaggaagtcgccagcatcctgatggagcaagagcagactatttacckcagggtcttgccagtcgactacctttgcttcttaacacgggacttgggcactcctgaatgccagagctccttgccctgcctcaaagcatccatctcagcgtcgattcttaccactcagaatggagagcacaatgcccttgaagatctggtgatgaggtttaatgaggtgagctcctgggtgacatggctgatcctcacggcaggctccatggaggagaagcgagaagtcttttcatatttggtgcatgtggccaaatgctgctggaacatgggcaactacaacgctgtcatggagttcttggctggcctcaggtcaagaaaagttttaaaaatgtggcagttcatggaccagtctgatattgagaccatgaggagcctgaaggatgctatggcccagcatgagtcctcttgtgagtacagaaaggtggtgacacgtgccctgcacatccctggctgtaaggtggttccattctgtggggtgtttctgaaggagctctgtgaagtgcttgacggcgcctccggtctcatgaagctttgcccgcggtacaattcccaagaagaaactttagagtttgtagcagattacagtggacaagataatttcttacaacgagtgggacaaaatggcttaaagaattcggagaaggagtccactgtcaacagcatctttcaggtcatccggagctgcaatcgaagtctggagacagacgaggaggacagccccagtgaaggaaacagctccaggaaaagctccttgaaggataaaagccgatggcagtttataattggagatttgttggattcagacaatgacatctttgagcaatccaaagaatacgactctcatggttcagaggactcacagaaggccttcgaccatgggacggagctcatcccttggtacgtgctgtccatccaagccgatgtgcaccagttcctgctgcagggggccacggtcatccactacgaccaggacacacacctctctgcccgctgcttcctccagcttcagcccgacaatagcaccttgacctgggtaaagcccacaactgcctccccagccagcagtaaagcaaaacttggtgtacttaataacacagctgagcctggaaaattcccactactgggtaatgctggattaastagcctgacggaaggggtcttggatctttttgcagtgaaggctgtatacatgggccaccctggcattgatatacacactgtgtgtgttcagaacaaactgggtagcatgttcctgtcagagactggtgtgacattgctctatgggcttcagaccacagacaacagattattgcacttcgtggcaccaaagcacacagctaaaatgctcttcagcggattattggaactcactagagctgtgagaaagatgaggaaattccctgaccaaagacagcagtggctgcggaaacagtacgtcagcctttatcaggaggatggacggtatgaaggcccaactttggctcaygctgtggagttgtttggtggcagacggtggagtgctcgaaaccccagccccggaacatcagcaaagaatgctgagaagcccaatatgcagagaaacaataccctgggcataagcactaccaagaaaaagaagaaaatcctcatgagggktgagagtggagaggtaactgacgatgagatggcaacccgaaaggccaagatgcacaaagagtgtcgaagccggagtggttctgatcctcaagacattaatgaacaagaagaatcagaggtgaatgccatcgctaaccctccaaaccccctcccttccagaagagcccactctttgaccacagctgggtcccccaacttggctgccgggacgtcatctcccatcaggccagtgtcctcccctgtgctgtcttcttcaaacaagagcccatccagtgcttggagcagtagtagctggcacgggcggatcaaaggcggcatgaagggatttcagagcttcatggtttcagatagcaacatgagttttgttgaatttgttgagctgttcaaatcattcagtgtcaggagccgcaaggacctgaaggatctgtttgatgtctatgcagtgccctgcaaccgatctggctccgagtcagccccactctacaccaacctgacaattgatgaaaacaccagcgatcttcagcctgacctagatctgttgaccagaaatgtctcggatttggggttgttcattaagagtaaacagcagctatcggacaaccagaggcagatatctgatgccattgctgctgcaagcattgtgacaaatggcactgggattgagagcacatctctgggcatttttggggtgggcatacttcagctcaacgatttcctcgtgaattgccaaggagaacactgcacttatgatgaaatcctcagcatcatccagaagttcgagcctagcatcagtatgtgtcatcagggactaatgtcatttgaagggtttgccaggtttctgatggataaagaaaattttgcctcaaaaaatgatgagtcacaggagaacattaaagaactgcagctacccctctcatactattacatcgaatcttcgcacaatacctacctcacgggccatcagctcaaaggagaatcctcrgtagaactctacagccaggtccttttgcaaggctgtcgaagtgtagaattggactgctgggacggagacgatgggatgcccatcatttatcatggacatacgctgacaaccaagatccccttcaaggaagtggttgaagccattgatcgcagtgccttcatcaactctgacctgccaatcatcatatcgattgagaaccactgttcattgcctcagcaacgaaaaatggcagaaattttcaagactgtgtttggagaaaagctggtgactaaattcttatttgagactgatttctcagatgatccaatgcttccttcacctgaccaactcagaaagaaagttcttcttaaaaacaagaagctaaaagcccatcagacgccagtggatatcttaaagcaaaaggctcatcagttagcatctatgcaagtgcaggcttataatggtgggaatgccaacccccsacctgccartaatgaggaagaggaagatgaggaggacgaatatgattatgactatgaatccctttctgatgacaacattctggaagacagacctgaaaataaatcatgtaatgacaagcttcagtttgaatataatgaagaaatcccaaagaggataaagaaagcagataactctgcttgcaacaaaggaaaggtttatgatatggaactgggagaagaattttatcttgatcagaataaaaaggaaagcagacagattgcaccagagctttctgaccttgtaatctattgtcaagcagtaaaatttccaggactgtcaactctaaatgcatctggctctagcagaggaaaagaaaggaaaagcaggaagtccatttttggcaacaatccgggcagaatgagcccaggggagacagcatcatttaacaaaacatctggaaaaagttcctgtgaaggcattcgacagacctgggaggaatcttcttcccctctcaacccaaccacgtccctcagtgctatcattagaactcccaaatgttatcatatctcgtcgctgaatgaaaatgccgccaaacgtctgtgtcgcaggtattctcagaaactgayccagcacaccgcctgtcagctgctgagaacttaccctgctgccacccgcatcgactcttccaacccgaaccccctcatgttctggctccatgggatacagcttgtggcactcaactaccagactgatgatctccctttacatttaaatgctgcaatgtttgaggcaaatggtggttgtggttatgtattgaaacctccagttctgtgggacaagaactgccccatgtatcagaagttttctccactagaaagagatctggacagcatggatcctgcagtctattctttaactattgtctctggtcagaatgtgtgccccagtaatagcatgggaagccygtgcattgaagtcgacgtcctgggcatgcctctggacagctgccatttccgcacaaagcccatccatcgaaacaccctgaaccccatgtggaacgagcagtttctgttccncgttcacttcgaagatcttgtatttcttcgttttgcagttgtggaaaacaatagttcagcggtaactgctcagagaatcattccactgaaagctttaaaacgaggatatcgacatcttcagctgcgaaaccttcacaatgaagtcttggagatttctagtttattcattaacagcagaaggatggaagaaaattcctctggcaataccatgtcagcctcttcgatgtttaatacagaagaaagaaaatgtttgcagactcacagagtcacggtgcatggggtcccagggccagagccctttaccgttttcactattaatggaggcaccaaggcaaagcagcttctgcagcaaattctgacaaatgaacaagacatcaaacctgttaccacagactattttttgatggaagaaaaatattttatatctaaagaaaagaatgaatgtaggaaacaaccattccagagagccattggtccagaagaggagatcatgcaaattttaagcagctggtttccagaagagggatacatgggcaggattgtsttaaaaacccagcaggaaaacctagaagagaaaaacattgttcaagatgacaaagaggtgatcttgagctcagaggaggagagtttctttgtccaagtgcatgatgtttctccagagcaacctcgaacagtcatcaaagcaccccgcgtcagcactgcacaggatgtcattcagcagaccttatgcaaagccaaatattcctacagcatcctgagcaaccccaatccaagcgactatgtgcttttggaagaggtggtgaaagacactaccaacaagaagactaccacaccaaagtcctctcagcgggtccttctggatcaggagtgtgtgtttcaagcccaaagcaagtggaaaggtgcaggaaaattcatccttaagctaaaggagcaggtgcaggcatctcgagaagataaaaagaaaggcatttctttcgcaagtgaactcaagaagctcaccaagtcaactaaacagccccgaggacttacatcaccttctcagctcttgacctcagaaagtatccaaaccaaggaggagaaacctgtgggtggcttgtcctccagtgacacaatggattaccgacagtgactaasggcagcatgtttaacccaggtgaagatctttaagcaagaagttaaagagtgaacatggtggaaaaaatataattattttcatcagacttaaactggaaattgatgatttctgaactgaagccttcacacatgtgagatccatgctgaggagaagcaaaatggcacagggctagttgccaccaaccaatttactgatgaatgaagcccaggggactgccattttataaatgtcagcagttggaaaaatcgtcacgaattgacttagagcaagggtcagcaagcttgtctgtaaagggccaaacagtaaatattttagggctgggggccataaaatatgttgcaaccacccaattctgccattgtagtgcaaaagcagccatagacaacacatacatgaacgaacgtggctgtattccaataaaactttatttatggacactgaaattggaatttcatatatttttcacatgtcacaaatactcttgttttgactttttttcaaccatttaaaaacttaaaaactattcttaattcaggggccatacaaaaacaggtggcaggctagatttggcccaaggaccttaatttgccaacacaactaagagaagagaactgggaacaaggagcacaaagatctgaaaacaggaaaggaagtttagccatacattttatggccgagaattagaagcttagaattagaagctttggggcatttcaagtgtaaatatgtcctataacataagagtcattaaaattcaatttagttcctgtattgtgtaccacagtgcactcctctttaggatttttttacatatagaaataatattgggttttttttaaggttattgcctattcagttaatagggttgctttaaaaaaggttattg

SEQ ID NO: 1972 - DNA, 2162 bp, Homo sapiens
cgacagagcaagactacgtctcaaacaaagaaacaagttaaccctgtcaacatctcgactttaaatgcaaagcactgcacatgcacacgctgaacacctccccttccttctccaggggcaacacaagcacaaccgccgcacatttacgaatctacacaactgcgcatcggagcgaatgaggtcagggcccagaaaggtggggcaggaacgatcccagccttcagctaattctgtcacctctaacgtctggggcaagaacgtttcaggaaaccaagggggaccgaggctcagcgccgaagagaaagacgccaactgcgggacctgtcgcgcctcccgcgccggggtggagctgaccccgccgagtcccgcccctgcctgagttcgccagtggtccaggagccgcttttttccactcgggaagacttcagagaagtctcacaaaggactcggctggctgcttttctcagtgccgaagccgcgccatgctcgttctcagaagcggcctgaccaaggcgcttgcctcacggacgctcgcgcctcaggtgtgttcatcttttgctacgggccctagacaatacgatggaacgttctwtgaatttygtacttattaccttaaaccttcaaatatgaatgcgttcatggaaaatcttaagaaaaacattcatcttcggacctcttactctgaattggttggattctggagtgtagaatttggaggcagaacgaataaagtgtttcatatttggaagtatgataattttsctcatcgagctgaagttcggaaagccttagccaactgtaaggaatggcaagaacaatctatcattccaaatttggctcgcattgataaacaagagacggaaattacttacctgataccatggtccaaattagaaaagcctccaaaagaaggagtctatgaactagctgtttttcagatgraacctggtgggccagstctgtggggtgatgcatttgaaagagcaattaatgcccatgtcaatttaggctacacaaaagtagttggtgttttccacacagaatatggaraactcaacagagttcatgttctttggtggaatgagagtgcagatagtcgtgcagctgggagacataagtcccatgaggatcccagagttgtggcggctgttcgggaragtgtcaactacctagtttctcagcagaatatgcttctgattcctgcatcattttcaccattgaaatagttttctactgaaatacaaaacatttcattaactgctctaagatgtgtctgctaatggtgcttaaattctcccaagaggttctcgcttttatttgaaggaggtggtaagttaattagttaatttgctgtgcttcttgcatttttgaaagttacatattctccactgctttaagaaataattcagttcactttcaccttggcatttcagtatctgttacacattagaagtagttgtcactatttcatcatcttggtttttcatttgttttagaatacctcttctgtattttgataactcattgctttatagcattttcttttactcaaataaggattttacatttccttgcctgacagtatttttgaattatttatataaaatatctatcttttcatcatgtctatagttcctgagattttaaaaaaatttgcttagtaaaggttattttgtgatataaaatgggatttataaaaatattagattgtttatttctttactgtggaaaagtasaatgtcatctgtattaattattgcttttacattcattgattattagtcattctaacttggaaaataatgcaattgggtcacagtgttaaaaatctagaaaagacttgttggtttatatgctgaaattgttcatttataattaattttactaatttctmcttagtttggatcactaacagagatcttgggacatttatttgttttaaagaaatatttatggttatggaaacgcttgccctaataaaaatcctgcatattcattgtttttttaaattcacattttatacttatatgatctctaaagctcttgctatgttgctataagacagtaatatagtgataatttaccaactttattgaaaatgttgttacatcaataaaatagcatgctgggaacctgagaaggaaggtttctttagtactgcc

SEQ ID NO: 1973 - DNA, 4243 bp, Homo sapiens
ggcccgcagcggcggcggcggctacagcagctccgccggcagccgcgggagcacggcgacgccagcggcgggaagggaaaaggccgaggcatcagcgtgtgaagaccgcaaagacgatcccgagtacagttgtgaacagcattgctgctaggctcctcctgcagatcatctgaaatgaacctctcttattgatttttattggcctagagccaggagtactgcattcagttgactttcagggtaaaaagaaaacagtcctggttgttgtcatcataaacatatggaccagtgtgatggtgaaatgagatgaggctccgcaatggaactgtagccactgctttagcatttatcacttccttccttactttgtcttggtatactacatggcaaaatgggaaagaaaaactgattgcttatcaacgagaattccttgctttgaaagaacgtcttcgaatagctgaacacagaatctcacagcgctcttctgaattaaatacgattgtgcaacagttcaagcgtgtaggagcagaaacaaatggaagtaaggatgcgttgaataagttttcagataataccctaaagctgttaaaggagttaacaagcaaaaaatctcttcaagtgccaagtatttattatcatttgcctcatttattgaaaaatgaaggaagtcttcaacctgctgtacagattggcaacggaagaacaggagtttcaatagtcatgggcattcccacagtgaagagagaagttaaatcttacctcatagaaactcttcattcccttattgataacctgtatcctgaagagaagttggactgtgttatagtagtcttcataggagagacagatattgattatgtacatggtgttgtagccaacctggagaaagaattttctaaagaaatcagttctggcttggtggaagtcatatcaccccctgaaagctattatcctgacttgacaaacctaaaggagacatttggagactccaaagaaagagtaagatggagaacaaagcaaaacctagattactgttttctaatgatgtatgctcaagaaaagggcatatattacattcagcttgaagatgatattattgtcaaacaaaattattttaataccataaaaaattttgcacttcaactttcttctgaggaatggatgattctagagttttcccagctgggcttcattggtaaaatgtttcaagcgccggatcttactctgattgtagaattcatattcatgttttacaaggagaaacccattgattggctcctggaccatattctctgggtgaaagtctgcaaccctgaaaaagatgcaaaacattgtgatagacagaaagcaaatctgcgaattcgcttcagaccttcccttttccaacatgttggtctgcactcatcactatcaggaaaaatccaaaaactcacggataaagattatatgaaaccattacttcttaaaatccatgtaaacccacctgcggaggtatctacttccttgaaggtctaccaagggcatacgctggagaaaacttacatgggagaggatttcttctgggctatcacaccgatagctggagactacatcttgtttaaatttgataaaccagtcaatgtagaaagttatttgttccatagcggcaaccaagaacatcctggagatatwctgctaaacacaactgtggaagttttgccttttaagagtgaaggtttggaaataagcaaagaaaccaaagacaaacgattagaagatggctatttcagaataggaaaatttgagaatggtgttgcagaaggaatggtggatccaagtctcaatcccatttcagcctttcgactttcagttattcagaattctgctgtttgggccattcttaatgagcagagagttttctcgggctggtggcagaagtcaagagacaaagcagaaggacctcaggcaccattgctgttttaaggtagagggggctgcatgagaaggaatgcacatggctttgaggagctgagagaggccttggctaacagcaaaggagctgggaactgcagtcctacagccacrggaactgaattcagcccataagctcattcataggcttggaaaggcattcatctccagtctccagataagacccagcctggccaacactttgaatccagccttgtgagaccctaagccgagaactcacttaagcctgcttggacttctgacctacagaactatgagataataaatcagtggtgttttaagctgctaaatttgtggcaatttgttatgtaggaataggaaatgaatacagtattttaaaagaggtaaagaggaaatcttcatacttgattccctgtagtatgctggatatttcttggtaaatgcatgaataaagtctttagtagcaagtcatgtacctggacctygttggggatgttctcgccagagatctcaattagtcttcattggacgtttgttggcaaagttgcagcatcttactgagtagcgtttggtaaaggaactgctagaatgagactataggaataggactgaaacagtgtgtaagggatcttttttatttctagaagaggtgttactttatactgatttagactgctctgagcctgtcagaagtaaattcaagaatgattaacagtggtattttagatacattaagagcaaaaataacctttgccttgtagagatcagataatctgtgtatcgagggatttaattttttttaaccaaaacttagtttctctttttatcatctagcacagatcaaatcctgtatgggccagccaaatgtttgtagtttgagaatgttttgcaaatacctctctgcttccaagccattaatagctaatgaagttttattttggtttgtccattaatttttctgcttatttttactgtattgccatgtccttgatacgagacaagtagaactaaaagagagaaaatgagaggttaagactgtcagaagatgagaaatgtgagtcataaccataccttagtgttttaagggaactttatccagtccaatccctttatagaaaaggaacttttccaagttatgttgcagtatttatagtgtgtaaaattttgtttgactttggtagttgtgcattttraattatgaatcttatatgctacgataactagtatgcttactttctttaatgcatgtgatcatacaatgctaaaaaggtattttttaaagacccaaccaaactgaggattttgttatacatatctgtatcaacacctatatataaactcttcttcttacctgaaacactccttcacccggtttgggcactaactagatcattttcaaaggaacaaacaggaaggagcaagctggcactccagggtgcatctgagctgagaatttagaagacctcattcaagaaagtaaactgagcattgatgggaaagcactttgcgcgaagtaacattcccactgttaatgttgcagtcaaaattgtggaaaaaaaaaagtggtgctaaaattgttctgaaatgaagattgtttgttgtggggaatattttaatactcttggactttagggaggctattttatgtgtcacttgctcctagttgtttcattgtattagtaattagcaaactgtcctggaaccaagggtttggtacttttgcctgattagcattccattatttatttgaaatgctcagtgtttgctcaaatttggtgaaaatatcttttgaagacatattctctgagccttaaaaatggctgctatcgacagtactgtaagatgcactgccagtagatttgatacttttcatttcagtgtaggcagtaatgttttctaagaaagatttagaaatcagcaaagtgtaacaattgtgtttcatttatggaatggaaaaactgaagtgtcccattcagaacactttggaaaggttgtctgcattaggggatgtttctggaagcatcccttagagaagctgcctgaggaatctccttgccaggttgtaccagatttttttttttcttaaatgtattgtatatattttccttaaaatgtcttcattggctgaatgattcctatccgtagtaatattttaggtacttgttggatttttaaaggaagattatttattttcagatttgctgctataattgaaaacctagtaactggtcctgttgattgtgccttcatcactgtttctctgtgccacgaccgttcatgtgtatttgaaataaagaagtttaaaaagcca

SEQ ID NO: 1974 - DNA, 2763 bp, Homo sapiens
ctggagcggtttcattgcctacattccgcattggaaaatagaagcaggcacaatgaagggaaaaggccgaggcatcagcgtgtgaagaccgcaaagacgatcccgagtacagttgtgaacagcattgctgctaggctcctcctgcagatcatctgaaatgaacctctcttattgatttttattggcctagagccaggagtactgcattcagttgactttcagggtaaaaagaaaacagtcctggttgttgtcatcataaacatatggaccagtgtgatggtgaaatgagatgaggctccgcaatggaactgtagccactgctttagcatttatcacttccttccttactttgtcttggtatactacatggcaaaatgggaaagaaaaactgattgcttatcaacgagaattccttgctttgaaagaacgtcttcgaatagctgaacacagaatctcacagcgctcttctgaattaaatacgattgtgcaacagttcaagcgtgtaggagcagaaacaaatggaagtaaggatgcgttgaataagttttcagataataccctaaagctgttaaaggagttaacaagcaaaaaatctcttcaagtgccaagtatttattatcatttgcctcatttattgaaaaatgaaggaagtcttcaacctgctgtacagattggcaacggaagaacaggagtttcaatagtcatgggcattcccacagtgaagagagaagttaaatcttacctcatagaaactcttcattcccttattgataacctgtatcctgaagagaagttggactgtgttatagtagtcttcataggagagacagatattgattatgtacatggtgttgtagccaacctggagaaagaattttctaaagaaatcagttctggcttggtggaagtcatatcaccccctgaaagctattatcctgacttgacaaacctaaaggagacatttggagactccaaagaaagagtaagatggagaacaaagcaaaacctagattactgttttctaatgatgtatgctcaagaaaagggcatatattacattcagcttgaagatgatattattgtcaaacaaaattattttaataccataaaaaattttgcacttcaactttcttctgaggaatggatgattctagagttttcccagctgggcttcattggtaaaatgtttcaagcgccggatcttactctgattgtagaattcatattcatgttttacaaggagaaacccattgattggctcctggaccatattctctgggtgaaagtctgcaaccctgaaaaagatgcaaaacattgtgatagacagaaagcaaatctgcgaattcgcttcagaccttcccttttccaacatgttggtctgcactcatcactatcaggaaaaatccaaaaactcacggataaagattatatgaaaccattacttcttaaaatccatgtaaacccacctgcggaggtatctacttccttgaaggtctaccaagggcatacgctggagaaaacttacatgggagaggatttcttctgggctatcacaccgatagctggagactacatcttgtttaaatttgataaaccagtcaatgtagaaagttatttgttccatagcggcaaccaagaacatcctggagatatwctgctaaacacaactgtggaagttttgccttttaagagtgaaggtttggaaataagcaaagaaaccaaagacaaacgattagaagatggctatttcagaataggaaaatttgagaatggtgttgcagaaggaatggtggatccaagtctcaatcccatttcagcctttcgactttcagttattcagaattctgctgtttgggccattcttaatgagattcatattaaaaaagccaccractgatcatctgagaaaccaacacattttttcctgtgaatttgttaattaaagatagttaagcatgtatcttttttttatttctacttgaacactacctcttgtgaagtctactgtagataagacgattgtcatttccacttggaaagtgaatctcccataataattgtatttgtttgaaactaagctgtcctcagattttaacttgactcaaacatttttcaattatgacagcctgttaatatgacttgtactattttggtattatactaatacataagagttgtacatattgttacattctttaaatttgagaaaaactaatgttacatacattttatgaagggggtacttttgaggttcacttattttactattatagaccctcttttatagattatcagggattatatatataaatatataaatatacataaaaatgttatggaattaatttattagaaacacttaagaagtacatatttttgtgcagtagatttttgaatcgatactttttttgaaaaccagtttccttgcttttttaagttctttctatatttttctttggaaatgcaaacattacaaaccaatgccatttttcaaatgcactgccatttaagattgattatagatggatttcttaattgaagtacttttataatcacagtgactgaacaaaatattttcaaagacatttgtcattccttaaagccaagattttaaagactaatgtccttcctgagggttactttactatactgtgtatggtgtatagccacagaaagtcagtctgataaattttcaatgtgtaagtgtgatgcattcaacccagattattgtagacttaacttattatatttcctctgatatgt

SEQ ID NO: 1975 - DNA, 2780 bp, Homo sapiens
ggcccgcagcggcggcggcggctacagcagctccgccggcagccgcgggagcacggcgacgccagcggcgggaagggaaaaggccgaggcatcagcgtgtgaagaccgcaaagacgatcccgagtacagttgtgaacagcattgctgctaggctcctcctgcagatcatctgaaatgaacctctcttattgatttttattggcctagagccaggagtactgcattcagttgactttcagggtaaaaagaaaacagtcctggttgttgtcatcataaacatatggaccagtgtgatggtgaaatgagatgaggctccgcaatggaactgtagccactgctttagcatttatcacttccttccttactttgtcttggtatactacatggcaaaatgggaaagaaaaactgattgcttatcaacgagaattccttgctttgaaagaacgtcttcgaatagctgaacacagaatctcacagcgctcttctgaattaaatacgattgtgcaacagttcaagcgtgtaggagcagaaacaaatggaagtaaggatgcgttgaataagttttcagataataccctaaagctgttaaaggagttaacaagcaaaaaatctcttcaagtgccaagtatttattatcatttgcctcatttattgaaaaatgaaggaagtcttcaacctgctgtacagattggcaacggaagaacaggagtttcaatagtcatgggcattcccacagtgaagagagaagttaaatcttacctcatagaaactcttcattcccttattgataacctgtatcctgaagagaagttggactgtgttatagtagtcttcataggagagacagatattgattatgtacatggtgttgtagccaacctggagaaagaattttctaaagaaatcagttctggcttggtggaagtcatatcaccccctgaaagctattatcctgacttgacaaacctaaaggagacatttggagactccaaagaaagagtaagatggagaacaaagcaaaacctagattactgttttctaatgatgtatgctcaagaaaagggcatatattacattcagcttgaagatgatattattgtcaaacaaaattattttaataccataaaaaattttgcacttcaactttcttctgaggaatggatgattctagagttttcccagctgggcttcattggtaaaatgtttcaagcgccggatcttactctgattgtagaattcatattcatgttttacaaggagaaacccattgattggctcctggaccatattctctgggtgaaagtctgcaaccctgaaaaagatgcaaaacattgtgatagacagaaagcaaatctgcgaattcgcttcagaccttcccttttccaacatgttggtctgcactcatcactatcaggaaaaatccaaaaactcacggataaagattatatgaaaccattacttcttaaaatccatgtaaacccacctgcggaggtatctacttccttgaaggtctaccaagggcatacgctggagaaaacttacatgggagaggatttcttctgggctatcacaccgatagctggagactacatcttgtttaaatttgataaaccagtcaatgtagaaagttatttgttccatagcggcaaccaagaacatcctggagatatwctgctaaacacaactgtggaagttttgccttttaagagtgaaggtttggaaataagcaaagaaaccaaagacaaacgattagaagatggctatttcagaataggaaaatttgagaatggtgttgcagaaggaatggtggatccaagtctcaatcccatttcagcctttcgactttcagttattcagaattctgctgtttgggccattcttaatgagattcatattaaaaaagccaccractgatcatctgagaaaccaacacattttttcctgtgaatttgttaattaaagatagttaagcatgtatcttttttttatttctacttgaacactacctcttgtgaagtctactgtagataagacgattgtcatttccacttggaaagtgaatctcccataataattgtatttgtttgaaactaagctgtcctcagattttaacttgactcaaacatttttcaattatgacagcctgttaatatgacttgtactattttggtattatactaatacataagagttgtacatattgttacattctttaaatttgagaaaaactaatgttacatacattttatgaagggggtacttttgaggttcacttattttactattatagaccctcttttatagattatcagggattatatatataaatatataaatatacataaaaatgttatggaattaatttattagaaacacttaagaagtacatatttttgtgcagtagatttttgaatcgatactttttttgaaaaccagtttccttgcttttttaagttctttctatatttttctttggaaatgcaaacattacaaaccaatgccatttttcaaatgcactgccatttaagattgattatagatggatttcttaattgaagtacttttataatcacagtgactgaacaaaatattttcaaagacatttgtcattccttaaagccaagattttaaagactaatgtccttcctgagggttactttactatactgtgtatggtgtatagccacagaaagtcagtctgataaattttcaatgtgtaagtgtgatgcattcaacccagattattgtagacttaacttattatatttcctctgatatgt

SEQ ID NO: 1976 - DNA, 1700 bp, Homo sapiens
acaaagcccagcccagcggaaggaacggtttcggagttgtttttctttgatacgggagttcctccwtgctctcgcccctactctttctggtgttagatcgagcwaccctctaaaagcagtttagagtggtaaaaaaaaaaaaaaacacaccaaacgctcgcagccacaaaagggatgaaatttcttctggacatcctcctgcttctcccgttactgatcgtctgctccctagagtccttcgtgaagctttttattcctaagaggagaaaatcagtcaccggcgaaatcgtgctgattacaggagctgggcatggaattgggagactgactgcctatgaatttgctaaacttaaaagcaagctggttctctgggatataaataagcatggactggaggaaacagctgccaaatgcaagggactgggtgccaaggttcatacctttgtggtagactgcagcaaccgagaagatatttacagctctgcaaagaaggtgaagactacaaaggcatttcttcctgcaatgacgaagaataaccatggccatattgtcactgtggcttcggcagctggacatgtctcggtccccttcttactggcttactgttcaagcaagtttgctgctgttggatttcataaaactttgacagatgaactggctgccttacaaataactggagtcaaaacaacmtgtctgtgtcctaatttcgtaaacactggcttcatcaaaaatccaagtacaagtttgggacccactctggaacctgaggaagtggtaaacaggctgatgcatgggattctgactgagcagaagatgatttttattccatcttctatagcttttttaacaacattggaaaggatccttcctgagcgtttcctggcagttttaaaacraaaaatcagtgttaagtttgatgcagttattggatataaaatgaaagcgcaataagcacctagttttctgaaaactgatttaccaggtttaggttgatgtcatctaatagtgccagaattttaatgtttgaacttctgttttttctaattatccccatttcttcaatatcatttttgaggctttggcagtcttcatttactaccacttgttctttagccaaaagctgattacatatgatataaacagagaaatacctttagaggtgactttaaggaaaatgaagaaaaagaaccaaaatgactttattaaaataatttccaagattatttgtggctcacctgaaggctttgcaaaatttgtaccataaccgtttatttaacatatatttttatttttgattgcacttaaattttgtataatttgtgtttctttttctgttctacataaaatcagaaacttcaagctctctaaataaaatgaaggactatatctagtggtatttcacaatgaatatcatgaactctcaatgggtaggtttcatcctacccattgccactctgtttcctgagagatacctcacattccaatgccaaacatttctgcacagggaagctagaggtggatacacgtgttgcaagtataaaagcatcactgggatttaaggagaattgagagaatgtacccacaaatggcagcaataataaatggatcacacttaaacttttggtgtttccatctttttgtcttaaacagaacatgacaaccttcaaattaaaggaaaataaattgtgcaatcttttttt

SEQ ID NO: 1977 - DNA, 4558 bp, Homo sapiens
tggccagaaggttcggttgcgcgtgtgccatggactcagccgcccggtgatattgwcaataggagagagaaaggggcattgactgggacccaccgcgggtagcgaaaggtggctctggcagcggcggctccagctcctgcggctcctcctccttattctgtccccttctcttgctgccgctgcagatccagtcttcctccctcccttccccccctccccacgtcgtcrccgccgccgccgggtccggggcaasgagctgaggcgccgcccgccaggaatgtgagcgaggagccaccggcggagccgcaacggggtcggtgccgatttgatgggacgggcccgcgggggaggatcgtgaggccgccgccgccaccggaacgctgaggttcgggtccggccgtgaggcctagaggctccgccgccgcggaaccggagggaccccgtaccggacagccgtcgccccaggctccccgcagctgcccggacctccccctgcacgtcccggtcccgccgcccgcccccgctgcggccacctcgcccgtctcccgcccctccaagccacagatcatcttyggattcttccccagaagcttcaagtagggatatgtcctcagcaccaactactcctccatcagtggataaagtagacggattttctcggaagtccgtcagaaaagccagacagaagaggtcgcaaagttcctcacagtttaggtctcaaggcaagcctattgagttaacacctctgccgctgctaaaagacgttccatcctcagagcagcctgaactgttcctaaagaaacttcagcagtgctgtgtcatttttgacttcatggacacgctatctgatcttaaaatgaaagaatacaagcgctccactcttaatgaactggtggactacattacaataagcagaggctgtttgacagagcagacttaccctgaagtagttagaatggtatcttgcaatatattcagaactctccctcctagtgacagcaatgaatttgatccagaagaagatgaacctacccttgaggcatcgtggccacacttacagcttgtatatgaatttttcatamgatttttggaaagccaagaattccaacccagcattgccaaaaaatatatagatcagaaatttgtattacagcttctggagctatttgacagcgaagaccctcgggaacgggactacttaaaaacagtcttacacagaatttatggcaagtttcttggtcttagagcatttatccgaaaacagattaacaatatttttctaaggtttgtttatgaaacagaacacttcaatggtgtagctgaactgctggaaatattaggaagtattatcaatggctttgctttacctcttaaggcagaacacaaacagtttctggtgaaagtattgatccctttacacactgtcaggagcttatcactcttccatgcacagctggcatattgtatagtacagtttctggagaaagatccttcactcacagaaccagttattagggggttaatgaaattttggcctaaaacatgtagtcaaaaagaggtcatgttccttggggaactggaagaaatattggatgtgattgaaccttcacaatttgttaaaatccaagaacctttgtttaaacaaatcgccaagtgtgtatctagcccccattttcaggtggcagaaagagcactctattattggaataatgaatacatcatgagtttgatagaagaaaactctaaygtcatccttcccatcatgttttccagcctttataggatttcaaaagaacattggaatccggctattgtggcgttggtgtacaatgtgttgaaggcatttatggaaatgaacagcaccatgtttgacgagctgacagccacatacaagtcagatcgtcagcgtgagaaaaagaaagaaaaggagcgtgaagaattgtggaaaaaattggaggatctggagttaaagagaggtcttagacgtgatggaataattccaacttaacaaaaacaatgacaacaacattactaacctgtggagtcacacgtttatgtagtagaagatggagcaacagttttctgtattgtgcaactttacagtagatttcacctttgtttcattattacagcagcactgtatatacctgtctctaagtaaaggaaaaaacaaaataaggacttcaatccaaagtttggacagtagatggacttctcagaactttgcaaacataatcattgttctcaccctcttttaaaaaaaaaaatcggtcttcaaagatctgttgatgaaattgctatgttaaaattccattatcgggagttccttatttatcactagcagagagtatgatacaattttcaaatgtgaacaatcttaaatttagcttgtctttctgctaagctgttaaatgtatttatagtaaaggaagaaaaaaagactgtcatttccttataagtttgtgtaacatcctcctctggataacttgactgtaatttaacatctttttcttttgcacatcttcctgagttgaatgtccacgtggaatggggtcatgaattataaaagtccctgataaaagttttgtttactggggtgaacatctttccagtaaccaggtagtcctggtactcctttagttttaaaattaggagttaagagagaagaggtgataaacatagtagggaagggaatatcggattcatgcatcagtttatggtgaatccaaatcaatgtcttgaatcctttgaaaacaggcactgggacatcacaggcttcagtacctgaccagtattagttgcatatatcattgaacacacataccagagatgttttagaaatgtgagaaaaacatccttttggaccatttgaaataagaaagacaaacactaaacaatacaaccatgaaattgatcaccgggattgcaaatctaattgggaaaagagttgagcaaacagcttggactgtttggagttgttgccttactttttaatatgtatttataaagtattccagcaaaagaggatgtagcctctgggaaaaaacaaacatgttacagtgttttttgtagattctcgttctatatctcatcacagcgccagccctgtttttagccggaaaggattcaggataaacattattatgcattctgaattggatgcatattcctaactactgtatttgttaccaaaagtggttctacaaatgctactgaaaaaaatctggaaattcctaatgtcctgagtattaataataaagtttaaaaatgcttttatatcaaaggtgcatcgtgaccaaattgtttaagaaaaaaaaacaaaaaaaacaaaatctagggctgtattatatatatatatatatatatatatatatatatatatatcttattggctctctgctttgtatttaaatgaagaatcttacatcttgggtaggtaaactgctgataaaatttgtgtacagtatgtacttacctaatgcagttgcattattacgtactgaaagatatgtgtttggaggtttatttccaggatgcatttgcttgttttggtcatggcagcagtgagttggtaatcctaaaccatcacttccagcagtattcatggtatagagctgatctgtgttcatatgttgaattgtgatagtagcaaacatgaacatatgaactattgttgctcttaatagaaatacaatataaatatgggcttgtatattttcttccttacatttaaatataaagtagaatacgcagttttattattttcaagaaaaagaaagagaagctgctgacctttctcccccataaagtttttcaggatgatcaggtcacagtgtgtacgtaagagtcagctaattatggatattgtcatctcggtaactttgtaaaaaaacaaacaaaactggcattgttaattccaaaaagaaaaaaaaaagcagtaaaaaaaaaaagtcatatgcaacaccagacgcaacatggtttaatggaattaatagtttttttttttttttttttaaagaacattgatggggattcactgtaaagttggcagaggctgccaaagacgaaacaactgactttaaaaatgctggaacaatgtgataaaaaataaatttgtaacaaatcttctcctttttagcccttgtcattttagccctttagtttcaactctgcattatatttagtttatatagtgtaaacttttgtttgccattaattcatctttttaggtagaagacattaaaatcacaggtttatgaagaatctctgcycattggaatgaaatgcagtcatttgaaatgagaaaggccaggatccttttttgtaccttaccctgtcttcaagagtaaaggtgaacacttacagctctcctccttgatgtcaattttgtatgttgatcattccaaactgagaagaataaagccacattttagacatatttatagaatcaattaaagctatatgtctaaaattcgtagggcaacttctgagaagaaacaccgtctttttcttttttaatggaaagtgacaatgtgacattagtcatgttgtgtgcggt

SEQ ID NO: 1978 - DNA, 5167 bp, Homo sapiens
tggccagaaggttcggttgcgcgtgtgccatggactcagccgcccggtgatattgwcaataggagagagaaaggggcattgactgggacccaccgcgggtagcgaaaggtggctctggcagcggcggctccagctcctgcggctcctcctccttattctgtccccttctcttgctgccgctgcagatccagtcttcctccctcccttccccccctccccacgtcgtcrccgccgccgccgggtccggggcaasgagctgaggcgccgcccgccaggaatgtgagcgaggagccaccggcggagccgcaacggggtcggtgccgatttgatgggacgggcccgcgggggaggatcgtgaggccgccgccgccaccggaacgctgaggttcgggtccggccgtgaggcctagaggctccgccgccgcggaaccggagggaccccgtaccggacagccgtcgccccaggctccccgcagctgcccggacctccccctgcacgtcccggtcccgccgcccgcccccgctgcggccacctcgcccgtctcccgcccctccaagccacagatcatcttyggattcttccccagaagcttcaagtagggatatgtcctcagcaccaactactcctccatcagtggataaagtagacggattttctcggaagtccgtcagaaaagccagacagaagaggtcgcaaagttcctcacagtttaggtctcaaggcaagcctattgagttaacacctctgccgctgctaaaagacgttccatcctcagagcagcctgaactgttcctaaagaaacttcagcagtgctgtgtcatttttgacttcatggacacgctatctgatcttaaaatgaaagaatacaagcgctccactcttaatgaactggtggactacattacaataagcagaggctgtttgacagagcagacttaccctgaagtagttagaatggtatcttgcaatatattcagaactctccctcctagtgacagcaatgaatttgatccagaagaagatgaacctacccttgaggcatcgtggccacacttacagcttgtatatgaatttttcatamgatttttggaaagccaagaattccaacccagcattgccaaaaaatatatagatcagaaatttgtattacagcttctggagctatttgacagcgaagaccctcgggaacgggactacttaaaaacagtcttacacagaatttatggcaagtttcttggtcttagagcatttatccgaaaacagattaacaatatttttctaaggtttgtttatgaaacagaacacttcaatggtgtagctgaactgctggaaatattaggaagtattatcaatggctttgctttacctcttaaggcagaacacaaacagtttctggtgaaagtattgatccctttacacactgtcaggagcttatcactcttccatgcacagctggcatattgtatagtacagtttctggagaaagatccttcactcacagaaccagttattagggggttaatgaaattttggcctaaaacatgtagtcaaaaagaggtcatgttccttggggaactggaagaaatattggatgtgattgaaccttcacaatttgttaaaatccaagaacctttgtttaaacaaatcgccaagtgtgtatctagcccccattttcaggttagtaaaagagcactctattattggaataatgaatacatcatgagtttgatagaagaaaactctaaygtcatccttcccatcatgttttccagcctttataggatttcaaaagaacattggaatccggctattgtggcgttggtgtacaatgtgttgaaggcatttatggaaatgaacagcaccatgtttgacgagctgacagccacatacaagtcagatcgtcagcgtgagaaaaagaaagaaaaggagcgtgaagaattgtggaaaaaattggaggatctggagttaaagagaggtcttagacgtgatggaataattccaacttaacaaaaacaatgacaacaacattactaacctgtggagtcacacgtttatgtagtagaagatggagcaacagttttctgtattgtgcaactttacagtagatttcacctttgtttcattattacagcagcactgtatatacctgtctctaagtaaaggaaaaaacaaaataaggacttcaatccaaagtttggacagtagatggacttctcagaactttgcaaacataatcattgttctcaccctcttttaaaaaaaaaaatcggtcttcaaagatctgttgatgaaattgctatgttaaaattccattatcgggagttccttatttatcactagcagagagtatgatacaattttcaaatgtgaacaatcttaaatttagcttgtctttctgctaagctgttaaatgtatttatagtaaaggaagaaaaaaagactgtcatttccttataagtttgtgtaacatcctcctctggataacttgactgtaatttaacatctttttcttttgcacatcttcctgagttgaatgtccacgtggaatggggtcatgaattataaaagtccctgataaaagttttgtttactggggtgaacatctttccagtaaccaggtagtcctggtactcctttagttttaaaattaggagttaagagagaagaggtgataaacatagtagggaagggaatatcggattcatgcatcagtttatggtgaatccaaatcaatgtcttgaatcctttgaaaacaggcactgggacatcacaggcttcagtacctgaccagtattagttgcatatatcattgaacacacataccagagatgttttagaaatgtgagaaaaacatccttttggaccatttgaaataagaaagacaaacactaaacaatacaaccatgaaattgatcaccgggattgcaaatctaattgggaaaagagttgagcaaacagcttggactgtttggagttgttgccttactttttaatatgtatttataaagtattccagcaaaagaggatgtagcctctgggaaaaaacaaacatgttacagtgttttttgtagattctcgttctatatctcatcacagcgccagccctgtttttagccggaaaggattcaggataaacattattatgcattctgaattggatgcatattcctaactactgtatttgttaccaaaagtggttctacaaatgctactgaaaaaaatctggaaattcctaatgtcctgagtattaataataaagtttaaaaatgcttttatatcaaaggtgcatcgtgaccaaattgtttaagaaaaaaaaacaaaaaaaacaaaatctagggctatatatatatatatatatatatatcttattggctctctgctttgtatttaaatgaagaatcttacatcttgggtaggtaaactgctgataaaatttgtgtacagtatgtacttacctaatgcagttgcattattacgtactgaaagatatgtgtttggaggtttatttccaggatgcatttgcttgttttggtcatggcagcagtgagttggtaatcctaaaccatcacttccagcagtattcatggtatagagctgatctgtgttcatatgttgaattgtgatagtagcaaacatgaacatatgaactattgttgctcttaatagaaatacaatataaatatgggcttgtatattttcttccttacatttaaatataaagtagaatacgcagttttattattttcaagaaaaagaaagagaagctgctgacctttctcccccataaagtttttcaggatgatcaggtcacagtgtgtacgtaagagtcagctaattatggatattgtcatctcggtaactttgtaaaaaaacaaacaaaactggcattgttaattccaaaaagaaaaaaaaaagcagtaaaaaaaaaaagtcatatgcaacaccagacgcaacatggtttaatggaattaatagtttttttttttttttttttaaagaacattgatggggattcactgtaaagttggcagaggctgccaaagacgaaacaactgactttaaaaatgctggaacaatgtgataaaaaataaatttgtaacaaatcttctcctttttagcccttgtcattttagccctttagtttcaactctgcattatatttagtttatatagtgtaaacttttgtttgccattaattcatctttttaggtagaagacattaaaatcacaggtttatgaagaatctctgcycattggaatgaaatgcagtcatttgaaatgagaaaggccaggatccttttttgtaccttaccctgtcttcaagagtaaaggtgaacacttacagctctcctccttgatgtcaattttgtatgttgatcattccaaactgagaagaataaagccacattttagacatatttatagaatcaattaaagctatatgtctaaaattcgtagggcaacttctgagaagaaacaccgtctttttcttttttaatggaaagtgacaatgtgacattagtcatgttgtgtgcggtgacgcagagtaactgaggtaatctgactgttgcactatgtgacatatttcaggacgtacttgctgcatttgcagcagccctctctctctgtcccttcccacaattctgctgttgctgcaacttgagttaattgtgacaaatgcatctttgtgttatattttgtttgcttcataatttccagaactatatataaatatattttttaaatagcaaatattgtagttagtgagtgatgatcactccaaccttatccttaccatattggtttcagggataggattaagagtgtctttggaagagaaaaatacrcacaaccctgtggtttagaatgacgctgaggccttaggctgtgggcctagaacaactatgtgagtgaattcacccatctcatactttgaatcaagcatgcattcctgtttctcattgtgaagtatccccagttgttttccttcagtgttgagtttttgtccttttaaattttattatattttgctctccctaacatttgactgttttttataaaagaaaagaaaaaaaaagaaataaataataccctcgatgccactggatactcacaagcagggttatgctccttcatcttgggcttgtttgcctaaatgaaagggtt

SEQ ID NO: 1979 - DNA, 4309 bp, Homo sapiens
aggagagccggaggagggggaaggagggaggggagagcggtggcggcggctgcgccgggctgtgagtctctcgccgccggaggaagatgaggctgaagattggrttcatcttacgcagtttgctggtggtgggaagcttcctggggctagtggtcctctggtcttccctgaccccgcggccggacgacccaagcccgctgagcaggatgagggaagacagagatgtcaatgaccccatgcccaaccgaggcggcaatggactagctcctggggaggacagattcaaacctgtggtaccatggcctcatgttgaaggagtagaagtggacttagagtctattagaagaataaacaaggccaaaaatgaacaagagcaccatgctggaggagattcccagaaagatatcatgcagaggcagtatctcacatttaagcctcagacattcacctaccatgatcctgtgcttcgcccagggatcctcggtaactttgaacccaaagaacctgagcctcctggagtggttggtggccctggagagaaagccaagccattggttttgggaccagaattcaaacaagcaattcaagccagcattaaagagtttggatttaacatggtggcaagtgacatgatctcactggaccgcagcgtcaatgacttacgccaagaagaatgcaagtattggcattatgatgaaaacttgctcacttcgagcgttgtcattgtcttccataatgaaggatggtcaaccctcatgagaacagtccacagtgtaattaaaaggactccaaggaaatatttascagaaattgtgttaattgacgatttcagtaataaagaacasttaaaagaaaaactggatgaatatattaagctgtggaatggcctagtgaaggtatttcgaaatgaaagaagggaaggtttaattcaagcacgaagtattggtgctcagaaggctaaacttggacaggttttgatataccttgatgcccactgtgaggtggcagttaactggtatgcaccacttgtagctcccatatctaaggacagaaccatttgcactgtgccgcttatagatgtcataaatggcaacacatatgaaattataccccaagggggtggtgatgaagatgggtatgcccgaggagcatgggattggagtatgctctggaaacgggtgcctctgacccctcaagagaagagactgagaaagacaaaaactgaaccgtatcggtccccagccatggctgggggattatttgccattgaacgagagttcttctttgaattgggtctctatgatccaggtctccagatytggggtggtgaaaactttgagatctcatacaagatatggcagtgtggtggcaaattattatttgttccttgttctcgtgttggacatatctaccgtcttgagggctggcaaggaaatcctccgcccatttatgttgggtcttctccaactctgaagaattatgttagagttgtggaggtttggtgggatgaatataaagactacttctatgctagtcgtcctgaatckcaggcattaccatatggggatatatcggagctgaaaaaatttcgagaagatcacaactgcaaaagttttaagtggttcatggaagaaatagcttatgatatcacctcacactaccctttgccacccaaaaatgttgactggggagaaatcagaggcttcgaaactgcttactgcattgatagcatgggaaaaacaaatggaggctttgttgaactaggaccctgccacaggatgggagggaatcagcttttcagaatcaatgaagcaaatcaactcatgcagtatgaccagtgtttgacaaagggagctgatggatcaaaagttatgattacacactgtaatctaaatgaatttaaggaatggcagtayttcaagaacctgcacagatttactcatattccttcaggaaagtgtttagatcgctcagaggtcctgcatcaagtattcatctccaattgtgactccagtaaaacgactcaaaaatgggaaatgaataacatccatagtgtttagagagaaaaaaataaaccaataacctacctactgasaagtaaatttatacaggactgaaaaccgcctgaaacctgctgcaactattgttattaactctgtatagctccaaacctggaacctcctgatcagtttgaaggacattgataaactgtgattttacaataacattatcatctgcagttactgtttacaagactgcttttaccttaaactttgtagatgtttacatctttttgttgtgttttaagatgatgttggtaatttgtgcctttagctctgttttattagacagagttaaagcatgttgtcttctttgggattacactcaggggtctgaaaggcagtttgatttttatttttaacacacttgaaaaaaggttggagtagccagactttcatatataacttggtgattatcaacctgttgtgtctttatttaattttacatctttttgaagcactgccacaggttattagccaaggtggccttccttcacagtcatgctgcttttttgaaaggtgaatttcaacacatttagtgcctctttcatttctcagtatatatttcaagagcttgtgatgaaatctataggatggtaatgatggacttgtcacctgtatggggaatacttttactactcagaaatgaatttatgtgctgccatttgctataaagttgaactttgtatggcttgaaaaagaaatgacaatatggaacatcccaaggctgtcccatagggttggaagttgtgtagcattcacycccttacctactggcattcccagtgccctctgtccatacctacttctaggattgcaaaggagtcttccaactagagaaaaattgtccactgacatttgggatttacttttctccaatacctgccaatacagaaaactattatcagttgttattgttatcccttgaaagcgagggtgacaaaaacaacaaaacaccgttataaacacatcaaaggttcattctgactgaggtaagactttccaagcccttgttagattaggccttataaaacttgtgtgcattataacctaagctgtgcaacctgtgaagccaagagtgaactgatgtttcatttatattttcatccaaatgacattatctgcacgtttttaaaatttaaaaacaaaggactatttaaaaatacagtttattaacaaacgtgaactactttctgttacattaggtgttccctagtgtttcttaatttctttttagaaagtgtatttttattagtatttttccggtgaacagaagatttgtttggatttaaacatttactaagacagtacctattaggaaaaccaaatattgcaaatggtcaattcgattttaatttctcaaaagatactctgttatccagaagattaaaatgcctacattgagtgcttaaaaaaaaaaaaacaactgtgatgatgtgagcagaatggcaagtaagttaagcatttttgatcctgtaatcatggtatcattacaatgaaaggaattcacaaactactgccagaggaagtttgttttttaatttaagagggaaatataacctataaatttgtttcttccaagcttagctcttaaatttggagactcaaagttaaacatcctcaacagagttttatttataattttgaattgtcaatttgtattttgctactgatctgtgatcaaccattttaactttcatctctagggatgtttaacatttataattgcaaaataaaccaactataaaaaaagaaactaagagagaattggtactttaattacttgtgtgtttgcaaataggctccattttccatgttgagtagattataaccttattaactatgcataggcctaagaaaggtggcaatgaactgtgcatgtaaattttaaatgggtactttgtgcaattcgttaaaagaagatactctatgaatatgattctatatattgaaatcagaaaacctaccaaacaaaaacatcagaagctgctgccataatgactattttctactgtaggctgctttggaaataattcccatatccttgctttgtaagttggtaatatcactatgcatttctacacattttataaatttgatttatgcagattttgatacactgtatgtttctgtagaaattgtataaatattcaaaattttattaggataaatttgagaaacttacgtatatcttaattctgggttgcttgttttttaggtgacaaaaataaaatattgtattttaattc

SEQ ID NO: 1980 - DNA, 408 bp, Homo sapiens
atgccatgggaagttgcaggtgcacagacgttgccttcctggctgcggttgaacctgggctccatttgtccccttggagctccaggcggccgggccgacttcgaccctgagctctcctgtctgatttcctttccaggtggcacrtctctgagcttcctggtgttggtgacaggctgcacatctgtgggcagaattccagatgctgaaatctacaaaatcactgccactgacttttaccctcttcaggaagaggccaaggaggaggaacgcctcatagctttgaagaaaatcctcagctcgggggtgttctatttctcatggccaaacgatgggtctcgctttgacctgactgtccgcacgcagaagcagggggatgacagctctgaatgggggaactccttcttctgg

SEQ ID NO: 1981 - DNA, 7070 bp, Homo sapiens
actctggcaagttgcgggcgcgcggggagctgtcgcgggcagcgcgccctcgggaggacgtggccccggcccccgcccgcagtgggcccgaccctcatggccctgagcaaagggctgcggctgctggggcgcctgggggccgagggggactgtagcgtgctgctggaggcgcgcggccgcgacgactgcctgctgttcgaggccggcacggtggccacgctggctccagaagaaaaggaagtcattaaaggacagtatggcaagctcacggacgcgtayggctgcctgggggagctgaggctgaaatctggtggcacrtctctgagcttcctggtgttggtgacaggctgcacatctgtgggcagaattccagatgctgaaatctacaaaatcactgccactgacttttaccctcttcaggaagaggccaaggaggaggaacgcctcatagctttgaagaaaatcctcagctcgggggtgttctatttctcatggccaaacgatgggtctcgctttgacctgactgtccgcacgcagaagcagggggatgacagctctgaatgggggaactccttcttctggaaccagctgttgcacgtgcccttgaggcagcaccaggtgagctgctgtgactggctgctgaagatcatctgcggggtggtcaccatccgcaccgtgtatgcctcccacaagcaggccaaggcctgcctcgtctctcgcgttagctgtgagcgcacaggcactcgcttccacacccgtggcgtgaacgacgacggccatgtgtccaacttcgtggagacagagcagatgatttacatggacgatggagtgtcatcttttgtccagatcagaggctccgttccgctgttctgggarcagccagggcttcaggttggctcccatcatctgagactccacagaggcctggaagccaatgcccctgctttcgacaggcacatggtgcttctgaaggagcagtacgggcagcaggtggtcgtgaaccttctgggaagcagaggcggagaggaggtgctcaacagagccttcaagaagctgctctgggcttcttgccacgcgggcgacacgcctatgatcaattttgacttccatcagtttgccaaaggtgggaagctagagaaattggagaccytcttgaggccacagttaaagctgcactgggaagacttcgatgtgttcacaaagggggagaacgtcagtccacgttttcagaaaggcactttgcggatgaactgtcttgactgcctggaccgaaccaacactgtgcagagcttcatcgcgctcgaggtcctgcatctgcagctcaagaccctggggctgagttcaaaacccatcgttgaccgctttgtggagtccttcaaagccatgtggtctctgaatggccacagcctgagcaaggtgttcacaggcagcagagccctggaagggaaggccaaggtggggaagctgaaggatggagcccggtccatgtctcgaaccatccagtccaacttcttcgacggggtgaagcaggaggccatcaagctgctgctggttggggacgtctacggcgaggaggtggcagacaaagggggcatgctgctggacagcacggcgctcctggtgactcccaggatcctgaaagctatgactgagcgtcagtccgaattcacaratttcaagcggatccggattgctatggggacctggaacgtgaacggaggaaagcagttccggagcaacgtgctcaggacggcggagctgacagactggctgctcgactcgccccagctctcgggagctaccgactcccaggatgacagcagcccagctgacatatttgctgtgggrtttgaagagatggtggaattgagcgcagggaatattgtcaatgccagtactaccaacaagaagatgtggggtgaacagcttcagaaagccatctcacgctctcatagatacattctgttgacttcggcacagctggtgggcgtctgtctttatatctttgtacgtccataccatgtcccgttcatcagggacgtagccatcgacacagtgaagacgggcatggggggcaaggcggggaacaagggcgccgtcggcatccgcttccagttccacagcaccagcttctgcttcatatgtagtcacctgacggccgggcagtcccaggtgaaggagcggaatgaagactacaaggagatcacccagaaactctgcttcccaatggggagaaatgttttttctcatgattatgtattttggtgtggcgatttcaactaccgcattgatcttacttatgaagaagtcttctattttgttaaacgccaagactggaagaaacttctggaatttgatcaactacagctacagaaatcaagtggaaaaatttttaaggactttcacgaaggagccattaactttggacccacctacaagtatgacgtyggctcagccgcctacgayacaagcgacaaatgccgcacccccgcctggacagacagggtgctgtggtggaggaagaaacatccctttgataaaacagctggagaactcaaccttctagacagtgatctagatgttgacaccaaagtcagacacacctggtctcctggtgccctgcagtattatggtcgtgcggagctacaagcktctgatcacagacctgtgctggcgatcgtggaggtggaagttcaggaagtcgatgtgggtgctcgggagagggttttccaggaagtgtcctccttccagggccccctggatgccactgttgtagtaaaccttcaatcaccgaccttagaagagaaaaacgagtttccagaggacctgcgtactgagctcatgcagaccttggggagttatgggacaattgttcttgtcaggatcaaccaagggcagatgctggtaacttttgcagacagtcactcggctctcagtgtcctggaygtggacggtatgaaggtgaaaggcagagcagtgaagattagaccgaagaccaaggactggctgaaaggtttgcgagaggagatcattcggaaacgagacagcatggcccccgtgtctcccactgccaactcctgtttgctggaggaaaactttgacttcacaagtttggactatgagtcagaaggggatattcttgaagacgatgaagactacttggtggatgaattcaatcagcctggrgtctcggacagtgaactcrggggagacgacctctctgatgtccccggccccayagcactggctcctcccagcaagtcacctgctctcamcaaaaagaagcagcatccaacgtacaaagatgacgcggacctgrtggagctcaagcrggagctggaagccgtcggggagttccgccaccgttctccgagcaggtctctgtcggtccccaaccgrcctcggccacctcaacccccgcagagacccccccctccaaccggtttaatggtgaaaaagtcggcttcagatgcgtccatctcctccggcacccatggrcagtattcaattttgcagacggcaagacttctaccaggagcacctcagcaacctcccaaggctcggactggaataagtaaaccttataatgtcaagcagatcaaaaccaccaatgcccaggaggcagaagcagcaatccggtgtctcctggaagccagaggaggtgcctccgaagaagccctaagtgccgtggccccaagggaccttgaagcatcctctgaaccagagcccacaccgggggcagccaaaccagagaccccacaggcgcccccactccttccccgtcggcccccacccagagttcctgccatcaagaagccaaccttgagaaggacaggaaagcccctgtcaccggaagaacagtttgagcaacagactgtccattttacaatcgggcccccggagacaagcgttgaggcccctcctgtcgtgacagcccctcgagtccctcctgttcccaaaccaagaacatttcagcctgggaaagctgcagagaggccaagccacaggaagccagcatcagacgaagcccctcctggggcaggagcctctgtgccaccacctctggaggcgccgcctcttgtgcccaaggtaccccckaggaggaagaagtcagcccccgcagccttccacctgcaggtcctgcagagcaacagccagcttctccagggcctcacttacaatagcagtgacagcccctctgggcacccacctgccgcgggcaccrtcttcccacaaggggactttctcagcacttcatctgctacaagccccgacagcgatggcaccaaagcgatgaagccagaggcagccccacttcttggtgattatcaggaccccttctggaaccttcttcaccaccctaaactgttgaataacacttggctttctaagagctcagaccctttggactcaggaaccaggagccccaaaagagatcccatagacccagtgtcagctggcgcttcagctgccaaggcagagctgccaccagatcatgracacaaaaccttaggtcactgggtgacaatcagtgaccaagaaaagaggacagcactgcaggtgtttgacccactggcaaaaacatgactgagcagctttgaaggctgcagtcctatagaatgcataccttcctccctctagrcatccctccaccagaagagacatctatttaaaggcacactggccaaaacgtttgtgcatctgtcactctcgtgtagtttacaaaaatcgtgtctcttattcagtaagatggttactcagccaccaaaatatatttcactcaaggcttgtacatctgaagtttgctcttcaaggaatgggaaccttcctgttaaattcggtgtatggattttaagaaaggaatctagccaatgaggtccaagaagttctcacccattgaatttttaaatggctgttcagttcatgttgtacgtgatggagatttgtcttttgttttatttgcattttacagatttggtataacattttggggagccacctgaaggttgatgtataaagtaaggattagagaaagaggtcgttgtgaccattagtagctgtcctggcccacttaaacaaggttacaaaaaatcagagtcggaagcagccaaataggtcaacctaatgactagactgtacattcccatgagccttcatgtttaagtgtgtacatgtgcgttaaccttgatgatgcgtgaatcccgagggagccggtggcatacaccgttagcttaaccttagcttaaactagctgaaggctcctgtgccatgtcttagacattgcatgccctatcaattactataatcctgagccatggtgtgctactgaaaccaatttttatccaccatctagtccttattaaatgaaacctcacggatcctttgttccgcttatattccatgcataccacataaaagcacacagtgcgaaaactcttgctgatacgcgatattgattctcattgttagaatatggagagtgtttcagcctcgtctgtccggctggagcttcgggatggaaagtgctatgtgtccctgcatataagaatcaccaggccagtgtttctgggtttgcttgtctatatgtttgtctatattttttgcctatacatttttcccacgtttccaacagcacttctcacctattcaataactgaaaaagacattaccatagtgctttacatttttaaagtaatgytacaaggtctggaatccatttggagcagataccgtgttttcgctatttaataagaagttcagtagtgaaatcttactgtaccgcctgttgtatctgggagcctcgtacagaggctcgcacagcagtgatcaagtgtcatcccttacgtgactgggggatgtctgtcctaaaagctgactgctaggatagtaaggatcatcttgcctgggctatgccactgtcttgttaccaattagacatctggaatttcataattagttttcattgtcactgtcaagatatattgcagattacttaaatatggccatcaaaacaaaagttacaacacgtatctcttttcatctgaaaactaatacctggaaaaggataaaaaaaaaaaaggaatccgtgacccacagagctagacagataagatgcatagttgaccagtcataaaaggcggtgtttaggtgatcaggatgccgttggtggcatttacgtgctttatatgatttttacctcygtaacaaacacaagaaataaacagaatggtccttaacagagtttgggggagagagcaagatgggttccttggagaagctgatttgccaagatgcacatcgctattaacagccagagtcataaatgaaatgaaattgaagaattcatycaaatgctcttttccctataacctcttttctcascaaaaaggagataaatttgaaaacagataaatgtaacaaccagtcaaagaagcaggggaaaagtaagctcctccaaagttgcttgcagtgctggaaatagatctcatttttaggttttctcttcgttccagataccaaataaatgggacagagaataaaatttttgttaaaatatgtgctcatctcctaagtagctcttcagagtctgaccgtaagtaaaaacacacagaattgtgttgactgggggaggtgaatcacaaaaaagttacgaggagtttaagagttaaatattatttgatcgtggctgtcaaatttagtgaacaacatagattggatttggagttggtagtaggtatggttctcataccagaattctcttaaaaaaaaaaaaaaggacaattggaattgccttatttatttttaaaatcaatgcttactagttggtaggattcccaggtcagcagcaggggcagttcacrcagactggtttaggtacttcacaactcaccattgtctctctgaccccaagcctagtcccttttacatcaccatcttctcagacttcttgcctattcttaaaatatgttttggttaatgattgaattaggacatcagcttaagcaattcctgtaacggtttaacgttgttgaagttcaaggcacataataaaattctccctgatgtgtgtg

SEQ ID NO: 1982 - DNA, 3681 bp, Homo sapiens
ccacccagtgcactgcgtttaggcatgcccacatggagagaggcgaccacagcggtgatcataagcccatggtgggcagaggccctatggagccaagggctccggccgccacccccgctccgccaccagcagcgctgccaggactcgctcttcctcctcctcctcacacgccggctcggatgatctcctgccatgactcagcgcttctcgcaggctgccctgctggggacaccggcttcgctcgggcccctcccgacgcgtccaccccctctcgccacccacgcccgcccccagccgctgggcctttcccagtgcggccgccgccgccacagctgcagtcagcaccgtcaccccagcagcatccgccgcctgcaycgcgcgtgcggcccgccccggcctgaccccgccgccgaacccggcgccagccatggagcccgaagccccccgtcgccgccacacccatcagcgcggctacctgctgacacggaaccctcacctcaacaaggacttggcctttaccctggaagagagacagcaattgaacattcatggattgttgccaccttccttcaacagtcaggagatccaggttcttagagtagtaaaaaatttcgagcatctgaactctgactttgacaggtatcttctcttaatggatctccaagatagaaatgaaaaactcttttatagagtgctgacatctgacattgagaaattcatgcctattgtttatactcccactgtgggtctggcttgccaacaatatagtttggtgtttcggaagccaagaggtctctttattactatccacgatcgagggcatattgcttcagttctcaatgcatggccagaagatgtcatcaaggccattgtggtgactgatggagagcgtattcttggcttgggagaccttggctgtaatggaatgggcatccctgtgggtaaattggctctatatacagcttgcggagggatgaatcctcaagaatgtctgcctgtcattctggatgtgggaaccgaaaatgaggagttacttaaagatccactctacattggactacggcagagaagagtaagaggttctgaatatgatgattttttggacgaattcatggaggcagtttcttccaagtatggcatgaattgccttattcagtttgaagattttgccaatgtgaatgcatttcgtctcctgaacaagtatcgaaaccagtattgcacattcaatgatgatattcaaggaacagcatctgttgcagttgcaggtctccttgcagctcttcgaataaccaagaacaaactgtctgatcaaacaatactattccaaggagctggrgaggctgccctagggattgcacacctgattgtgatggccttggaaaaagaaggtttaccaaaagagaaagccatcaaaaagatatggctggttgattcaaaaggattaatagttaagggacgtgcttccttaacacaagagaaagagaagtttgcccatgaacaygaagaaatgaagaacctagaagccattgttcaagaaataaaaccaactgccctcataggagttgctgcaattggtggtgcattctcagaacaaattctcaaagatatggctgccttcaatgaacggcctattatttttgctttgagtaatccaactagcaaagcagaatgttctgcagagcagtgctacaaaataaccaagggacgtgcaatttttgccagtggcagtccttttgatccagtcactcttccaaatggacagaccctatatcctggccaaggcaacaattcctaygtgttccctggagttgctcttggtgttgtggcgtgtggattgaggcagatcacagataatattttcctcactactgctgaggttatagctcagcaagtgtcagataaacacttggaagagggtcggctttatcctcctttgaataccattagagatgtttctctgaaaattgcagaaaagattgtgaaagatgcataccaagaaaagacagccacagtttatcctgaaccgcaaaacaaagaagcatttgtccgctcccagatgtatagtactgattatgaccagattctacctgattgttattcttggcctgaagaggtgcagaaaatacagaccaaagttgaccagtaggataatagcaaacatttctaactctattaatgaggtctttaaacctttcataatttttaaaggttggaatcttttataatgattcataagacacttagattaagattttactttaacagtctaaaaattgatagaagaatatcgatataaattgggataaacatcacatgagacaattttgcttcactttgccttctggttatttatggtttctgtctgaattattctgcctacgttctctttaaaagctgttgtacgtactacggagaaactcatcatttttatacaggacactaatgggaagaccaaaattactaataaattgacataaccaacattaaaactcataattattttgttgaccattttgttaaaatctacttttcaaaaaaaaaaaagctagaaatgaatctaggcgtaggtgaacttttgctaagcagaaataacactactttgttgcctagagaaagataacttctcaagtatttttattccagtcctagatcatatatgttcttttgtgcaacggaattctaacagttctaagagaaagatcactgctgtttacagcgccttgtgcagccttagattttaatattcttttgtcattgttacatctcatagagtaaagctcttattaccttgatcctgagtcagaaatcccacctgaaatcaccttttttcccccttgatcaaacatcccatccttcagctaccatactgttgctacagggattttgtggactgtggcccctgtccygaggttggcaccttcagttcagcacagcctgagcagtgagaaggtctgaaaggagagtatatagttaagatccttgagaaagggctgcctgaggaactgacctcttaaagatctcaggatctttaagacaacaagttaggttcctactggagttacctgccagaatggcctcttaattaactcaggtaatgaagagctaactgtgttataatcatcttgcttttgcctgaatttggagaaagtattataattaagttcccagtatcagaaatgtccttacataagattaaaatatcttgatgactaataccattctatgagaaagagtagttatatgcccagactgtattaatttactttagaaactaatgtttgaagtaatggaaaaaattttaaattataaagctaaggtgcaataacatttgctacttatttatagaattatttgaagaattttgtttttgaagtaatgctttaaggagtataagatattcaagataaattatactataaaatgattttattgaaagttgaaggttacacaaattgttttaggtatgagcagaagaggttaaggtatttctaaaggtaacatatagtcaagagtttcctcaaaatagttatttggagaagaatcagaatgtctgtgtatttcttgtctgtttctatgttgtcttatagctctgactaaatgtgtttacctatgcaaaagatttattaaagcatagaaaaggtgaatgaataaaaatataaaataattgtcctttttcttaaa

SEQ ID NO: 1983 - DNA, 1558 bp, Homo sapiens
ctcgggtgctccgccctccccgcaggcggcgtgcggctgcatagcctgagaatcccggtggtgagcggggatggcggttgtagcggcggctgccggctggctactcaggctcagggcggcaggggctgaggggcactggcgtcggcttcctggcgcggggctggcgcggggctttttgcaccccgccgcgaytgtcgaggatgcggcccagaggcggcaggtggctcattttactttccagccagatccggagccccgggagtacgggcaaactcagaaaatgaatcttttccagtctgtaacaagtgccttggataactcattggccaaagatcctactgcagtaatatttggtgaagatgttgcctttggtggagtctttagatgcactgttggcttgcgagacaaatatggaaaagatagagtttttaataccccattgtgtgaacaaggaattgttggatttggaatcggaattgcggtcactggagctactgccattgcggaaattcagttygcagattatattttccctgcatttgatcagattgttaatgaagctgccaagtatcgctatcgctctggggatctttttwactgtggaagcctcactatccsgtccccttggggctgtgttggtcatggggctctctatcattctcagagtcctgaagcattttttgcccrttgcccaggaatcaaggtggttatacccagaagccctttccaggccaaaggacttcttttgtcatgcatagaggataaaaatccttgtatattttttgaacctaaaatactttacagggcagcagcggaagaagtccctatagaaccatacaacatcccactgtcccaggccgaagtcatacaggaagggagtgatgttactctagttgcctggrgcactcaggttcatgtgatccgagaggtagcttccatggcaaaagaaaagcttggagtgtcttgtgaagtcattgatctgaggactataataccttgggatgtggacacaatttgtaagtctgtgatcaaaacagggcgactgctaatcagtcacgaggctcccttgacaggcggctttgcatcggaaatcagctctacagttcaggaggaatgtttcttgaacctagaggctcctatatcaagagtatgtggttatgacacaccatttcctcacatttttkaaccattctacatcccagacaaatggaagtgttatgatgcccttcgaaaaatgatcaactattgaccatatagaaaagctggaagattatgactagatatggaaatattttttctgaatttttttttatatttcctccgacttacctctttttgaaaagagagtttttattaartgaaccatcaygatattggctgaaaagttctacattctattattgtattgtaacacacatgtattgatgattttcattaagagtttcagwttaactttgaaaaatattccacatggtaatcttataaattctgtttaattacatctgtaaatattatgtgtgtgatagtattcaataaagtaaaatcaaattgtctttgg

SEQ ID NO: 1984 - DNA, 1492 bp, Homo sapiens
atgcagagagaggagatccggacggtgaaaaggggcggaggcgcgagcggccgggtccctgggctgcgctccggcgacggccgcccgagacgggtgtcgaggacagggatcgcggaggatgtggatcccctccctggcctgcccaggcgcgcgcgtccctccgtctcggggtacgcagcccggccgggcgcactcgccgtttccgggccggcggggcagccaccgggacaagggccacagcgcccccgccgcccggccaaggacgcgcagcccgcgcctccgccccgccccgccggcgcgacccgcacgggcgcgccccccgyagaggggcgtcggcacaaagccgccccacacaatggcccggcccggcgcagcccgccctgcaacccggctccgcgcagctgcactcacatctgggcaacgagggcctgtggtccacgggcacccagatcttctgcactcggctctgcgtcagttccaacggcatcttcgcggctgcgcccgacggcccgcctcccggggccgagatcccgacgctggcaggagagcggccrscgacccccggaacaaaggaggagaggggggcgtgcgccggsgcgcggccgggcgtttcctgcgctgccaggggaaacgtgctttgggctaagttccggaccctcgcctgtgcggggctcgacgtgtgctgcgagggtagcgaggctggggatgcccggcacggccggctcgtccgctcggaaagctctgggatgctcgggcgcagtgacagccgcgctctcgccaccaggccctgcygctcgcctcctctccggcttggctgggatgccccgcgcaccgccggcttttaaagagtccgggctggccgcagacgcgtacgtcagcctcggggcgggccgcattccttgggtcccagcccccttccacgtggggaggagggtgggcgagccgggaagcagcctgcgagctccccctgcgggccggcgacggcggtgcaccagctcccgccgccctgccccgggcctggagcgcgcccagccctgctgaagggtcctggctgctgttatcccctcgtcccgttgtcccctcgggacgtctggcacagcttccccgactaattccggcscctcacctcaactgtgctggccgggaggagagcagagacgcagtcctgcccagtgtagaccgtggaccccgcagccgaatcccttgggaagctgcttaaagtgcatcctaccaatgcagctcctttagggccatggagccccaatactctgcattcctaacacgcgctgtggggcagrcgcagtccaggtacacctactttctcctgcctctgccacccctgagacagcaagaccagccccctcttcctccttcccagtctactcaacatgaagacgacagagaggaagacctttatgaggattcacttccacttaaggaataatgaatatgttttatcttccttaaaaaaaaaataaaagatgtggaggat

SEQ ID NO: 1985 - DNA, 7599 bp, Homo sapiens
ctgatcttttctcccagtgagtttttagcagaagacagtcaagagaaattttggaattttgtagaagccagtcaaaatattggatcatcagatcatgacggtaccgattattcctactatcatgcaatattggaggctgcatttcagtttctgtcacccctccagcagaatttgtttaaattttgtctgtcccttcgttcttactcagctacaatccaagccttccagcagatagcagctgatgaacctccaccagaaggatgtaattcgtttttttcagtgcatggaaagaagacttgtgaatctgatacccttgaggctcttctactgacagcctctgaaagacccaaacctttattgttcaaaggagatcacagatatccctcgtctaatcctgaaagccctgtggtgattttctactctgagattggctctgaggaattttccaattttcaccgccagcttatatcaaaaagcaatgcaggcaaaatcaaytatgtattcagacattatatatttaatcccaggaaggagcctgtttacctctctggctatggcgtggaattggccattaagagcactgagtacaaggccaaggatgatactcaggtgaaaggaactgaggtaaacaccacagtgattggtgaaaatgatcctattgatgaggttcaggggttcctctttggaaaattaagagatctgcaccccgacctggagggacagttgaaagaactcagaaagcatcttgtagagagcaccaatgaaatggcacctttaaargtttggcagttgcaagatctcagtttccagactgctgctcgaatcttggcttctcctgttgagttggctttggttgtcatgaaggatcttagtcagaattttcctaccaaagccagagcaataacaaaaacagctgtgagctcagaacttagaaccgaagtggaagagaatcagaagtatttcaagggaactttaggattacaacctggagattcagccctcttcatcaatggacttcacatggatttagatacacaggatatattcagtctgtttgatgtgttgaggaatgaagctcgggtaatggagggtctgcatagattgggaatagaaggcctttctctgcataatgttttgaagctgaacatccagccctctgaggcagactatgccgtagacatccggagtcctgctatttcatgggtcaacaacctggaggttgatagcagatataattcgtggccttctagtttacaagagttgcttcgacccacctttcctggtgttattcggcagatcaggaaaaacttacataatatggttttcatagttgatcctgcacatgagaccacagcagagttgatgaacacagctgagatgttccttagtaatcatataccactaagaattggttttatctttgtggttaatgactctgaagatgttgatgggatgcaagatgctggagtggctgttcttagagcatataattatgttgcccaagaagtggatgattatcatgccttccagactctgacacatatctataacaaggtgaggactggagaaaaagtgaaagttgaacatgtggtcagtgtcctggagaagaaatatccgtatgtagaagtgaatagcattttggggattgattctgcttatgatcggaatcggaaggaagcaagaggctactatgagcagactggagttggacctctgcccgttgtgctgttcaatggaatgccctttgaaagggaacagctagaccctgatgagttagaaaccatcacaatgcataaaatcctggagaccaccaccttcttccaaagagcggtgtacttgggtgaactgccccatgatcaagatgtggtagagtatatcatgaatcagccaaatgttgttccacgaatcaattctaggattttgacagctgaacgagactacctggatttaacagcgagtaataacttctttgtggatgattatgctagatttactatcttggattcccaaggcaagactgctgctgtagccaatagtatgaactatctgacaaagaaaggaatgtcctccaaggaaatctatgatgattcttttattaggccagtaactttttggattgttggggattttgatagcccttctggacggcagttactgtatgatgccatcaaacatcagaaatccagtaacaatgttagaataagcatgatcaataatcctgccaaagagataagctatgagaacactcagatctccagagcaatctgggcagctctccaaactcagacttccaacgctgctaagaacttcatcaccaaaatggccaaggagggggctgcagaggccctggctgcaggagctgacattgcggagttctctgttgggggaatggatttcagtctttttaaagaggtctttgagtcttccaaaatggatttcattttgtctcatgccgtgtactgcagggatgttctgaagctgaagaagggacagagggcagtgatcagcaatggaaggatcattgggccactggaggatagtgagctctttaatcaagacgatttccacctcctcgaaaatatcatcttaaaaacctcaggacagaaaataaaatctcatattcaacagcttcgggtagaagaagatgtggcaagcgacttggtaatgaaggtggatgctcttctgtcagcgcaaccaaaaggagatccaagaatcgagtaccagttttttgaagacagacacagtgcaatcaaactgaggccgaaggaaggggagacatactttgatgttgtggctgtcgttgaccctgtcaccagagaagcacagagacttgctcctttgctcttggttttggctcagctgataaacatgaatctgagagtatttatgaactgccaatccaaactttctgacatgcctttaaaaagcttttaccgttatgtcttagaaccagagatttctttcacttcagacaatagttttgctaagggtccaatcgcaaaatttttggatatgcctcagtctccactgttcactctgaatttgaacacacctgagagctggatggtagaatctgtcagaacaccatatgatcttgataatatttatttagaagaggtggacagtgtagtggctgctgagtatgagctggaatacctgttactggaaggtcattgctacgacatcaccacaggccagcctccacggggactacagtttaccttaggaacttcagccaacccggtcattgtggacaccattgttatggccaatctgggctactttcagctgaaagccaacccaggagcttggatcctcagacttaggaagggacgctctgaagatatttatagaatttacagccacgatggcacygattctccccctgatgctgatgaggtggttatcgtcctcaacaacttcaaaagcaaaattattaaagtgaaggttcagaagaaggcagatatggtgaacgaagacttgctgagtgatggaacgagtgagaatgaatctggattttgggattccttcaaatggggctttacaggacagaagactgaggaagtgaagcaagataaagatgacataattaatattttctccgttgcatctggtcatctctacgaaagatttcttcgcataatgatgctatccgtgctgaagaataccaagactcctgtgaaattctggttcttgaagaattacttgtcccccacatttaaggagtttataccttacatggcaaatgaatacaatttccagtatgagcttgttcagtacaaatggccccggtggcttcatcaacaaactgaaaaacagcgtatcatctggggttacaagatcctcttcctggatgtacttttcccactagttgttgacaagttcctgtttgtggatgctgatcagattgtacgaacagatctgaaagagttaagagatttcaatttggatggtgctccttatggttacactcctttctgtgacagccgaagagaaatggacggctacaggttctggaartcagggtactgggccagtcatttagccgggcgaaagtatcatatcagtgcactatatgttgtggatctgaagaagtttaggaaaatagctgctggtgacagactcaggggacagtaccaaggtctgagtcaggaccctaacagcctttcaaatcttgatcaagatctgcccaataacatgattcatcaggtgccaattaaatccctccctcaagaatggctttggtgtgaaacgtggtgtgatgacgcctctaagaaaagggcaaaaaccattgatttgtgtaataatccgatgaccaaagagccgaaactggaagcagctgtgcggattgtcccggagtggcaggactacgaccaagagatcaaacagctacagatccgctttcagaaggagaaagaaacgggagcactgtacaaagagaagacaaaagaaccaagccgagaaggtcctcagaaacgtgaagaattatgatctctggagaaggacaggaaatcaccccawttgaaaaacagtttttataataaatgctagttttttctgatctgtctatacaactgctgataagccggctgggcaggagtgccacaccttttgattctgagcatttgattctgacttctgtactctggtggccactggatctttgggattaaagctctrttggatttgtacctcagaggaagaccaagtggctgatcctttggactctgtaaagagcattcttctagtcagagggtggaatggcagcagcaactggaagaaaatgagttttttggtgcccacacccaagagcacacacatgctgcactgtctcggaaagcagggccagctagagccaccatgttcttccttacctcagtttacctgcggcctgcgctgcactgcagatgcccaccctgccctgggtctggccggcggaagctctgtccaaggtccacacacctccaggtttacgccaacatccttgtgccctccccaccttctcttccaacgcattaggtgcattgtttaattgaaatccaaccaacaattgtgtgtcaaggctggtttggtgcagtggctgggcaaattaattttgggccaggatgggggtgggttgcagtgagggtagggaaaatgtcaggagtaggaaggttcgggggttaagggaagggaaggaagaccagaactggccatcctcttttataatccattagtagcaccatggctcatttgaaatgaaaatattacacttattccccacccaaccgcagtgaactttctaggtaattgttttgaaaacaatttttgtatctgtgaaagtctttgctttttctttccaccttctagaaaagtctgctaccagtttccttactgaatacagccatactcagcccctctygcatccagcccgtcagggtcagggtcagggtcaggctccctcaagacgagcaccgcattgtctgccctcttttgcgtaggatttttctctcagacccaggggacattgccttggacttttctctacaaatgccctcagatgtaagaccagaaatgattctgcttgtggaactcgtggctttctgtcctattttccttttatgtgagccctgcaggttgcctttggcgcccacaccagttctgtcttcatgtcgctgcatcgtgaagccccatttgcctttagtccctgctttgtgtgtcttcacttccacagccagtgttgcccctcagggcatactttgctggtgaacgggctgtagagtcttgagtatgttattggcctaagtgggcatgaggccccagcatccgactccatctgccaggctgcagggcacagcagcactggcatagacaggcacgctctgtcttccaacgtgcaccagccttttcttacatattttgcctgtttttaaaaaatacgaggagagggtgcagatggatactgtgccctcaccctcctaagccaggtaatatattgatgtgcagacttttaagaaatcttagtcttatcacaaatatcaagtaatttattttttccattttcaaatgcaaaagttagcctaggaagcctcccagtcatcctgaaggaccttttgactttgcttttataattctgttaaaaattgaggaggggattaatgagtacaatgaaaacaaaacaaaacaaaaaattaagaagaggaaagctcaaaagaggataagagactgaaaaggcacctcagaatggctgctgtgggcagagtctgtgacatgacttttccccgccctgcccctctgttcagagcagctggaaagatgggatcagtaagattaaaaaacttttgttcggccaggcgtggtggctcacacctgtaatcccagcactttgggaggctgaggcggacrgatcatgaggtcaggagttcaagaccagcctggccaatatggtgaaaccccgtctctactaaaaatacaaaaattagccgggtgttgtggctcaccctctattcccagctactcgggaggcagagacaggagaatcgcctgaacccaggaggcagaggttgcagtgagctgagatcgtgccactgcactccagcctgggtgacagagcgagactccatctcagaaaacaaacaaacaaaaagaaacttttgttcaagctgcatcttcacattgaatgaaagcattcagacgggtgactgctgctgtccacaactgtgggcggaagtgtgccttttcccagtttctcgtccaggaggttgcatagcaaatactcaagtcactgggatatatgctttccaaatgctggcccccatagcacctttccccatgtctttctaccaagcctcttatgtttaatctgtgcagggaagacaagagtagaccatattctctgtgtgctgtgcatgtcctggtgtcactcattgcctcttatctgtcgccattctaatataagtcagcttaatagttgactctgaataatgcaaaacccagcttgcttccagaatggcctaggaccctcctcctcctgccagtttttttttttttttttggttcatgtggcataatcatctttcaaaattaaccraatgccccagaaaatgatgttaccactaaaatattttctccaagaaggcatactgtaacagaaaagataggtaagatatttttttcccaagaagtaagaattgattgtgctgaatgttcaaactctggaaactgttcacagtatgttgttcttagctgttatttatataaagtgaattattttctctctcaatcatgccatagtggagacttttgtttgtgagtaagtgacagagtaatatgaaataatgtgatatgtcagagtgacatgcagcatcctgagcctgtttttatgttctgtgtacagtggcatttgattgagatcaaagcctgtcacagcctgctgctgggggtgtggggatatgccagagtcctgtgtttggttttagaagtttactgaatgtttcccacatggagaataatggatggcatgttagtttctttaagagtggtaaagttgtacatctgtcattgttgcatttcgaattgaacacatagatgcttgcctgtctgcttgggtgaatgcctctt

SEQ ID NO: 1986 - DNA, 11094 bp, Homo sapiens
gcacgagatctgcgcctcgcctccctcctcacgcgggcggattttcttaccttgtgaaaaaccgtctcagcggctgcccccgcctcctctgctggatgtgaaatggcggtcggcgaggcaatggttgcgtccgtgacatcatcatcatggcaacaagagctgcagcctgggaccgaggagcccgtgtgattcccggcggtggcggcagtggcggcagcaccagcaccgacgaaagctcgagggcttctctcctgcggccccttgccgggtgctcctgaggaggcggcggcagcagcgcctacaccgccccgcccgccgctcctcgaggtgcctctgtgtgaggggagggggccgtgccgagaaggggagggggcgccgccgccgctgcggagggagccgccgccgctgctgctgccgctgccgggtcgccagtgaagggaggcagtggcggcggcggcgaacatgttttcagtaaggatagtgactgcagactactacatggccagcccgctgcaggggctggatacctgccaatcccccctcacccaggcccctgtcaagaaggtgccggtggtgcgagtcttcggagcgaccccggcaggtcagaagacatgtcttcatctacatggcatctttccttacctctatgtgccatacgatggttatggacagcagccagaaagctatctttctcagatggcattcagtatcgacagagcacttaatgtggctttaggcaatccatcttccactgctcagcatgtgttcaaagtgtcattagtatcaggaatgcctttttatggttatcatgagaaggaaagacactttatgaagatctatctttacaatcctacaatggtgaaaaggatatgtgaacttttgcaaagcggagccataatgaataaattttaccagcctcatgaagcgcatattccctacctcctacagctcttcattgactacaatctttatggcatgaatttaataaatctggctgctgtcaagttccgaaaagcaagaaggaaaagtaatacattgcatgcaactggatcctgcaagaatcatttatcaggaaattctcttgctgatactttatttcggtgggaacaagatgaaataccaagctctttaatattggaaggtgttgaaccacagagtacatgtgaattasaagtggatgctgtagctgctgatatcttaaatcgtctggacattgaagctcaaattggtggaaaccctggtctacaggccatatgggaagatgaaaagcaacggcgaagaaacagaaatgaaacttctcaaatgagccaacctgagtcacaagatcacaggtttgtgccagcaacagaaagtgaaaaaaaatttcagaagagacttcaggaaattctcaaacagaatgatttctctgtaacattatcaggatctgtggactacagcgatggatcccaggagttctctgctgagttaacattgcactctgaggttctgtctcctgaaatgcttcagtgtacaccagccaatatggtagaagttcacaaagacaaagagtcaagcaaaggtcacactagacacaaagtggaagaagctcttattaatgaagaagcaattttgaaccttatggaaaatagtcagacttttcagcctttgacccaaagactgagtgagtcacctgttttcatggacagtagtcctgatgaggctctggtacatcttcttgctggtttggaaagtgatggatatcggggggaaagaaataggatgccatcaccatgtcgctcctttggaaataataaatatccacaaaatagtgatgatgaagaaaatgaaccacagattgaaaaagaggaaatggagcttagtttggtgatgtcccagagatgggacagcaatattgaagaacattgtgccaaaaagagatcactgtgcagaaatacccacagaagttcaactgaagatgatgactcatcttcaggagaagaaatggaatggagtgataacagtttgcttctagccagtctttctatacctcagttagatggaactgcagatgaaaatagtgacaatccattgaacaatgaaaattctagaacccactcttctgtaattgcaacaagcaagctttcagttaaaccctccatctttcacaaagatgctgctacattagaaccctcatcttctgctaagattacctttcagtgtaaacacacaagtgccctttcttcccatgttttgaacaaggaagatttaattgaagacctttcacagacaaacaaaaatacagaaaaaggtctagataactcagtcacttcttttacaaacgaaagcacttattctatgaaataccctggatctttaagcagtactgttcattcagaaaattctcataaagagaatagtaagaaagagatcctcccagtatcttcctgtgaaagtagtatttttgattatgaagaagatattccatctgttacaagacaagtaccaagtagaaaatatacaaacattagaaaaatcgaaaaggattccccttttatacatatgcaccgtcaccctaacgagaatacattgggcaaaaattctttcaacttttctgacttaaatcattcaaaaaataaagtatcctctgaaggaaatgaaaaaggaaacagcacagctctgagtagtttattcccttcatcatttactgaaaattgtgaattactgtcatgctcaggggagaatagaactatggtgcattctcttaatagcactgctgatgaaagtggactaaataaacttaaaattaggtatgaagaatttcaagaacataaaacagaaaagccaagcctcagccagcaagcagcacactatatgttttttcccagtgttgttctttctaactgtcttactagaccacagaaactatctcctgtcacatataaattacaacctggcaataaaccatcccggttaaaattgaataaaaggaaacttgcaggtcatcaggagacttctaccaaaagtagtgagactggatccacaaaagataattttatacaaaataatccttgtaatagtaatcctgagaaggataatgcattggctagtgatttaactaaaaccactcgtggagcttttgaaaataaaacacccacagatggttttatagactgtcactttggagatggracgttagaaactgagcagtcctttggactatatggaaataaatacacacttagagccaaacgcaaggtaaattatgagactgaagacagtgagtcaagttttgtaactcacaactcaaaaattagtctacctcatcccatggaaattggtgaaagtttagatggaactctcaaatcccgaaaacgaagaaaaatgtctaaaaagctgccccctgtcatcataaagtatattattattaatagatttagagggagaaaaaatatgcttgtgaagctaggaaaaatagactctaaagaaaaacaagtaatattaacagaagaaaaaatggaactatataaaaagcttgcacctttgaaggacttttggccaaaagttccygactcccctgcaaccaaatatcccatttatccactaacaccaaagaaaagtcacagaagaaagtcaaaacataaatctgctaagaaaaaaactggtaaacaacaaaggacaaataatgaaaatattaaaagaactttgtctttcaggaaaaaacggtcacatgctattctttctcctccctcaccatcttacaatgctgaaaccgaagattgtgacytgaattatagtgatgttatgtctaaactaggttttctttctgagagaagcacaagtcccataaattcttctccacctcgctgctggtctcccacagatccaagagctgaagaaatcatggctgctgcagaaaaagaggcaatgctttttaagggtcctaatgtatrtaagaagactgttaattctcgtataggaaaaactagtcgcgcaagagcacagattaagaaatcaaaagcaaagcttgctaatccctctatagttactaagaaaaggaacaaacgaaatcagacaaataaactagtagatgatggaaaaaagaaaccaagagcaaaacaaaaaacaaatgagaaaggtacatcgagaaagcatayaacacttaaggatgaaaaaataaaatctcagtctggtgctgaggttaagtttgtactgaaacaccagaatgtgtctgaatttgcaagtagttctggaggctctcaactactttttaaacagaaagatatgccactaatgggctctgctgtagatcatcccctttctgcttccctacccactggaattaatgcacaacagaagttatctggctgcttttcttctttcttagaaascaagaagtctgtagatttgcakacattccccagttcacgagatgatttgcatccatcagttgtttgtaattctataggacctggagtctcaaaaattaatgttcaaaggcctcataatcaaagtgctatgtttactctaaaggaatcaacgttaattcaaaaaaatatatttgacctttccaatcatttatctcaggtagcacagaatacacagatatcttctggtatgtcctcaaagatagaagataatgcaaataatatacaaagaaactatttgtcatcaatcggaaagttaagtgaatatcgcaattccctagaatcaaagctggaccaagcatatacccctaattttttgcattgcaaagacagtcagcagcagattgtrtgcatagcggaacagtcaaagcacagtgaaacttgttctccgggaaatacagcttcagaggaaagccaaatgcctaataattgctttgtaacttccttgagaagtccaatcaaacaaatagcatgggagcaaaagcaaaggggctttattttagatatgtcaaattttaaacctgaaagagtaaaaccgaggtcrttatcagaagcaatttcacaaaccaaagcactttctcagtgtaaaaatcgaaatgtgtcaacaccttcagcatttggtgaaggacagtctggactggcagttctaaaagaattgttacaaaaaagacagcagraagcacaaaatgcaaatactacacaagacccrttatccaataaacatcaaccaaataaaaatatttctggttcccttgagcataacaaagcaaataaacggacacgatcggtaacgtccccaagaaaacctcgaactcccagaagtacaaaacaaaaagaaaaaatccccaaacttctcaaagtagactctttaaatttacaaaactctagccagttggataactctgtatcagatgatagtcccatctttttttcagatccaggctttgaaagttgttactcacttgaagatagtttatctcctgaacataattataattttgatattaacacaataggtcagactggattttgtagcttttattctggaagtcagtttgtcccagctgatcagaatttgcctcagaagttcctaagtgatgctgttcaggatctttttccaggacaagctatagaaaaaaatgagtttttaagtcatgacaaccagaaatgtgatgaagacaagcatcataccacagactcagcctcatggattagatctggtactttaagtcctgaaatttttgagaagtcaaccatagatagcaatgagaatcgtcgccacaaccagtggaaaaatagctttcatcctctaacaactcggtctaactcaataatggattctttctgtgttcagcaggcagaagactgtctaagtgaaaaatctagattgaataggagttcagtaagcaaagaagtgtttcttagcctcycacagccaaacaattcagactggattcaaggtcacaccagaaaagaaatgggacagtctcttgactcagccaatacctcttttactgcaatactctcctcccctgatggtgaacttgtagacgtggcctgtgaagatttagaactgtatgtttcaagaaacaatgatatgttgacaccaactcctgatagttcaccaagatctactagctctccttcacaatctaaaaatggcagcttcacccctcgaactgctaacattctgaaaccacttatgtcccccccaagtagggaagaaattatggcaactttgttggatcatgacctgtctgagactatttaccaggaaccattttgcagtaatccttctgatgtaccagaaaagcccagggagattsgtggacggctcctcatggtagaaactcgacttgcaaatgatctggctgagtttgagggagacttttccttggaaggacttcgtctttggaaaacagcattctcagcaatgactcagaatccaaggccagggtcaccccttcrcagtggccaaggagttgtcaataaagggtcaagtaatagccctaagatggttgaagataaaaaaattgtgattatgccttgcaaatgtgccccaagtcgacaactggttcaagtgtggcttcaagccaaagaagaatacgaacgttccaagaaaytgcctaaaaccaagccaactggagttgtaaaatctgctgagaactttagctcttcagttaacccagatgacaaacctgtagtgcctccaaaaatggatgtaagtccatgtatactccccactacagcacataccaaggaggatgttgataattctcagattgctttacaagcaccaaccacgggatgtagtcaaactgcaagtgaaagtcagatgctgccaccagttgcctctgcaagtgatccygaaaaagatgaagatgatgatgataactattacattagttatagctcccctgattctccagtaattcccccttggcaacaaccaatatccccagattccaaagcattaaatggagatgatagaccctcatcaccagtagaggagctgccttcattggcttttgagaacttcttaaagccaataaaagatggtatacaaaaaagcccctgcagtgagcctcaagagcctctagtgatatctccaattaatactagggcaagaactgggaaatgtgaatcactttgctttcatagtacaccaatcatacagagaaaacttctggaaaggcttcctgaagcacctggccttagcccattatcaacagaaccaaaaacacagaagttgagtaataagaaaggaagtaatactgacactcttagaagagtactgttaacacaagcaaagaatcaatttgcagcagtaaataccccacagaaagaaacttctcagattgatggaccatctttaaacaatacttacggtttcaaagtcagcatacaaaacttacaggaggcaaaagctttacatgagatacaaaatcttaccctaatcagtgtggagttgcatgctcgaactagacgagacttagaaccggatcctgaatttgacccaatctgtgctctgttctactgcatctcatctgacactccactgccagatacagaaaaaacagaactcacaggtgtaatagtgattgataaagacaagacagttttcagtcaagatatcagatatcagactccattacttattagatctggaattacaggactcgaagtcacctatgctgctgatgagaaggcactttttcatgaaattgcaaatataataaagaggtatgatcctgatattctgctaggatatgagattcagatgcattcctggggttacctcttacaaagggctgccgctttaagtattgacttatgtcggatgatctctcgggtgccagatgacaaaattgagaacagatttgcagctgaaagagatgagtatggatcatatacaatgagtgagataaatattgttggccgaattacactaaatctttggagaatcatgagaaatgaggtggctctaactaactacacctttgaaaatgtgagctttcatgttcttcatcagcgttttcccctctttacctttcgagtcttgtcagactggtttgataacaagacagatctatacagatggaaaatggttgatcattatgttagccgtgtccgtggaaatctccaaatgttagaacagctggacctgattgggaaaaccagtgagatggctagactttttggcattcagtttttacatgtactgacaaggggttcacagtaccgtgtggaatcaatgatgttgcgtattgctaaaccaatgaactatattcctgtgacacctagtgttcagcaaagatcccagatgagagccccacagtgtgttcctctaattatggagcctgaatcccgcttctatagcaactctgttctcgttttggatttccaatcactttatccttctattgtgattgcatataactactgcttttccacctgccttggccatgtggagaacttgggaaagtatgatgagttcaaatttggctgtacctctctgagagtacctccagatttactttaccaagttaggcatgatatcacagtgtcccccaatggagtagcttttgtcaagccttcagtaagaaaaggtgtactaccaagaatgcttgaagaaattttgaagactagatttatggtgaagcagtcaatgaaggcttacaagcaagacagagccctgtcacgaatgcttgatgcgcgtcagttgggacttaagctgatagcaaatgtcacatttggctatacatctgctaatttttctgggagaatgccatgcattgaggttggcgatagtattgttcacaaagccagagagaccttggaacgagctattaaactggtgaatgataccaagaaatggggggctagggttgtatatggcgatactgacagtatgtttgtgctactgaaaggagccactaaggagcagtcttttaagattggtcaggaaattgccgaagctgtaactgctaccaatcctaaaccagtgaaattgaagtttgaaaaggtatatttgccctgtgttttacaaacaaaaaagaggtatgtgggttacatgtatgaaacactggatcagaaggacccagtatttgatgcaaaaggaatagaaacagtcagaagagattcctgccctgctgtttctaagatacttgagcgttctctaaagctgctatttgaaacgagagatataagtctaattaaacagtatgttcagcgacaatgtatgaagcttctggaaggaaaggccagcatacaagactttatctttgccaaggaatacagaggaagtttttcttataaaccaggagcttgtgtgccagcccttgaacttacaaggaaaatgctgacttatgaccggcgctctgagcctcaggttggggagcgagtgccatacgtcatcatttatgggacccccggagtaccacttatccagcttgtaaggcgcccagtggaagtcctgcaggacccaactctgagactgaatgctacttactatattaccaagcaaatccttccacccttggcaagaatcttctcacttattggtattgatgtcttcagctggtatcatgaattaccaaggatccataaagctaccagctcctcgcgaagtgaacctgaagggcggaaaggcactatttcacaataytttactaccttacactgtcctgtgtgtgatgacctaactcagcatggcatctgtagtaaatgtcggagccaacctcagcatrttgcagtcatcctcaaccaagaaatccgsgagttggaacgtcaacaggagcaacttgtaaagatatgcaagaactgtacaggttgctttgatcgacacatcccatgtgtttctctgaactgcccagtacttttcaaactctcccgagtaaatagagaattgtccaaggcaccatatctccggcagttattagaccagttttaaattgtcaatatcacagtattacaggtgctatttttttcagtgcttaccactaaactgttgtgcatggtgctttttaactttcatcgagtcaaggatgttcactgtctgttatctgaagactatgaagacttctatgctaaccgaattaaaatgtacttgttgatctctgaatagctcacttcttacaatgtacaaattcctcattctgtcaccttttaaacattgttttataatgcaggtgttggatttgctccagtatgtgtaccatcttgtaaattcatttgagtagatcatgtttacttcccagtggaaggagcactgaaaacctcttaaagaaaaagcatttgtgtgttttccttgaactgtctgtatcaagacgtgttacttcgagatatccattcactttataattttgactgcaaaatattttgtaaatacacttttttacttttcaaacgagyaaaataatgtgcaatgatttttatacaaatgattttcaagttgtttggtatatttcctctaggttttgcttgactcaaagtagatcgttattttgatcaaactgtgcaaacagtagtaccacgtgtagcattttgaaacattawtttttaaaaaatgctgtcttgctttagctattaatggggcattgtgaggaactgtgcaaagacatttttgttacaaacctgtgggcctgttgcaatactttaaaaataaaaaattttattccatttgcttgttttgtatagacatttctattgcttctaaatatacttaaaatattttctttccttatgtactgtacagttaatcttatttgccatcatcttgaacacaaaatgtgtatttagaatatttgtataactgtgtaaaataaaaaaggaattatgtggtcagtgcattgttttttaaactggaaatcatkttgttttaaaagttaataatggaaaccatattaaaattgaataaaatataaaataatatagcagtgtgacttcatcttttttataagcctgyattggttacatctttyttaccctacccttttytgagttttaatgaagtaaattatttaacatatttttatatcctgtttgawattgcaatttccttaccaaaacttyttcagggttaaaamamaaaaaaaaaaawaaaaaaagggcagcaaaaatgggaaaatttaatttagcactcatccttttagagakttttaagagtgtacttgttagtagatcttcagtg

SEQ ID NO: 1987 - DNA, 11248 bp, Homo sapiens
aggccgaagcccgcgcccgcgcgcccccacccttcgcaccgcccccgggccacgcgcggagccgcggcgttacctgagaagggccggctgcgtccgcacccggccccgcccgttccgccgcccgcccgcccttccctcccgcgaggccgcagcggcacgagatctgcgcctcgcctccctcctcacgcgggcggattttcttaccttgtgaaaaaccgtctcagcggctgcccccgcctcctctgctggatgtgaaatggcggtcggcgaggcaatggttgcgtccgtgacatcatcatcatggcaacaagagctgcagcctgggaccgaggagcccgtgtgattcccggcggtggcggcagtggcggcagcaccagcaccgacgaaagctcgagggcttctctcctgcggccccttgccgggtgctcctgaggaggcggcggcagcagcgcctacaccgccccgcccgccgctcctcgaggtgcctctgtgtgaggggagggggccgtgccgagaaggggagggggcgccgccgccgctgcggagggagccgccgccgctgctgctgccgctgccgggtcgccagtgaagggaggcagtggcggcggcggcgaacatgttttcagtaaggatagtgactgcagactactacatggccagcccgctgcaggggctggatacctgccaatcccccctcacccaggcccctgtcaagaaggtgccggtggtgcgagtcttcggagcgaccccggcaggtcagaagacatgtcttcatctacatggcatctttccttacctctatgtgccatacgatggttatggacagcagccagaaagctatctttctcagatggcattcagtatcgacagagcacttaatgtggctttaggcaatccatcttccactgctcagcatgtgttcaaagtgtcattagtatcaggaatgcctttttatggttatcatgagaaggaaagacactttatgaagatctatctttacaatcctacaatggtgaaaaggatatgtgaacttttgcaaagcggagccataatgaataaattttaccagcctcatgaagcgcatattccctacctcctacagctcttcattgactacaatctttatggcatgaatttaataaatctggctgctgtcaagttccgaaaagcaagaaggaaaagtaatacattgcatgcaactggatcctgcaagaatcatttatcaggaaattctcttgctgatactttatttcggtgggaacaagatgaaataccaagctctttaatattggaaggtgttgaaccacagagtacatgtgaattasaagtggatgctgtagctgctgatatcttaaatcgtctggacattgaagctcaaattggtggaaaccctggtctacaggccatatgggaagatgaaaagcaacggcgaagaaacagaaatgaaacttctcaaatgagccaacctgagtcacaagatcacaggtttgtgccagcaacagaaagtgaaaaaaaatttcagaagagacttcaggaaattctcaaacagaatgatttctctgtaacattatcaggatctgtggactacagcgatggatcccaggagttctctgctgagttaacattgcactctgaggttctgtctcctgaaatgcttcagtgtacaccagccaatatggtagaagttcacaaagacaaagagtcaagcaaaggtcacactagacacaaagtggaagaagctcttattaatgaagaagcaattttgaaccttatggaaaatagtcagacttttcagcctttgacccaaagactgagtgagtcacctgttttcatggacagtagtcctgatgaggctctggtacatcttcttgctggtttggaaagtgatggatatcggggggaaagaaataggatgccatcaccatgtcgctcctttggaaataataaatatccacaaaatagtgatgatgaagaaaatgaaccacagattgaaaaagaggaaatggagcttagtttggtgatgtcccagagatgggacagcaatattgaagaacattgtgccaaaaagagatcactgtgcagaaatacccacagaagttcaactgaagatgatgactcatcttcaggagaagaaatggaatggagtgataacagtttgcttctagccagtctttctatacctcagttagatggaactgcagatgaaaatagtgacaatccattgaacaatgaaaattctagaacccactcttctgtaattgcaacaagcaagctttcagttaaaccctccatctttcacaaagatgctgctacattagaaccctcatcttctgctaagattacctttcagtgtaaacacacaagtgccctttcttcccatgttttgaacaaggaagatttaattgaagacctttcacagacaaacaaaaatacagaaaaaggtctagataactcagtcacttcttttacaaacgaaagcacttattctatgaaataccctggatctttaagcagtactgttcattcagaaaattctcataaagagaatagtaagaaagagatcctcccagtatcttcctgtgaaagtagtatttttgattatgaagaagatattccatctgttacaagacaagtaccaagtagaaaatatacaaacattagaaaaatcgaaaaggattccccttttatacatatgcaccgtcaccctaacgagaatacattgggcaaaaattctttcaacttttctgacttaaatcattcaaaaaataaagtatcctctgaaggaaatgaaaaaggaaacagcacagctctgagtagtttattcccttcatcatttactgaaaattgtgaattactgtcatgctcaggggagaatagaactatggtgcattctcttaatagcactgctgatgaaagtggactaaataaacttaaaattaggtatgaagaatttcaagaacataaaacagaaaagccaagcctcagccagcaagcagcacactatatgttttttcccagtgttgttctttctaactgtcttactagaccacagaaactatctcctgtcacatataaattacaacctggcaataaaccatcccggttaaaattgaataaaaggaaacttgcaggtcatcaggagacttctaccaaaagtagtgagactggatccacaaaagataattttatacaaaataatccttgtaatagtaatcctgagaaggataatgcattggctagtgatttaactaaaaccactcgtggagcttttgaaaataaaacacccacagatggttttatagactgtcactttggagatggracgttagaaactgagcagtcctttggactatatggaaataaatacacacttagagccaaacgcaaggtaaattatgagactgaagacagtgagtcaagttttgtaactcacaactcaaaaattagtctacctcatcccatggaaattggtgaaagtttagatggaactctcaaatcccgaaaacgaagaaaaatgtctaaaaagctgccccctgtcatcataaagtatattattattaatagatttagagggagaaaaaatatgcttgtgaagctaggaaaaatagactctaaagaaaaacaagtaatattaacagaagaaaaaatggaactatataaaaagcttgcacctttgaaggacttttggccaaaagttccygactcccctgcaaccaaatatcccatttatccactaacaccaaagaaaagtcacagaagaaagtcaaaacataaatctgctaagaaaaaaactggtaaacaacaaaggacaaataatgaaaatattaaaagaactttgtctttcaggaaaaaacggtcacatgctattctttctcctccctcaccatcttacaatgctgaaaccgaagattgtgacytgaattatagtgatgttatgtctaaactaggttttctttctgagagaagcacaagtcccataaattcttctccacctcgctgctggtctcccacagatccaagagctgaagaaatcatggctgctgcagaaaaagaggcaatgctttttaagggtcctaatgtatrtaagaagactgttaattctcgtataggaaaaactagtcgcgcaagagcacagattaagaaatcaaaagcaaagcttgctaatccctctatagttactaagaaaaggaacaaacgaaatcagacaaataaactagtagatgatggaaaaaagaaaccaagagcaaaacaaaaaacaaatgagaaaggtacatcgagaaagcatayaacacttaaggatgaaaaaataaaatctcagtctggtgctgaggttaagtttgtactgaaacaccagaatgtgtctgaatttgcaagtagttctggaggctctcaactactttttaaacagaaagatatgccactaatgggctctgctgtagatcatcccctttctgcttccctacccactggaattaatgcacaacagaagttatctggctgcttttcttctttcttagaaascaagaagtctgtagatttgcakacattccccagttcacgagatgatttgcatccatcagttgtttgtaattctataggacctggagtctcaaaaattaatgttcaaaggcctcataatcaaagtgctatgtttactctaaaggaatcaacgttaattcaaaaaaatatatttgacctttccaatcatttatctcaggtagcacagaatacacagatatcttctggtatgtcctcaaagatagaagataatgcaaataatatacaaagaaactatttgtcatcaatcggaaagttaagtgaatatcgcaattccctagaatcaaagctggaccaagcatatacccctaattttttgcattgcaaagacagtcagcagcagattgtrtgcatagcggaacagtcaaagcacagtgaaacttgttctccgggaaatacagcttcagaggaaagccaaatgcctaataattgctttgtaacttccttgagaagtccaatcaaacaaatagcatgggagcaaaagcaaaggggctttattttagatatgtcaaattttaaacctgaaagagtaaaaccgaggtcrttatcagaagcaatttcacaaaccaaagcactttctcagtgtaaaaatcgaaatgtgtcaacaccttcagcatttggtgaaggacagtctggactggcagttctaaaagaattgttacaaaaaagacagcagraagcacaaaatgcaaatactacacaagacccrttatccaataaacatcaaccaaataaaaatatttctggttcccttgagcataacaaagcaaataaacggacacgatcggtaacgtccccaagaaaacctcgaactcccagaagtacaaaacaaaaagaaaaaatccccaaacttctcaaagtagactctttaaatttacaaaactctagccagttggataactctgtatcagatgatagtcccatctttttttcagatccaggctttgaaagttgttactcacttgaagatagtttatctcctgaacataattataattttgatattaacacaataggtcagactggattttgtagcttttattctggaagtcagtttgtcccagctgatcagaatttgcctcagaagttcctaagtgatgctgttcaggatctttttccaggacaagctatagaaaaaaatgagtttttaagtcatgacaaccagaaatgtgatgaagacaagcatcataccacagactcagcctcatggattagatctggtactttaagtcctgaaatttttgagaagtcaaccatagatagcaatgagaatcgtcgccacaaccagtggaaaaatagctttcatcctctaacaactcggtctaactcaataatggattctttctgtgttcagcaggcagaagactgtctaagtgaaaaatctagattgaataggagttcagtaagcaaagaagtgtttcttagcctcycacagccaaacaattcagactggattcaaggtcacaccagaaaagaaatgggacagtctcttgactcagccaatacctcttttactgcaatactctcctcccctgatggtgaacttgtagacgtggcctgtgaagatttagaactgtatgtttcaagaaacaatgatatgttgacaccaactcctgatagttcaccaagatctactagctctccttcacaatctaaaaatggcagcttcacccctcgaactgctaacattctgaaaccacttatgtcccccccaagtagggaagaaattatggcaactttgttggatcatgacctgtctgagactatttaccaggaaccattttgcagtaatccttctgatgtaccagaaaagcccagggagattsgtggacggctcctcatggtagaaactcgacttgcaaatgatctggctgagtttgagggagacttttccttggaaggacttcgtctttggaaaacagcattctcagcaatgactcagaatccaaggccagggtcaccccttcrcagtggccaaggagttgtcaataaagggtcaagtaatagccctaagatggttgaagataaaaaaattgtgattatgccttgcaaatgtgccccaagtcgacaactggttcaagtgtggcttcaagccaaagaagaatacgaacgttccaagaaaytgcctaaaaccaagccaactggagttgtaaaatctgctgagaactttagctcttcagttaacccagatgacaaacctgtagtgcctccaaaaatggatgtaagtccatgtatactccccactacagcacataccaaggaggatgttgataattctcagattgctttacaagcaccaaccacgggatgtagtcaaactgcaagtgaaagtcagatgctgccaccagttgcctctgcaagtgatccygaaaaagatgaagatgatgatgataactattacattagttatagctcccctgattctccagtaattcccccttggcaacaaccaatatccccagattccaaagcattaaatggagatgatagaccctcatcaccagtagaggagctgccttcattggcttttgagaacttcttaaagccaataaaagatggtatacaaaaaagcccctgcagtgagcctcaagagcctctagtgatatctccaattaatactagggcaagaactgggaaatgtgaatcactttgctttcatagtacaccaatcatacagagaaaacttctggaaaggcttcctgaagcacctggccttagcccattatcaacagaaccaaaaacacagaagttgagtaataagaaaggaagtaatactgacactcttagaagagtactgttaacacaagcaaagaatcaatttgcagcagtaaataccccacagaaagaaacttctcagattgatggaccatctttaaacaatacttacggtttcaaagtcagcatacaaaacttacaggaggcaaaagctttacatgagatacaaaatcttaccctaatcagtgtggagttgcatgctcgaactagacgagacttagaaccggatcctgaatttgacccaatctgtgctctgttctactgcatctcatctgacactccactgccagatacagaaaaaacagaactcacaggtgtaatagtgattgataaagacaagacagttttcagtcaagatatcagatatcagactccattacttattagatctggaattacaggactcgaagtcacctatgctgctgatgagaaggcactttttcatgaaattgcaaatataataaagaggtatgatcctgatattctgctaggatatgagattcagatgcattcctggggttacctcttacaaagggctgccgctttaagtattgacttatgtcggatgatctctcgggtgccagatgacaaaattgagaacagatttgcagctgaaagagatgagtatggatcatatacaatgagtgagataaatattgttggccgaattacactaaatctttggagaatcatgagaaatgaggtggctctaactaactacacctttgaaaatgtgagctttcatgttcttcatcagcgttttcccctctttacctttcgagtcttgtcagactggtttgataacaagacagatctatacagatggaaaatggttgatcattatgttagccgtgtccgtggaaatctccaaatgttagaacagctggacctgattgggaaaaccagtgagatggctagactttttggcattcagtttttacatgtactgacaaggggttcacagtaccgtgtggaatcaatgatgttgcgtattgctaaaccaatgaactatattcctgtgacacctagtgttcagcaaagatcccagatgagagccccacagtgtgttcctctaattatggagcctgaatcccgcttctatagcaactctgttctcgttttggatttccaatcactttatccttctattgtgattgcatataactactgcttttccacctgccttggccatgtggagaacttgggaaagtatgatgagttcaaatttggctgtacctctctgagagtacctccagatttactttaccaagttaggcatgatatcacagtgtcccccaatggagtagcttttgtcaagccttcagtaagaaaaggtgtactaccaagaatgcttgaagaaattttgaagactagatttatggtgaagcagtcaatgaaggcttacaagcaagacagagccctgtcacgaatgcttgatgcgcgtcagttgggacttaagctgatagcaaatgtcacatttggctatacatctgctaatttttctgggagaatgccatgcattgaggttggcgatagtattgttcacaaagccagagagaccttggaacgagctattaaactggtgaatgataccaagaaatggggggctagggttgtatatggcgatactgacagtatgtttgtgctactgaaaggagccactaaggagcagtcttttaagattggtcaggaaattgccgaagctgtaactgctaccaatcctaaaccagtgaaattgaagtttgaaaaggtatatttgccctgtgttttacaaacaaaaaagaggtatgtgggttacatgtatgaaacactggatcagaaggacccagtatttgatgcaaaaggaatagaaacagtcagaagagattcctgccctgctgtttctaagatacttgagcgttctctaaagctgctatttgaaacgagagatataagtctaattaaacagtatgttcagcgacaatgtatgaagcttctggaaggaaaggccagcatacaagactttatctttgccaaggaatacagaggaagtttttcttataaaccaggagcttgtgtgccagcccttgaacttacaaggaaaatgctgacttatgaccggcgctctgagcctcaggttggggagcgagtgccatacgtcatcatttatgggacccccggagtaccacttatccagcttgtaaggcgcccagtggaagtcctgcaggacccaactctgagactgaatgctacttactatattaccaagcaaatccttccacccttggcaagaatcttctcacttattggtattgatgtcttcagctggtatcatgaattaccaaggatccataaagctaccagctcctcgcgaagtgaacctgaagggcggaaaggcactatttcacaataytttactaccttacactgtcctgtgtgtgatgacctaactcagcatggcatctgtagtaaatgtcggagccaacctcagcatrttgcagtcatcctcaaccaagaaatccgsgagttggaacgtcaacaggagcaacttgtaaagatatgcaagaactgtacaggttgctttgatcgacacatcccatgtgtttctctgaactgcccagtacttttcaaactctcccgagtaaatagagaattgtccaaggcaccatatctccggcagttattagaccagttttaaattgtcaatatcacagtattacaggtgctatttttttcagtgcttaccactaaactgttgtgcatggtgctttttaactttcatcgagtcaaggatgttcactgtctgttatctgaagactatgaagacttctatgctaaccgaattaaaatgtacttgttgatctctgaatagctcacttcttacaatgtacaaattcctcattctgtcaccttttaaacattgttttataatgcaggtgttggatttgctccagtatgtgtaccatcttgtaaattcatttgagtagatcatgtttacttcccagtggaaggagcactgaaaacctcttaaagaaaaagcatttgtgtgttttccttgaactgtctgtatcaagacgtgttacttcgagatatccattcactttataattttgactgcaaaatattttgtaaatacacttttttacttttcaaacgagyaaaataatgtgcaatgatttttatacaaatgattttcaagttgtttggtatatttcctctaggttttgcttgactcaaagtagatcgttattttgatcaaactgtgcaaacagtagtaccacgtgtagcattttgaaacattawtttttaaaaaatgctgtcttgctttagctattaatggggcattgtgaggaactgtgcaaagacatttttgttacaaacctgtgggcctgttgcaatactttaaaaataaaaaattttattccatttgcttgttttgtatagacatttctattgcttctaaatatacttaaaatattttctttccttatgtactgtacagttaatcttatttgccatcatcttgaacacaaaatgtgtatttagaatatttgtataactgtgtaaaataaaaaaggaattatgtggtcagtgcattgttttttaaactggaaatcatkttgttttaaaagttaataatggaaaccatattaaaattgaataaaatataaaataatatagcagtgtgacttcatcttttttataagcctgyattggttacatctttyttaccctacccttttytgagttttaatgaagtaaattatttaacatatttttatatcctgtttgawattgcaatttccttaccaaaacttyttcagggttaaaamamaaaaaaaaaaawaaaaaaagggcagcaaaaatgggaaaatttaatttagcactcatccttttagagakttttaagagtgtacttgttagtagatcttcagtg

SEQ ID NO: 1988 - DNA, 11372 bp, Homo sapiens
aggccgaagcccgcgcccgcgcgcccccacccttcgcaccgcccccgggccacgcgcggagccgcggcgttacctgagaagggccggctgcgtccgcacccggccccgcccgttccgccgcccgcccgcccttccctcccgcgaggccgcagcggcacgagatctgcgcctcgcctccctcctcacgcgggcggattttcttaccttgtgaaaaaccgtctcagcggctgcccccgcctcctctgctggatgtgaaatggcggtcggcgagtggttgcgtccgtgacatcatcatcatggcaacaagagctgcagcctgggaccgaggagcccgtgtgattcccggcggtggcggcagtggcggcagcaccagcaccgacgaaagctcgagggcttctctcctgcggccccttgccgggtgctcctgaggaggcggcggcagcagcgcctacaccgccccgcccgccgctcctcgaggtgcctctgtgtgaggggagggggccgtgccgagaaggggagggggcgccgccgccgctgcggagggagccgccgccgctgctgctgccgctgccgggtcgccagtgaagggaggcagtggcggcggcggcgaacatgttttcagtaaggatagtgactgcagactactacatggccagcccgctgcaggggctggatacctgccaatcccccctcacccaggcccctgtcaagaaggtgccggtggtgcgagtcttcggagcgaccccggcagaataaaacccaagacaagccacataaaagcaacctaaaaattaaactgtcatcatattatttgttttaaaactatggaataatatatctgaggaagatttctctcaaaattgtttttctcaatttcaagtcagaagacatgtcttcatctacatggcatctttccttacctctatgtgccatacgatggttatggacagcagccagaaagctatctttctcagatggcattcagtatcgacagagcacttaatgtggctttaggcaatccatcttccactgctcagcatgtgttcaaagtgtcattagtatcaggaatgcctttttatggttatcatgagaaggaaagacactttatgaagatctatctttacaatcctacaatggtgaaaaggatatgtgaacttttgcaaagcggagccataatgaataaattttaccagcctcatgaagcgcatattccctacctcctacagctcttcattgactacaatctttatggcatgaatttaataaatctggctgctgtcaagttccgaaaagcaagaaggaaaagtaatacattgcatgcaactggatcctgcaagaatcatttatcaggaaattctcttgctgatactttatttcggtgggaacaagatgaaataccaagctctttaatattggaaggtgttgaaccacagagtacatgtgaattasaagtggatgctgtagctgctgatatcttaaatcgtctggacattgaagctcaaattggtggaaaccctggtctacaggccatatgggaagatgaaaagcaacggcgaagaaacagaaatgaaacttctcaaatgagccaacctgagtcacaagatcacaggtttgtgccagcaacagaaagtgaaaaaaaatttcagaagagacttcaggaaattctcaaacagaatgatttctctgtaacattatcaggatctgtggactacagcgatggatcccaggagttctctgctgagttaacattgcactctgaggttctgtctcctgaaatgcttcagtgtacaccagccaatatggtagaagttcacaaagacaaagagtcaagcaaaggtcacactagacacaaagtggaagaagctcttattaatgaagaagcaattttgaaccttatggaaaatagtcagacttttcagcctttgacccaaagactgagtgagtcacctgttttcatggacagtagtcctgatgaggctctggtacatcttcttgctggtttggaaagtgatggatatcggggggaaagaaataggatgccatcaccatgtcgctcctttggaaataataaatatccacaaaatagtgatgatgaagaaaatgaaccacagattgaaaaagaggaaatggagcttagtttggtgatgtcccagagatgggacagcaatattgaagaacattgtgccaaaaagagatcactgtgcagaaatacccacagaagttcaactgaagatgatgactcatcttcaggagaagaaatggaatggagtgataacagtttgcttctagccagtctttctatacctcagttagatggaactgcagatgaaaatagtgacaatccattgaacaatgaaaattctagaacccactcttctgtaattgcaacaagcaagctttcagttaaaccctccatctttcacaaagatgctgctacattagaaccctcatcttctgctaagattacctttcagtgtaaacacacaagtgccctttcttcccatgttttgaacaaggaagatttaattgaagacctttcacagacaaacaaaaatacagaaaaaggtctagataactcagtcacttcttttacaaacgaaagcacttattctatgaaataccctggatctttaagcagtactgttcattcagaaaattctcataaagagaatagtaagaaagagatcctcccagtatcttcctgtgaaagtagtatttttgattatgaagaagatattccatctgttacaagacaagtaccaagtagaaaatatacaaacattagaaaaatcgaaaaggattccccttttatacatatgcaccgtcaccctaacgagaatacattgggcaaaaattctttcaacttttctgacttaaatcattcaaaaaataaagtatcctctgaaggaaatgaaaaaggaaacagcacagctctgagtagtttattcccttcatcatttactgaaaattgtgaattactgtcatgctcaggggagaatagaactatggtgcattctcttaatagcactgctgatgaaagtggactaaataaacttaaaattaggtatgaagaatttcaagaacataaaacagaaaagccaagcctcagccagcaagcagcacactatatgttttttcccagtgttgttctttctaactgtcttactagaccacagaaactatctcctgtcacatataaattacaacctggcaataaaccatcccggttaaaattgaataaaaggaaacttgcaggtcatcaggagacttctaccaaaagtagtgagactggatccacaaaagataattttatacaaaataatccttgtaatagtaatcctgagaaggataatgcattggctagtgatttaactaaaaccactcgtggagcttttgaaaataaaacacccacagatggttttatagactgtcactttggagatggracgttagaaactgagcagtcctttggactatatggaaataaatacacacttagagccaaacgcaaggtaaattatgagactgaagacagtgagtcaagttttgtaactcacaactcaaaaattagtctacctcatcccatggaaattggtgaaagtttagatggaactctcaaatcccgaaaacgaagaaaaatgtctaaaaagctgccccctgtcatcataaagtatattattattaatagatttagagggagaaaaaatatgcttgtgaagctaggaaaaatagactctaaagaaaaacaagtaatattaacagaagaaaaaatggaactatataaaaagcttgcacctttgaaggacttttggccaaaagttccygactcccctgcaaccaaatatcccatttatccactaacaccaaagaaaagtcacagaagaaagtcaaaacataaatctgctaagaaaaaaactggtaaacaacaaaggacaaataatgaaaatattaaaagaactttgtctttcaggaaaaaacggtcacatgctattctttctcctccctcaccatcttacaatgctgaaaccgaagattgtgacytgaattatagtgatgttatgtctaaactaggttttctttctgagagaagcacaagtcccataaattcttctccacctcgctgctggtctcccacagatccaagagctgaagaaatcatggctgctgcagaaaaagaggcaatgctttttaagggtcctaatgtatrtaagaagactgttaattctcgtataggaaaaactagtcgcgcaagagcacagattaagaaatcaaaagcaaagcttgctaatccctctatagttactaagaaaaggaacaaacgaaatcagacaaataaactagtagatgatggaaaaaagaaaccaagagcaaaacaaaaaacaaatgagaaaggtacatcgagaaagcatayaacacttaaggatgaaaaaataaaatctcagtctggtgctgaggttaagtttgtactgaaacaccagaatgtgtctgaatttgcaagtagttctggaggctctcaactactttttaaacagaaagatatgccactaatgggctctgctgtagatcatcccctttctgcttccctacccactggaattaatgcacaacagaagttatctggctgcttttcttctttcttagaaascaagaagtctgtagatttgcakacattccccagttcacgagatgatttgcatccatcagttgtttgtaattctataggacctggagtctcaaaaattaatgttcaaaggcctcataatcaaagtgctatgtttactctaaaggaatcaacgttaattcaaaaaaatatatttgacctttccaatcatttatctcaggtagcacagaatacacagatatcttctggtatgtcctcaaagatagaagataatgcaaataatatacaaagaaactatttgtcatcaatcggaaagttaagtgaatatcgcaattccctagaatcaaagctggaccaagcatatacccctaattttttgcattgcaaagacagtcagcagcagattgtrtgcatagcggaacagtcaaagcacagtgaaacttgttctccgggaaatacagcttcagaggaaagccaaatgcctaataattgctttgtaacttccttgagaagtccaatcaaacaaatagcatgggagcaaaagcaaaggggctttattttagatatgtcaaattttaaacctgaaagagtaaaaccgaggtcrttatcagaagcaatttcacaaaccaaagcactttctcagtgtaaaaatcgaaatgtgtcaacaccttcagcatttggtgaaggacagtctggactggcagttctaaaagaattgttacaaaaaagacagcagraagcacaaaatgcaaatactacacaagacccrttatccaataaacatcaaccaaataaaaatatttctggttcccttgagcataacaaagcaaataaacggacacgatcggtaacgtccccaagaaaacctcgaactcccagaagtacaaaacaaaaagaaaaaatccccaaacttctcaaagtagactctttaaatttacaaaactctagccagttggataactctgtatcagatgatagtcccatctttttttcagatccaggctttgaaagttgttactcacttgaagatagtttatctcctgaacataattataattttgatattaacacaataggtcagactggattttgtagcttttattctggaagtcagtttgtcccagctgatcagaatttgcctcagaagttcctaagtgatgctgttcaggatctttttccaggacaagctatagaaaaaaatgagtttttaagtcatgacaaccagaaatgtgatgaagacaagcatcataccacagactcagcctcatggattagatctggtactttaagtcctgaaatttttgagaagtcaaccatagatagcaatgagaatcgtcgccacaaccagtggaaaaatagctttcatcctctaacaactcggtctaactcaataatggattctttctgtgttcagcaggcagaagactgtctaagtgaaaaatctagattgaataggagttcagtaagcaaagaagtgtttcttagcctcycacagccaaacaattcagactggattcaaggtcacaccagaaaagaaatgggacagtctcttgactcagccaatacctcttttactgcaatactctcctcccctgatggtgaacttgtagacgtggcctgtgaagatttagaactgtatgtttcaagaaacaatgatatgttgacaccaactcctgatagttcaccaagatctactagctctccttcacaatctaaaaatggcagcttcacccctcgaactgctaacattctgaaaccacttatgtcccccccaagtagggaagaaattatggcaactttgttggatcatgacctgtctgagactatttaccaggaaccattttgcagtaatccttctgatgtaccagaaaagcccagggagattsgtggacggctcctcatggtagaaactcgacttgcaaatgatctggctgagtttgagggagacttttccttggaaggacttcgtctttggaaaacagcattctcagcaatgactcagaatccaaggccagggtcaccccttcrcagtggccaaggagttgtcaataaagggtcaagtaatagccctaagatggttgaagataaaaaaattgtgattatgccttgcaaatgtgccccaagtcgacaactggttcaagtgtggcttcaagccaaagaagaatacgaacgttccaagaaaytgcctaaaaccaagccaactggagttgtaaaatctgctgagaactttagctcttcagttaacccagatgacaaacctgtagtgcctccaaaaatggatgtaagtccatgtatactccccactacagcacataccaaggaggatgttgataattctcagattgctttacaagcaccaaccacgggatgtagtcaaactgcaagtgaaagtcagatgctgccaccagttgcctctgcaagtgatccygaaaaagatgaagatgatgatgataactattacattagttatagctcccctgattctccagtaattcccccttggcaacaaccaatatccccagattccaaagcattaaatggagatgatagaccctcatcaccagtagaggagctgccttcattggcttttgagaacttcttaaagccaataaaagatggtatacaaaaaagcccctgcagtgagcctcaagagcctctagtgatatctccaattaatactagggcaagaactgggaaatgtgaatcactttgctttcatagtacaccaatcatacagagaaaacttctggaaaggcttcctgaagcacctggccttagcccattatcaacagaaccaaaaacacagaagttgagtaataagaaaggaagtaatactgacactcttagaagagtactgttaacacaagcaaagaatcaatttgcagcagtaaataccccacagaaagaaacttctcagattgatggaccatctttaaacaatacttacggtttcaaagtcagcatacaaaacttacaggaggcaaaagctttacatgagatacaaaatcttaccctaatcagtgtggagttgcatgctcgaactagacgagacttagaaccggatcctgaatttgacccaatctgtgctctgttctactgcatctcatctgacactccactgccagatacagaaaaaacagaactcacaggtgtaatagtgattgataaagacaagacagttttcagtcaagatatcagatatcagactccattacttattagatctggaattacaggactcgaagtcacctatgctgctgatgagaaggcactttttcatgaaattgcaaatataataaagaggtatgatcctgatattctgctaggatatgagattcagatgcattcctggggttacctcttacaaagggctgccgctttaagtattgacttatgtcggatgatctctcgggtgccagatgacaaaattgagaacagatttgcagctgaaagagatgagtatggatcatatacaatgagtgagataaatattgttggccgaattacactaaatctttggagaatcatgagaaatgaggtggctctaactaactacacctttgaaaatgtgagctttcatgttcttcatcagcgttttcccctctttacctttcgagtcttgtcagactggtttgataacaagacagatctatacagatggaaaatggttgatcattatgttagccgtgtccgtggaaatctccaaatgttagaacagctggacctgattgggaaaaccagtgagatggctagactttttggcattcagtttttacatgtactgacaaggggttcacagtaccgtgtggaatcaatgatgttgcgtattgctaaaccaatgaactatattcctgtgacacctagtgttcagcaaagatcccagatgagagccccacagtgtgttcctctaattatggagcctgaatcccgcttctatagcaactctgttctcgttttggatttccaatcactttatccttctattgtgattgcatataactactgcttttccacctgccttggccatgtggagaacttgggaaagtatgatgagttcaaatttggctgtacctctctgagagtacctccagatttactttaccaagttaggcatgatatcacagtgtcccccaatggagtagcttttgtcaagccttcagtaagaaaaggtgtactaccaagaatgcttgaagaaattttgaagactagatttatggtgaagcagtcaatgaaggcttacaagcaagacagagccctgtcacgaatgcttgatgcgcgtcagttgggacttaagctgatagcaaatgtcacatttggctatacatctgctaatttttctgggagaatgccatgcattgaggttggcgatagtattgttcacaaagccagagagaccttggaacgagctattaaactggtgaatgataccaagaaatggggggctagggttgtatatggcgatactgacagtatgtttgtgctactgaaaggagccactaaggagcagtcttttaagattggtcaggaaattgccgaagctgtaactgctaccaatcctaaaccagtgaaattgaagtttgaaaaggtatatttgccctgtgttttacaaacaaaaaagaggtatgtgggttacatgtatgaaacactggatcagaaggacccagtatttgatgcaaaaggaatagaaacagtcagaagagattcctgccctgctgtttctaagatacttgagcgttctctaaagctgctatttgaaacgagagatataagtctaattaaacagtatgttcagcgacaatgtatgaagcttctggaaggaaaggccagcatacaagactttatctttgccaaggaatacagaggaagtttttcttataaaccaggagcttgtgtgccagcccttgaacttacaaggaaaatgctgacttatgaccggcgctctgagcctcaggttggggagcgagtgccatacgtcatcatttatgggacccccggagtaccacttatccagcttgtaaggcgcccagtggaagtcctgcaggacccaactctgagactgaatgctacttactatattaccaagcaaatccttccacccttggcaagaatcttctcacttattggtattgatgtcttcagctggtatcatgaattaccaaggatccataaagctaccagctcctcgcgaagtgaacctgaagggcggaaaggcactatttcacaataytttactaccttacactgtcctgtgtgtgatgacctaactcagcatggcatctgtagtaaatgtcggagccaacctcagcatrttgcagtcatcctcaaccaagaaatccgsgagttggaacgtcaacaggagcaacttgtaaagatatgcaagaactgtacaggttgctttgatcgacacatcccatgtgtttctctgaactgcccagtacttttcaaactctcccgagtaaatagagaattgtccaaggcaccatatctccggcagttattagaccagttttaaattgtcaatatcacagtattacaggtgctatttttttcagtgcttaccactaaactgttgtgcatggtgctttttaactttcatcgagtcaaggatgttcactgtctgttatctgaagactatgaagacttctatgctaaccgaattaaaatgtacttgttgatctctgaatagctcacttcttacaatgtacaaattcctcattctgtcaccttttaaacattgttttataatgcaggtgttggatttgctccagtatgtgtaccatcttgtaaattcatttgagtagatcatgtttacttcccagtggaaggagcactgaaaacctcttaaagaaaaagcatttgtgtgttttccttgaactgtctgtatcaagacgtgttacttcgagatatccattcactttataattttgactgcaaaatattttgtaaatacacttttttacttttcaaacgagyaaaataatgtgcaatgatttttatacaaatgattttcaagttgtttggtatatttcctctaggttttgcttgactcaaagtagatcgttattttgatcaaactgtgcaaacagtagtaccacgtgtagcattttgaaacattawtttttaaaaaatgctgtcttgctttagctattaatggggcattgtgaggaactgtgcaaagacatttttgttacaaacctgtgggcctgttgcaatactttaaaaataaaaaattttattccatttgcttgttttgtatagacatttctattgcttctaaatatacttaaaatattttctttccttatgtactgtacagttaatcttatttgccatcatcttgaacacaaaatgtgtatttagaatatttgtataactgtgtaaaataaaaaaggaattatgtggtcagtgcattgttttttaaactggaaatcatkttgttttaaaagttaataatggaaaccatattaaaattgaataaaatataaaataatatagcagtgtgacttcatcttttttataagcctgyattggttacatctttyttaccctacccttttytgagttttaatgaagtaaattatttaacatatttttatatcctgtttgawattgcaatttccttaccaaaacttyttcagggttaaaamamaaaaaaaaaaawaaaaaaagggcagcaaaaatgggaaaatttaatttagcactcatccttttagagakttttaagagtgtacttgttagtagatcttcagtg

SEQ ID NO: 1989 - DNA, 2983 bp, Homo sapiens
ccttctttgcttgttggcagggggcttgtacatgacagctggaatagcctccagttgaggggcttggtggtgctccttatctctaaagcagctgggcccagcagcgtgaacacttcatgtcagaactatgacatggtcagtgggatctactcatgtcaaagaagtttggcagagatcacggagctaattcatattgctctccttgtacatcgtgggatagtaaatttaaatgagttgcaatcatctgatggtccactgaaagacatgcaatttggmaataaaattgctatcctgagtggagactttcttctagcaaatgcctgcaatggactagctctgctacagaacaccaaggttgtggaacttttagcaagtgctcttatggacttgrtacaaggagtatatcatgaaaattctacttcaaaggaaagttatatcacagatgatattggaatatcgacttggaaggagcagacttttctctcccatggtgccttactagcaaagagctgccaagctgcaatggaattagcaaagcatgatgctgaggttcagaatatggcatttcagtatgggaagcacatggccatgagtcataagataaattctgatgtccagccttttattaaagaaaagaccagtgactccatgacttttaatctaaactcagctcctgtagtcttacatcaggaatttcttggaagagatttgtggattaaacagatcggagaggctcaagaaaaaggaagattggactatgctaagttgcgagaaagaatcaaagctggcaaaggtgtgacttcagctattgacctgtgtcgttaccatggaaacaaggcactggaggccctggagagctttcctccctcggaggccagatctgctttagaaaacattgtgtttgctgtgaccagattttcatgacatcaaattaaaaagacactattgttagttagctgaaaatcctagggaatgaggttgattgggagcgctttcacgatgcgttaatgacttttaaaacatatgcatttttccttccttttatcacattgctaaatgagttctgctttctttttggaactgctacaaacaaaattagaagaaaaaaaggtcaagcagttttcacttgtcacgccagaagcacacttgaggctgcagtcgcagaaataattaatgagattcgctcctgtgacctcagcaaatggacaggaaataagtccttattgattggaccgagccagggatggcgccagggcggtggcctgtggtttttcctgctagagaggacaaagcaagttggaagctgcaggtgtcaagagaaatgctctcaataccaaccagggaggattgtctaatcaaaaactagtgaccaatttgtcataatggagagtagttcaatggattgagaaaaatatgttttatttgttggcttgtaattatgtctctggattattattatttttttttttagatgtagttttgctcttgttgcccaggctggagtgcaatggtgcagttttgactcactgcaacctccgcctcctgggttcaagtgattctcctgcctcagcctcccgagtagctggaattacaggcacctgccaccacgcctggctaattttgtatttttagtagagatggggtttcactatgttggtcaggctagtctcgaactcctgacctcaggtgatccgcctgcctcggcctcccaaagtgctgggattagaggcttgagccactgcacctggcctcatgtctctggatttataatgcagtatgaatatactttgtgctttatggtttttataatgtctttttggagaaattgccgaaaagttgccaaatacttgaagtaggagattaaaatgttatcaaatgttaaattggttatattaggaatagtctgtttttctttcctgaagatcagtttttttattcaaacacatttcaaagaaccaaattttttttttctttaaggaaaaaggagctttttttcaagtgaaatgtattcatttgtaatactttggtttaaggcatactttaatttttacgagtttcagaaacagaatttttgtactagggaattcattggtgagagtgttcttttaacctcagaatgtcaaattttggtcttgaaccacagacatccaattacagaaagaatataagcaatctcacaggcctgcaatcggacactgtctctgtgtggttcataggagatgatttttgaggtttgcactcatgcaatttgagaacaccgttgacaagaaggctgagtttacataaatgatctagattgaaactcagctacctttcttcctcatgtggtgtaattacagccctatctggagacagcgaatacagcaaacagattttattacctagttcgctcaaacactacatgaagttattttagttaaagccctcccccaaaagttataaaaccattttatcagggcccaacatgtggcatgcaatgaagagaaaatgtaaagctacagaggttaatgtattgtattataaaatattttaagtgtactcaaaatatcataattgtacagtttatgccaccataatttgaggcctatagatttagcttaagagaacactsttctgtttgaaatgctttctgtcactgaaattggcttaattagtaaccatggataagatgctttagatcagactaggttttaatcattaacttccacaaagaagtcatactttgcgttaggtgtgctggttggaygtgcaggaacttcagcaagcagtaggttttactaagcagatggtcgggcactgcagggcaccaggcaggatcctagggcgcctcttattctgcgttagcatctggtttgctgtatgaccttgcacaagtcacttccttctgagcctcaattttctcatctgtacaatgagattcaaaagttgacctgaaagtcaagtgtgaaaaaaaaaaagagattaaacaagataattatgaaat

SEQ ID NO: 1990 - DNA, 3534 bp, Homo sapiens
ctccaatatggcgtcctccacataggcagtggctgtggtttctaccccgggtggccgggggcagtgctgagctgggactgttgtttgcccagcmtgggctgcagaaagcagcagttaaagttcgtttctggtcactgctccaggaagccaccttactctgagggtcaagaattgccgcttccttttagttactgtaagttcctcctctgcccctggtttgtttcccgcggcacttctggatacccccaggtcccagacccttccagactcaaaccatgaacyttcsgcagctgctgttgcacttgccacgttatcttggagcctcgggttccccgcgtcgcctgtggtggtccccgtccctcgacaccatctcctcggtgggctcttggcgtggtcggtcctccaagtccccggcccactggaatcaggtagtgtcagaggcggagaagatcgtggggtaccccacgtccttcatgagccttcgctgcctgctgagcgacgagctcagcaacatcgctatgcaggtgcggaagctggtgggcactcagcaccctctgcttaccacagccagggggcttgtacatgacagctggaatagcctccagttgaggggcttggtggtgctccttatctctaaagcagctgggcccagcagcgtgaacacttcatgtcagaactatgacatggtcagtgggatctactcatgtcaaagaagtttggcagagatcacggagctaattcatattgctctccttgtacatcgtgggatagtaaatttaaatgagttgcaatcatctgatggtccactgaaagacatgcaatttggmaataaaattgctatcctgagtggagactttcttctagcaaatgcctgcaatggactagctctgctacagaacaccaaggttgtggaacttttagcaagtgctcttatggacttgrtacaaggagtatatcatgaaaattctacttcaaaggaaagttatatcacagatgatattggaatatcgacttggaaggagcagacttttctctcccatggtgccttactagcaaagagctgccaagctgcaatggaattagcaaagcatgatgctgaggttcagaatatggcatttcagtatgggaagcacatggccatgagtcataagataaattctgatgtccagccttttattaaagaaaagaccagtgactccatgacttttaatctaaactcagctcctgtagtcttacatcaggaatttcttggaagagatttgtggattaaacagatcggagaggctcaagaaaaaggaagattggactatgctaagttgcgagaaagaatcaaagctggcaaaggtgtgacttcagctattgacctgtgtcgttaccatggaaacaaggcactggaggccctggagagctttcctccctcggaggccagatctgctttagaaaacattgtgtttgctgtgaccagattttcatgacatcaaattaaaaagacactattgttagttagctgaaaatcctagggaatgaggttgattgggagcgctttcacgatgcgttaatgacttttaaaacatatgcatttttccttccttttatcacattgctaaatgagttctgctttctttttggaactgctacaaacaaaattagaagaaaaaaaggtcaagcagttttcacttgtcacgccagaagcacacttgaggctgcagtcgcagaaataattaatgagattcgctcctgtgacctcagcaaatggacaggaaataagtccttattgattggaccgagccagggatggcgccagggcggtggcctgtggtttttcctgctagagaggacaaagcaagttggaagctgcaggtgtcaagagaaatgctctcaataccaaccagggaggattgtctaatcaaaaactagtgaccaatttgtcataatggagagtagttcaatggattgagaaaaatatgttttatttgttggcttgtaattatgtctctggattattattatttttttttttagatgtagttttgctcttgttgcccaggctggagtgcaatggtgcagttttgactcactgcaacctccgcctcctgggttcaagtgattctcctgcctcagcctcccgagtagctggaattacaggcacctgccaccacgcctggctaattttgtatttttagtagagatggggtttcactatgttggtcaggctagtctcgaactcctgacctcaggtgatccgcctgcctcggcctcccaaagtgctgggattagaggcttgagccactgcacctggcctcatgtctctggatttataatgcagtatgaatatactttgtgctttatggtttttataatgtctttttggagaaattgccgaaaagttgccaaatacttgaagtaggagattaaaatgttatcaaatgttaaattggttatattaggaatagtctgtttttctttcctgaagatcagtttttttattcaaacacatttcaaagaaccaaattttttttttctttaaggaaaaaggagctttttttcaagtgaaatgtattcatttgtaatactttggtttaaggcatactttaatttttacgagtttcagaaacagaatttttgtactagggaattcattggtgagagtgttcttttaacctcagaatgtcaaattttggtcttgaaccacagacatccaattacagaaagaatataagcaatctcacaggcctgcaatcggacactgtctctgtgtggttcataggagatgatttttgaggtttgcactcatgcaatttgagaacaccgttgacaagaaggctgagtttacataaatgatctagattgaaactcagctacctttcttcctcatgtggtgtaattacagccctatctggagacagcgaatacagcaaacagattttattacctagttcgctcaaacactacatgaagttattttagttaaagccctcccccaaaagttataaaaccattttatcagggcccaacatgtggcatgcaatgaagagaaaatgtaaagctacagaggttaatgtattgtattataaaatattttaagtgtactcaaaatatcataattgtacagtttatgccaccataatttgaggcctatagatttagcttaagagaacactsttctgtttgaaatgctttctgtcactgaaattggcttaattagtaaccatggataagatgctttagatcagactaggttttaatcattaacttccacaaagaagtcatactttgcgttaggtgtgctggttggaygtgcaggaacttcagcaagcagtaggttttactaagcagatggtcgggcactgcagggcaccaggcaggatcctagggcgcctcttattctgcgttagcatctggtttgctgtatgaccttgcacaagtcacttccttctgagcctcaattttctcatctgtacaatgagattcaaaagttgacctgaaagtcaagtgtgaaaaaaaaaaagagattaaacaagataattatgaaat

SEQ ID NO: 1991 - DNA, 486 bp, Homo sapiens
atggctcagtggcagcaactgctgcggaggccaaagggtggatcaccagccccgggttggggatggctctcagaacacctggctgcagccagcatgctcaagtgggagcagggtggctgggctgcagacctgtctcagagtcaggtaggtcttccagttaccaaccttttgaagctttatatgcctgagaatatttctactgtggctttccatttcagctgggaaaaaaggatggattcaacagacagggtctactttgtgaatcataaaacaaaaacaacccagtgggaagatccaggaactcaaggcttccagaacgcagaacccctgccagaaggctgggaattttgtatactcatgagagtgttagattatgacattaaaacccaaggcttgtggcagttatatataatatttagagaagaagaagaacttmattatcgtggcctagcaaaagaatggtttccttgctttcatatgaagttt

SEQ ID NO: 1992 - DNA, 834 bp, Homo sapiens
ttaaaacaaactgacasgttcaagtacctgtcttcagaaaagccagcagctttttttttttttttttttaacaaccagtgatacctctagttggcttcaatgttagctgcagaaaatgacctttgtggacctttacctccaggctgggaaaaaaggatggattcaacagacagggtctactttgtgaatcataaaacaaaaacaacccagtgggaagatccaggaactcaaggcttccagaacgcagaacccctgccagaaggctgggaattttgtatactcatgagagtgttaggtactttgttgatcataacacaagaacaacagcatttcaagatccttgcaataggaagtcatttgcaactaaagatagaccacaaattgcttatgattacagctttaggtggaaacttgctcacttctagtatctgtgccagtctaatgcactaccgagtcatgtaaaggtcagtgtgtcccggcagacattgtctgaagattccttccaacagattatgacattaaaacccaaggcttgtggcagttatatataatatttagagaagaagaagaacttmattatcgtggcctagcaaaagaatggtttccttgctttcatatgaagttttgaacccaatgtattgcttatttgagtatatgggcaagaacaactattgtctgcaaagaaatccagcatcaaccattaatccagaccatctcttatgcttctgttgtattggtcattttagtgccatgatgctatttcatgaaaagtttattgatggtggtctctagttaccattccataagtgtatgttaagtacaaatctttttata

SEQ ID NO: 1993 - DNA, 1793 bp, Homo sapiens
accacctctgctgccgcgcgcctaccggagccgcttggccctagtgctttccagcggatttcccctcaggtgcggagccgggtgccggggtcccacagccaaccactaccggttcctctttcgtcagccaccggcgccggcaggacccgcgaatcccgatctccaggagcctgtaaggaggccgcccattggctcagccgcactgctgggcaggtacttccaaagctttgaggattggctgatgctctgggcgccggggctagttggcgggtaggatcacgtgcgaggggcaggccccgtctaggccccgcctccttgctgctgctgccgccgccwatcctggtccggttgcccgagttcccggaggtctctcgcgggacctctctcaccgccaccgctcctactctcgggcttccaaatctggggcgatgtctccccaggttaarttaccctagctcctgctccagatcgcttccccgtgccccgccagagcccagtagttcaaaaattaaatttggggcaaggggtgcgcgccagagcgcagctgtttctggagcctgcggcagcggtggcgagccacagggcggcgaccgtgagctccgggagctgcgcaaaccacctggagaccatgtctggggatgcgaccaggaccctggggaaaggaagccagcccccagggccagtcccggaggggctgatccgcatctacagcatgaggttctgcccctattctcacaggacccgcctcrtcctcaaggccaaagacatcagacatgaagtggtcaacattaacctgagaaacaagcctgaatggtactatacaaagcacccttttggccacattcctgtcctggagaccagccaatgtcaactgatctatgaatctgttattgcttgtgagtacctggatgatgcttatccaggaaggaagctgtttccatatgacccttatgaacgagctcgccaaaagatgttattggagctattttgtaagattcttgagtatcagaacaccaccttctttggtggaacctgtatatccatgattgattacctcctctggccctggtttgagcggctggatgtgtatgggatactggactgtgtgagccacackccagccctgcggctctggatatcagccatgaagtgggaycccacagtctgtgctcttctcatggataagagcattttccagggcttcttgaatctctattttcagaacaaccctaatgcctttgactttgggctgtgctgagtctcactgtccaccccttcgctgtccagaattccccagcttgttgggagtctacgtcacggcttgtcttgggaaccaatccgtctytctttcttttctttgaagttcccaataaaatgaaaacaggaaatgtattcttctgataatcatttgtctgactcctctagcctgtagctgctgctactgctgcttttttttcctttttttttttgaggcaagatcttgcttcgttactcaggctggagtgcagtgggacagtcggctcactgcagccttgaactcctgggctcagttgattctcccgcctcagcctcctgagaagctaggactacaggtatgtgtcaccacgcccagctaatttttaaaaaaatgttgttgagacagggtctcactatgttgctcaggctggtctccatctcctggccgcaagccatccacccaacttggtctccaaagtgttgagattacaggcatgagccacctggcctgcctagcctgtagcttctaactattttctagaaagtgcctggtgcta

SEQ ID NO: 1994 - DNA, 1895 bp, Homo sapiens
accacctctgctgccgcgcgcctaccggagccgcttggccctagtgctttccagcggatttcccctcaggtgcggagccgggtgccggggtcccacagccaaccactaccggttcctctttcgtcagccaccggcgccggcaggacccgcgaatcccgatctccaggagcctgtaaggaggccgcccattggctcagccgcactgctgggcaggtacttccaaagctttgaggattggctgatgctctgggcgccggggctagttggcgggtaggatcacgtgcgaggggcaggccccgtctaggccccgcctccttgctgctgctgccgccgccwatcctggtccggttgcccgagttcccggaggtctctcgcgggacctctctcaccgccaccgctcctactctcgggcttccaaatctggggcgatgtctccccaggttaarttaccctagctcctgctccagatcgcttccccgtgccccgccagagcccagtagttcaaaaattaaatttggggcaaggggtgcgcgccagagcgcagctgtttctggagcctgcggcagcggtggcgagccacagggcggcgaccgtgagctccgggagctgcgcaaaccacctggagaccatgtctggggatgcgaccaggaccctggggaaaggaagccagcccccagggccagtcccggaggggctgatccgcatctacagcatgaggttctgcccctattctcacaggacccgcctcrtcctcaaggccaaagacatcagacatgaagtggtcaacattaacctgagaaacaagcctgaatggtactatacaaagcacccttttggccacattcctgtcctggagaccagccaatgtcaactgatctatgaatctgttattgcttgtgagtacctggatgatgcttatccaggaaggaagctgtttccatatgacccttatgaacgagctcgccaaaagatgttattggagctattttgtaaggtcccacatttgaccaaggagtgcctggtagcgttgagatgtgggagagaatgcactratctgaaggcagccctgcgtcaggaattcagcaacctggaagagattcttgagtatcagaacaccaccttctttggtggaacctgtatatccatgattgattacctcctctggccctggtttgagcggctggatgtgtatgggatactggactgtgtgagccacackccagccctgcggctctggatatcagccatgaagtgggaycccacagtctgtgctcttctcatggataagagcattttccagggcttcttgaatctctattttcagaacaaccctaatgcctttgactttgggctgtgctgagtctcactgtccaccccttcgctgtccagaattccccagcttgttgggagtctacgtcacggcttgtcttgggaaccaatccgtctytctttcttttctttgaagttcccaataaaatgaaaacaggaaatgtattcttctgataatcatttgtctgactcctctagcctgtagctgctgctactgctgcttttttttcctttttttttttgaggcaagatcttgcttcgttactcaggctggagtgcagtgggacagtcggctcactgcagccttgaactcctgggctcagttgattctcccgcctcagcctcctgagaagctaggactacaggtatgtgtcaccacgcccagctaatttttaaaaaaatgttgttgagacagggtctcactatgttgctcaggctggtctccatctcctggccgcaagccatccacccaacttggtctccaaagtgttgagattacaggcatgagccacctggcctgcctagcctgtagcttctaactattttctagaaagtgcctggtgcta

SEQ ID NO: 1995 - DNA, 1209 bp, Homo sapiens
gggcaagtgagcgagctccttcctcaccgggctgactagcctctcctttccctgtccccctcyatcgctgctctgcaggaagccagcccccagggccagtcccggaggggctgatccgcatctacagcatgaggttctgcccctattctcacaggacccgcctcrtcctcaaggccaaagacatcagacatgaagtggtcaacattaacctgagaaacaagcctgaatggtactatacaaagcacccttttggccacattcctgtcctggagaccagccaatgtcaactgatctatgaatctgttattgcttgtgagtacctggatgatgcttatccaggaaggaagctgtttccatatgacccttatgaacgagctcgccaaaagatgttattggagctattttgtaagattcttgagtatcagaacaccaccttctttggtggaacctgtatatccatgattgattacctcctctggccctggtttgagcggctggatgtgtatgggatactggactgtgtgagccacackccagccctgcggctctggatatcagccatgaagtgggaycccacagtctgtgctcttctcatggataagagcattttccagggcttcttgaatctctattttcagaacaaccctaatgcctttgactttgggctgtgctgagtctcactgtccaccccttcgctgtccagaattccccagcttgttgggagtctacgtcacggcttgtcttgggaaccaatccgtctytctttcttttctttgaagttcccaataaaatgaaaacaggaaatgtattcttctgataatcatttgtctgactcctctagcctgtagctgctgctactgctgcttttttttcctttttttttttgaggcaagatcttgcttcgttactcaggctggagtgcagtgggacagtcggctcactgcagccttgaactcctgggctcagttgattctcccgcctcagcctcctgagaagctaggactacaggtatgtgtcaccacgcccagctaatttttaaaaaaatgttgttgagacagggtctcactatgttgctcaggctggtctccatctcctggccgcaagccatccacccaacttggtctccaaagtgttgagattacaggcatgagccacctggcctgcctagcctgtagcttctaactattttctagaaagtgcctggtgcta

SEQ ID NO: 1996 - DNA, 762 bp, Homo sapiens
acaactcctaaaagacccgcaagtgctatttgctggctacaaagtcccccaccccttrgagcacaagatcatcatccgagtgcagaccacgccggactacagcccccaggaagcctttaccaacgccatcaccgacctcatcagtgagctgtccctgctggaggagcgctttcgggtgagggcggggcctggaggggcagacggggtggccataaaagacaagcaggaaggaattgagtaggggccrgagggggctctgctcggcctgtgagccccgttcctacctgtgcctgaccctccgctccaggtaccacaccgaggagagcggccrgtcccagccatggcccgccttgtggccacccctcaccctgacaccgacgtgtcctgtacatagattaggttttatattcctaataaagtatagcggragagacctgkatgtggacttgagcagcggtgacttcgcaagcaaatggattgtcaggcttgatgcagrcagatgacctgtttcaggggcgtccggctggcagggatgaattcattctggaccaaagatccggggtccaggggctgctgcgggggctgtgctsagccggagagaagtgtgcaaacccatgagctcccaagagtctctgctctagaagcctcaactcctgggcctgcctgtcagtcaaagcaggaacacttcttcctgcataactcgaaacacctttccacaggcttcttgtccacagtagagtttaataaaaatattcactgaaa

SEQ ID NO: 1997 - DNA, 732 bp, Homo sapiens
acaactcctaaaagacccgcaagtgctatttgctggctacaaagtcccccaccccttrgagcacaagatcatcatccgagtgcagaccacgccggactacagcccccaggaagcctttaccaacgccatcaccgacctcatcagtgagctgtccctgctggaggagcgctttcgggtggccataaaagacaagcaggaaggaattgagtaggggccrgagggggctctgctcggcctgtgagccccgttcctacctgtgcctgaccctccgctccaggtaccacaccgaggagagcggccrgtcccagccatggcccgccttgtggccacccctcaccctgacaccgacgtgtcctgtacatagattaggttttatattcctaataaagtatagcggragagacctgkatgtggacttgagcagcggtgacttcgcaagcaaatggattgtcaggcttgatgcagrcagatgacctgtttcaggggcgtccggctggcagggatgaattcattctggaccaaagatccggggtccaggggctgctgcgggggctgtgctsagccggagagaagtgtgcaaacccatgagctcccaagagtctctgctctagaagcctcaactcctgggcctgcctgtcagtcaaagcaggaacacttcttcctgcataactcgaaacacctttccacaggcttcttgtccacagtagagtttaataaaaatattcactgaaa

SEQ ID NO: 1998 - DNA, 598 bp, Homo sapiens
acaactcctaaaagacccgcaagtgctatttgctggctacaaagtcccccaccccttrgagcacaagatcatcatccgagtgcagaccacgccggactacagcccccaggaagcctttaccaacgccatcaccgacctcatcagtgagctgtccctgctggaggagcgctttcgggtgagggcggggcctggaggggcagacggggtgggctggacactggcccgtgtgcccaggcctgggacagccctggcctgtttcttcggaggtcctgggggagaggcggcagtgatggaagagcagggacttccaccacaggctccaggacatgtggactgaggggctgtggagtctgggcctgtggctcccgtctgccccatgggacttctgtagtgctgcagggtccctcgggtgctgtgggccagatcsgggcggggacctactgtcctttgggggtgctcttctacgtcccttgttggtgattggcaaggcctggtccttccaggtctctgggaggcagctcaccccarggtggcccacacctgttcctggcagggcgcmtgggaatctagaacagtttagaggggaaagagccacagc

SEQ ID NO: 1999 - DNA, 1294 bp, Homo sapiens
ccttccccgtcccccttcctctcttcytccccttttcagcccctccgttctttgagaaccctcccgacccccgcgggcccccattggccggcccgctacccagccctctccgccacttccctcgcttctgaccatagtttgcggggaagggagcgagcgcgtcgaaaaccaaggaacgtgcgcgctgacgtcacggttgaggctcggagctgaggggccgcggagggcgtggcctgcgggcggttataaagaggcagtggtgcgcgcgcggccggctcagtgctgccgggcaccggggcggcgggttggtctacgctgtgcgcggcggacgtcggaggcagcggggagcggagcggggccgccggggcctctccagggccgcagcggcagcagttgggccccccgccccggccggcggaccgaagaacgcaggaagggggccggggggacccgcccccggccggccgcagccatgaactccaacgtggagaacctacccccgcacatcatccgcctggtgtacaaggaggtgacgacactgaccgcagacccacccgatggcatcaaggtctttcccaacgaggaggacctcaccgacctccaggtcaccatcgagggccctgaggggaccccatatgctggaggtctgttccgcatgaaactcctgctggggaaggacttccctgcctccccacccaagggctacttcctgaccaagatcttccacccgaacgtgggcgccaatggcgagatctgcgtcaacgtgctcaagagggactggacggctgagctgggcatccgacacgtactgctgaccatcaagtgcctgctgatccaccctaaccccgagtctgcactcaacgaggaggcgggccgcctgctcttggagaactacgaggagtatgcrgctcgggcccgtctgctcacagagatccacgggggcgccggcgggcccagcggcagggccgaagccggtcgggccctggccagtggcactgaagcttcctccaccgaccctggggccccagggggcccgggaggggctgagggtcccatggccaaraagcatgctggcgagcgcgataagaagctggcggccaagaaaaagacggacaagaagsgggcgctgcggcggctgtagtgggctytcttcctccttccaccgtgaccccaacctytcctgtcccctccctccaactctgtctctaagttatttaaattatggctggggtcggggagggtacagggggcmctgggacctggatttgtttttctaaataaagttggaaaagca

SEQ ID NO: 2000 - DNA, 1406 bp, Homo sapiens
gtgggaggtgacaccaggaggtaaccaggtggaaatcaccctcaagtagcagagacaggtgtgcaaaggctcagagggagcttctccaggatcagcagagctcgattgtagggtgtgaggctgtcacagaggctggagaaataagcagttccttgctaagaagtctgaattttaacctgaagggacatgggagctactgcaggctgggctgtgaccgtctacgacaagccggcatctttctttaaagaggcacctctggacctgcagcaccggctcttcatgaagctgggcagcacgcactctccgttcagggcccgctcagaacctgaggacccagacacagagcggtcggccttcacggagcgggattctgggagcgggctggtgacgcgtctccacgagcggccagccctgctggtcagcagcacaagctggacagaggacgaagacttctctatcttgctggcagctttagaaaagtttgaacaactgactcttgacggacagaaccttccttctctcgtctgtgtgataacaggcaaagggcctctgagggagtattacagccgcctcatccaccagaagcatttccarcacatccaggtctgcatcccctggctggagggccgaggactacccccgcttctagggtcggtggacctggatgtctgtctggacacgtcctccagtggcctggacctgcccatgaaggtggtggacatgttcaggtgctgtttgcctgcgtgtgccgtgaacttcaagtgtttacatgagctggtgaaacatgaaraaaaccgcctggtctttgaggactcaraggaactggcagctcagctgcagatgcttttctcaaactttcctgatcctgaaggcaagctaaaccagttccggaagaacctgcgggagtcgcagcagctctgatgggatgagagctgggtgcagactgtgctccctttggttatggacacataactcctgggccagaggctaaaaccccagggcccctgctgtccttcccgcagyttcttyttggagtctcagggcaaaccctttcaagcagcgcctcccagtggccagaagctgaaatgacggcagtggtgccacctggtgaatgacccgggaagctgtggttggccctgatttcttctttggagtctcagaaatgcttcctgtcttcttctgttcttcacgccccatgtccctgctagcgtattactgttctgtgacttccctgtgacctctgcagtactcctcatcctgcatttggtctccaggtgtcacctttctgccatgttcctaacactttgattcctgtcttgagaaaagcacctgctgcaccayaagcccagggatgtggcagctgcagcgggcttggctttgtgaggaaccgagtgtgtccacgttgg

SEQ ID NO: 2001 - DNA, 1671 bp, Homo sapiens
ttctgcaaaggttacttgtttcttattgcaaaaagtaatacatcattcttgtcaacagaatgattgggaggattttcagtaaaggtccaggtcagaagtcatttagactgggtcccccagtctctgtcagaaccatggtactctgttgtggtgtgaaagtagccacagatcatctgtagattaaggggtgtggctttgttccaayaaagctttatttacaaacacaggctgtgggctggmtttggcctgcaggctgtagtttgtgatccttgattcagacagtttagcaaggctgaaaagaacsmcwccttgttacccacagatgggtgggactgtgttggccagaggcyragaggagggtgctcrcaggkgaacgkacatcaygtagaggccggraggtgctccagggcaccaagtgtgggaaagtgggacatacggggaagtttccagaaagcatgtcaagatggaggcggagcgctgctggggtgtgaagggtctcaagtccaagtgagggagctagggacttgggagggkttgttgttgggtcggggasctggggtcakccaggtggtgacctgggatggggtggggacaggcaatgaggtaagctctgctcttcagtattttgcagatgcttttctcaaactttcctgatcctgaaggcaagctaaaccagttccggaagaacctgcgggagtcgcagcagctctgatgggatgagagctgggtgcagactgtgctccctttggttatggacacataactcctgggccagaggctaaaaccccagggcccctgctgtccttcccgcagyttcttyttggagtctcagggcaaaccctttcaagcagcgcctcccagtggccagaagctgaaatgacggcagtggtgccacctggtgaatgacccgggaagctgtggttggccctgatttcttctttggagtctcagaaatgcttcctgtcttcttctgttcttcacgccccatgtccctgctagcgtattactgttctgtgacttccctgtgacctctgcagtactcctcatcctgcatttggtctccaggtgtcacctttctgccatgttcctaacactttgattcctgtcttgagaaaagcacctgctgcaccayaagcccagggatgtggcagctgcagcgggcttggctttgtgaggaaccgagtgtgtccagggatgtggcagctgccgcgggcttggctttgtgaggaaccgaatgtgtccagggatgtggcagctgcagcgagcttggctttgtgaggaaccgagtgttgtccacgttgggggaacrtcatacttgatacacacgtttttatttgcacaaaccagaattttcatgtctgatttatggtgattttcttaagaaccagaactgctggcagaaagggggcacccacatgcttagatagccgatgtcttattagagggcagattgtggttcctgatttggaatttaacattctccaaacattccagtccaatgaaagttttatccgctttcccatataaaaattcttcccacgagagtgatttgattctaacaatcccgttggagtcgtgtatgagtcctacagtgtgaggttcagcattgccatctccaagtgctctccatagggaaacagtttctggtcatgatgagcttccgcttcccat

SEQ ID NO: 2002 - DNA, 2184 bp, Homo sapiens
cgaccggaagtccggtcactctcgcgaggccccagagagcaggcgctgggcagtgtggaggtcgttggagtcacttccccgtcaccagctcctgtgcctgccagtcggtgcccctcccgctccagccatgctctccgccctcgcccggcctgycagcgctgctctccgccgcagcttcagcacctcggcccagaacaatgctaaagtagctgtgctaggggcctctggaggcatcgggcagccactttcacttctcctgaagaacagccccttggtgagccgcctgaccctctatgatatcgcgcacacacccggagtggccgcagatctgagccacatcgagaccaaagccgctgtgaaaggctacctcggacctgaacagctgcctgactgcctgaaaggttgtgatgtggtagttattccggctggagtccccagaaagccaggcatgacccgggacgacctgttcaacaccaatgccacgattgtggccaccctgaccgctgcctgtgcccagcactgccckgaagccatgatctgcgtcattgccaatccrgttaattccaccatccccatcacagcagaagttttcaagaagcatggagtgtacaaccccaacaaaatcttcggcgtgacgaccctggacatcgtcagagccaacacctttgtkgcagagctgaagggtttggatccagctcgagtcaacgtccctgtcattggtggccatgctgggaagaccatcatccccctgatctctcagtgcacccccaaggtggactttccccaggaccagctgacagcactcactgggcggatccaggaggccggcacggaggtggtcaaggctaaagccggagcaggctctgccaccctctccatggcgtatgccggcgcccgctttgtcttctcccttgtggatgcaatgaatggaaaggaaggtgttgtggaatgttccttcgttaagtcacaggaaacggaatgtacctacttytccacaccgctgctgcttgggaaaaagggcatcgagargaacctgggcatcggcaaagtctcctcttttgaggagaagatgatctcggatgccatccccgagctgaaggcctccatcaagaagggggaagatttcgtgaagaccctgaagtgagccgctgtgacgggtggccagtttccttaatttatgaaggcatcatgtcactgcaaagccgttgcagataaactttgtattttaatttgctttggtgatgattactgtattgacatcatcatgccttccaaattgtgggtggctctgtgggcgcatcatttcttccctgtgagagccaactttagagtgtctgctacctcttcattaycaatcagaattagatgatgtttaactgttagactgaagcgtgacgytttcatcagtagcttcaagaaagtctaaattgttaatttatggaattggacacagtattcagtttacccgtacatgctcctcccgcccctcctgttggcacccttgcatcgcccaggcctgattcctcctgggggtagttcacccccacgggktcatagttcagcggcgaatgccaggcagctgttttctggctgagcaaacagcacctttctcattgagcttcctctactgacctctgtcccccttgggatttcatcttctgaccgaaccctgatgttcagtggcagagacagcccatagccagaactgtgggtagaccagggttggggtgtgcggtttgggacagcccaaaccccagccgctgtgtcaaggcctaggacgccrtgctgccatcaaaagggggttccaggtttccatcagtggcctaaagaagggacttcttgttgtactgaggagtgcggaattaaagagatttgactccctttagtattgggggcagtccgttccccagacactgtggcctctgaagtggaaactgaaagctgcatacctgggaaagaacyttctagsaataggcaatggccttcagtggaagagggagggctggaggtgtgcccagtacttggatgttcatctgtccacaacagctttttgtttttttaaaaaagctaaaatggaaatggattttatcataaaggatgacatcgttttcttctacaattaatacatgttcattgtataaaacccaaaaagcagctaaaaaataaagcgggaaagraactact

SEQ ID NO: 2003 - DNA, 2237 bp, Homo sapiens
cgaccggaagtccggtcactctcgcgaggccccagagagcaggcgctgggcagtgtggaggtcgttggagtcacttccccgtcaccagctcctgtgcctgccagtcggtgcccctcccgctccagccatgctctccgccctcgcccggcctgycagcgctgctctccgccgcagcttcagcacctcggcccagaacaatgctaaagtagctgtgctaggggcctctggaggcatcgggcagccactttcacttctcctgaagaacagccccttggtgagccgcctgaccctctatgatatcgcgcacacacccggagtggccgcagatctgagccacatcgagaccaaagccgctgtgaaaggctacctcggacctgaacagctgcctgactgcctgaaaggttgtgatgtggtagttattccggctggagtccccagaaagccaggcatgacccgggacgacctgttcaacaccaatgccacgattgtggccaccctgaccgctgcctgtgcccagcactgccckgaagccatgatctgcgtcattgccaatccrgttaattccaccatccccatcacagcagaagttttcaagaagcatggagtgtacaaccccaacaaaatcttcggcgtgacgaccctggacatcgtcagagccaacacctttgtkgcagagctgaagggtttggatccagctcgagtcaacgtccctgtcattggtggccatgctgggaagaccatcatccccctgatctctcagtgcacccccaaggtggactttccccaggaccagctgacagcactcactgggcggatccaggaggccggcacggaggtggtcaaggctaaagccggagcaggctctgccaccctctccatggcgtatgccggcgcccgctttgtcttctcccttgtggatgcaatgaatggaaaggaaggtgttgtggaatgttccttcgttaagtcacaggaaacggaatgtacctacttytccacaccgctgctgcttgggaaaaagggcatcgagargaacctgggcatcggcaaagtctcctcttttgaggagaagatgatctcggatgccatccccgagctgaaggcctccatcaagaagggggaagatttcgtgaagaccctgaagtgagccgctgtgacgggtggccagtttccttaatttatgaaggcatcatgtcactgcaaagccgttgcagataaactttgtattttaatttgctttggtgatgattactgtattgacatcatcatgccttccaaattgtgggtggctctgtgggcgcatcaataaaagccgtccttgattttrtttttcaaggtcccttctgtaaatgctgtgctttcttccctgtgagagccaactttagagtgtctgctacctcttcattaycaatcagaattagatgatgtttaactgttagactgaagcgtgacgytttcatcagtagcttcaagaaagtctaaattgttaatttatggaattggacacagtattcagtttacccgtacatgctcctcccgcccctcctgttggcacccttgcatcgcccaggcctgattcctcctgggggtagttcacccccacgggktcatagttcagcggcgaatgccaggcagctgttttctggctgagcaaacagcacctttctcattgagcttcctctactgacctctgtcccccttgggatttcatcttctgaccgaaccctgatgttcagtggcagagacagcccatagccagaactgtgggtagaccagggttggggtgtgcggtttgggacagcccaaaccccagccgctgtgtcaaggcctaggacgccrtgctgccatcaaaagggggttccaggtttccatcagtggcctaaagaagggacttcttgttgtactgaggagtgcggaattaaagagatttgactccctttagtattgggggcagtccgttccccagacactgtggcctctgaagtggaaactgaaagctgcatacctgggaaagaacyttctagsaataggcaatggccttcagtggaagagggagggctggaggtgtgcccagtacttggatgttcatctgtccacaacagctttttgtttttttaaaaaagctaaaatggaaatggattttatcataaaggatgacatcgttttcttctacaattaatacatgttcattgtataaaacccaaaaagcagctaaaaaataaagcgggaaagraactact

SEQ ID NO: 2004 - DNA, 978 bp, Homo sapiens
gttgaagtgaaggccagagtaaacrgatttggccttactgggtgcctgatcactagtacagttttaactctagcaaagtgattattgtcaccatcaatgacctcttcattgacctcarttacatggtccacatgttccagtatgattccacccatggcaagttccacgcaccatcaaggctgagaatgggaagcttgtcatcaatggcaatcccattaccatcttccaggagcaagatcccatccaaatcaaatagggggatgccagtgctgattatcttgtggaatccaccagcatcatcactaccttggaaaagactagggctcacttaaaggggtcatgatttctcccccttctgctgatgcccccatgtttgtgatggttgtgaatcatgagaaaaacaaaaacaacttcacaatcatcagcaatgcttyctgttctaccaactgcttagcacccccagccaaggtcatccatgayaactttggcatcatggagggattcatgaccacagtccatgccatcactgccacccagaagacgaagacaaccyctctsggaaactgggatgacagctatggarctcyacagaacatcacccctgcaattaactagtgttaccaaggcaaagtcatccccacactgaatgagaacctcactggcatggccttctgtgtccccactgccaacatgttggttgtggacctgacctgccatataaagaaacctgccaaatatggtaacaccaagaaggtaatgaaggaggcacggaagggcccctcaagarcatcgtggkgctacactgagcaccaagttgtctcctccaactwtaacagtgacatcgacccttccactttcgacgttggggctggcattgtcctcagygatmactctgtcaagctcatattctgatatgacaakgaatttggctacagcaacagggtgatagactttatggtacacatggcctccaaggag

SEQ ID NO: 2005 - DNA, 4671 bp, Homo sapiens
agtaagctcttgttttgaaaaacagtggggtggkgccaaaaaagcattacaatggagctgggatggatgaggctttcttttatttgagatgtcacttgtgtcacgtttcctgaaacagcacgttggaaaacagaagctattttctatcccgtgggttgcgctggaagagctgagaggccaggctgtggatccttgccacgaacaacaagagagggcaagtccagccgcctgctaggggactagcaggaagcggcacgcctgccagagctcatcacttcaactctggctttcactgcgctcattccctgaatggcagtaaccagggggcgggggtggcatgggaaatgaaagaaagagatatgggaaactaaatctgccgggggaaagagasttaccggagttttagcaaaacagctagcagatgcaaacggggaggcagagggaggagggaaggctgggcttcagcaacctgccacggggatttaaacaaaggaggtttgagagaggcgggatctggctgtaatatcggcacagggacagagacagcagctggactctcgggatgaaacggaatcgattcccagcgtctccaacagggcaggagtgagtggagtatgttgcaaaataagaactcagagaaacgagtgagtttggaaaaaagacttacagattttgacggtctcttgacatttcacccttctttgaggcatgcctttatcaatgcgttacctcttcataatttctgtctctagtgtaattatttttatcgtcttctctgtgttcaattttgggggagatccaagcttccaaaggctaaatatctcagaccctttgaggctgactcaagtttgcacatcttttatcaatggaaaaacacgtttcctgtggaaaaacaaactaatgatccatgagaagtcttcttgyaaggaatacttgacccagagccactacatcacagcccctttatctaaggaagaagctgactttcccttggcatatataatggtcatccatcatcactttgacacctttgcaagrctcttcagggctatttacatgccccaaaatatctactgtgttcatgtggatgaaaaagcaacaactgaatttaaagatgcggtagagcaactattaagctgcttcccaaacgcttttctggcttccaagatggaacccgttgtctatggagggatctccaggctccaggctgacctgaactgcatcagagatctttctgccttcgaggtctcatggaagtacgttatcaacacctgtgggcaagacttccccctgaaaaccaacaaggaaatagttcagtatctgaaaggatttaaaggtaaaaatatcaccccaggggtgctgcccccagctcatgcaattggacggactaaataygtccaccaagagcacctgggcaaagagctttcctatgtgataagaacaacagcgttgaaaccgcctcccccccataatctcacaatttactttggctctgcctatgtggctctatcaagagagtttgccaactttgttctgcatgacccacgggctgttgatttgctccagtggtccaaggacactttcagtcctgatgagcatttctgggtgacactcaataggattccaggtgttcctggctctatgccaaatgcatcctggactggaaacctcagagctataaagtggagtgacatggaagacagacacggaggctgccacggccactatgtacatggtatttgtatctatggaaacggagacttaaagtggctggttaattcaccaagcctgtttgctaacaagtttgagcttaatacctacccccttactgtggaatgcctagaactgaggcatcrcgaaagaaccctcaatcagagtgaaactgcgatacaacccagctggtatttttgagctattcatgagctactcatgactgaagggaaactgcagctgggaagaggagcctgtttttgtgagagacttttgccttcrtaatgttaaccgtttcaggaccacgtttatagcttcaggacctggctacgtaattatacttaaaatatccactggacactgtgaaatacactaacaggatggctgggtagagcaatctgggcactttggccaattttagtcttgctgtttcttgatgctcacctctatattagtttattgttaggatcaatgataaatttaaatgacctcagatctttgcaccagatactcatcatatacaaatgttttagtaaaaaagagaattgtagataatactgtctaggaaaataagaattaggtttctttgaagaaggaatcttttataacaccttaacagtcaccactgtgctcaaccagacagatagtgaaacagctttctgggtaattcaccaatttcctttaaaacataagctacctgaatggagaatacatcttgtttctgagtttcaacactagcatttttggcttactcatggacaaagttctgtatatagtataaagtcattaacaagaaacaggatatgctttaagacagaattcactgtctgttgcttcagtaaaaggacctcggggaataaaacatttctctcttatatgccagaatgtaggctggtccctatgtcatgtcttccattaagaacactaaaaagtccttgcaagaatggagatatgcattcaagagaggtgctatcacatagatctagtctgaagtctggaacactttcctcttctatgacccctctctccccagtattatcttacttgcaaaatggagaccaaattctatcctgtgaggcttttaattgcaccatagtatgctctgagtagctttacactgcctggtactgatagtagtggctcgatttttaagagccttcaattgtagatgaacatctctgttatttatccctcattcatccatccgttcattcattcagccttcaatcaacatctcttgagtgtctattatgtacaggacatgtactgagacaaaaaggaaacataagagctttttcactctaaaaatcttggcaataatgtcaacaccagaaagcctcctctggagaatcttacagagtgattgtagtttaayacaggaacacacagggctgtgtagcatgataccaggcccaggagatcagtaattacaaattaagggttaaatcagagattattcaacagagagggagaaaggaggagacagagggaggacctgttgtgttccagccattctggtattcctttatgtatctaatttcattcaaacctcacaacagtcttgtgaggcccttatataattactcccattttgcagatgaagtaactgaggcttagaaaggttaatagcaccggggaacaatttctctgggtgagaattgggactctgttgctggtcttctcagttcatttcctgaggtggatttactgagagaaggtgaaataaagccatatttagtayaccagagaaggtagattttaagaatggtctcagtgttaatactgagaaaaagtcctgtcagttcagaaaaaatgtgaagtctactttagtattcctgtaatactaaaccgttgagtttctaaatatttatttattctaacaaaaagcaattactacaaatggatgacacatttaatgaacacaattttattttttttctgtaactgtgcttgttgaatgtcaatcatatttaaagggaatgactttgaagtaaaaccttttttcttgctactgaaaaaaatggagttgttttgggtggtaaagtgttaaggaatagggacagctggtcacacaaggaactcttgaaggccacatgtgaaaacctgtcacttgcacagaggccagtcccactaaggtgaccagagtgggctccaagcacaaactgccattggctatagatgggactgtgtccccccaaaattcatgtgttggagccttaaccctcaatgtgatggtatttgagatggggcctttggtaagggaagtttagatgaggtcacgagggtaggaccctcatgatgggatgagtccccttacaagacctctggcttgggccgggcgtggtggctcacacctgtaatcccaacactttgggaggccaaggcaggtagatcacttgatgccaggagttccagaccaggctggccgacatggtgaaaccccatctctactaaaaaatataaaaattagccgggctttgtggcatgtgcctgtaatcccagctatttggcaggctgaggcatgagaatcgcttgaacccaggaggtggaggttacagtgagctgagagtgccccactgcactccagcctgggtgacagagcgagactttgtcccaaaacaaaataggtgaggggatagcgaatgcactcagggtcagcagtggagtttaaaaattgtctcttttcaacttatttaaatgacagcacctgagaagaggaaccgttttacactggatgtttctcatgtagaacaagaaatctttctggaattgatgtttacatgtctgttgttggtcatctctcctgtgtcttaaatactttaatgttggaagagcatagtgtttgggctagtgggtttctgacagcccatgggaatgccctgaaactactgtatctgatgtttgttttcgatgaggttccatgttttgttttcttgggaataaattaatatattgttttcc

SEQ ID NO: 2006 - DNA, 4200 bp, Homo sapiens
tgcagaccaaagtgmgagagggacgcaccgcatctccaggcacatccaaaaaggatggacgagacaccgaagcagaggatacaggaggattaaaggattcaggaaagcaagcagccctccggagaagctgtcgaaattcaagactggcaagagaagcaaattcaacctctcacaccgatcatttctcattccctgaaaagaagagattgtttccccagggaagtgaaaataatgaacttttggaggtactgcttttttgctttcactctgctcagcgtggtcatttttgtgagattttacagtagccaattgagcccgccaaaaagttatgagaagctgaacagttccagtgaaaggtattttaggaaaactgcctgtaatcacgccttagagaaaatgccagtctttttgtgggaaaatatattaccatcacctttgcgaagtgtcccttgcaaggattacctgacccagaatcactacatcacaagtsccctgtcggaagaagaggctgcattccctttggcctatgtcatggtcatccataaggactttgacacctttgaaaggctctttagggctatctatatgccccaaaatgtctactgtgttcacgtggatgagaaagccccagctgagtataaggaatctgtgaggcagttactgagttgcttccaaaatgctttcattgcttcaaagacagagtctgtggtttatgcaggcatttccagactccaggctgacctgaactgtctgaaagaccttgtcgcctctgaggttccctggaagtacgtcatcaacacctgtggacaagacttccccctgaaaaccaaccgggagatagttcagcatctgaaaggatttaaagggaaaaatatcaccccaggggtgctgcctcctgaccatgcaattaagcgaactaaatatgtccaccaagagcrtacagataaaggtggcttttttgtgaaaaatactaatattttgaaaacttcacctccacatcagctgaccatctactttggcactgcctatgtggcgcttaccagagastttgtcgactttgttctacgtgaccaaagggccattgatctactacaatggtcaaaagatacctatagtcctgatgagcatttctgggtgacacttaatagggtttcaggtgttcctggctctatgccaaatgcatcctggactggaaacctcagagctataaagtggagtgacatggaagacagacacggaggctgccacggccactatgtacatggtatttgtatctatggaaacggagacttaaagtggctggttaattcaccaagcctgtttgctaacaagtttgagcttaatacctacccccttactgtggaatgcctagaactgaggcatcrcgaaagaaccctcaatcagagtgaaactgcgatacaacccagctggtatttttgagctattcatgagctactcatgactgaagggaaactgcagctgggaagaggagcctgtttttgtgagagacttttgccttcrtaatgttaaccgtttcaggaccacgtttatagcttcaggacctggctacgtaattatacttaaaatatccactggacactgtgaaatacactaacaggatggctgggtagagcaatctgggcactttggccaattttagtcttgctgtttcttgatgctcacctctatattagtttattgttaggatcaatgataaatttaaatgacctcagatctttgcaccagatactcatcatatacaaatgttttagtaaaaaagagaattgtagataatactgtctaggaaaataagaattaggtttctttgaagaaggaatcttttataacaccttaacagtcaccactgtgctcaaccagacagatagtgaaacagctttctgggtaattcaccaatttcctttaaaacataagctacctgaatggagaatacatcttgtttctgagtttcaacactagcatttttggcttactcatggacaaagttctgtatatagtataaagtcattaacaagaaacaggatatgctttaagacagaattcactgtctgttgcttcagtaaaaggacctcggggaataaaacatttctctcttatatgccagaatgtaggctggtccctatgtcatgtcttccattaagaacactaaaaagtccttgcaagaatggagatatgcattcaagagaggtgctatcacatagatctagtctgaagtctggaacactttcctcttctatgacccctctctccccagtattatcttacttgcaaaatggagaccaaattctatcctgtgaggcttttaattgcaccatagtatgctctgagtagctttacactgcctggtactgatagtagtggctcgatttttaagagccttcaattgtagatgaacatctctgttatttatccctcattcatccatccgttcattcattcagccttcaatcaacatctcttgagtgtctattatgtacaggacatgtactgagacaaaaaggaaacataagagctttttcactctaaaaatcttggcaataatgtcaacaccagaaagcctcctctggagaatcttacagagtgattgtagtttaayacaggaacacacagggctgtgtagcatgataccaggcccaggagatcagtaattacaaattaagggttaaatcagagattattcaacagagagggagaaaggaggagacagagggaggacctgttgtgttccagccattctggtattcctttatgtatctaatttcattcaaacctcacaacagtcttgtgaggcccttatataattactcccattttgcagatgaagtaactgaggcttagaaaggttaatagcaccggggaacaatttctctgggtgagaattgggactctgttgctggtcttctcagttcatttcctgaggtggatttactgagagaaggtgaaataaagccatatttagtayaccagagaaggtagattttaagaatggtctcagtgttaatactgagaaaaagtcctgtcagttcagaaaaaatgtgaagtctactttagtattcctgtaatactaaaccgttgagtttctaaatatttatttattctaacaaaaagcaattactacaaatggatgacacatttaatgaacacaattttattttttttctgtaactgtgcttgttgaatgtcaatcatatttaaagggaatgactttgaagtaaaaccttttttcttgctactgaaaaaaatggagttgttttgggtggtaaagtgttaaggaatagggacagctggtcacacaaggaactcttgaaggccacatgtgaaaacctgtcacttgcacagaggccagtcccactaaggtgaccagagtgggctccaagcacaaactgccattggctatagatgggactgtgtccccccaaaattcatgtgttggagccttaaccctcaatgtgatggtatttgagatggggcctttggtaagggaagtttagatgaggtcacgagggtaggaccctcatgatgggatgagtccccttacaagacctctggcttgggccgggcgtggtggctcacacctgtaatcccaacactttgggaggccaaggcaggtagatcacttgatgccaggagttccagaccaggctggccgacatggtgaaaccccatctctactaaaaaatataaaaattagccgggctttgtggcatgtgcctgtaatcccagctatttggcaggctgaggcatgagaatcgcttgaacccaggaggtggaggttacagtgagctgagagtgccccactgcactccagcctgggtgacagagcgagactttgtcccaaaacaaaataggtgaggggatagcgaatgcactcagggtcagcagtggagtttaaaaattgtctcttttcaacttatttaaatgacagcacctgagaagaggaaccgttttacactggatgtttctcatgtagaacaagaaatctttctggaattgatgtttacatgtctgttgttggtcatctctcctgtgtcttaaatactttaatgttggaagagcatagtgtttgggctagtgggtttctgacagcccatgggaatgccctgaaactactgtatctgatgtttgttttcgatgaggttccatgttttgttttcttgggaataaattaatatattgttttcc

SEQ ID NO: 2007 - DNA, 4547 bp, Homo sapiens
gcactacatatttattgatagamtatctctccaggcagyattcacatgctttaaactgaagctcgtagcttggcagtgcagtttaagcaaataaactcaggctgttgaacacaatgattaacaggaagcaggggaggggacatagttactagactctggccgggacaagaggctgaggttaaggtcttagagccgatgacttgcagaatggtcacctcacccacttgyaatttcatggtgggaacaggtggaccccctggaatcagaacctctctgaggacatctgtttttgtgtagacacaggttgcaggttagcaggagaacaggcaagccaaatgcaaaggagccacttcagaaatgtgtcacagaaaagtgaaaatgcaacctagtggtaagtgaagaggggaagaagaaagaaaaaggaccagaaccgtgaactgaagggacrgggaacagccagacgagagcttcagccatcacgaggatgatttcggaacctggagaaaatgtaagttaaatayatctacactctgatcctatctcaagagagagmtattttactcatttcctggttgtgaatgatgggctcttggaagcactgtctttttagcgcgtctcttatctctgccctgatttttgtatttgtttacaatactgagttatgggagaataaacgttttctgagggcagctctgtccaatgcttcactgttagcagaagcctgtcatcagatttttgaggggaaagttttttacccaacagaaaatgcattgaaaactacccttgatgaagctacctgctatgagtacatggttcgaagccactatgtaacagaaacactctctgaagaagaggctgggttccctttagcttacacagtgaccatccacaaagacttcggcacttttgagaggctcttcagggcgatttatatgccccaaaatgtctactgtgtgcacctggatcagaaggcgacggatgcctttaaaggtgcagtgaaacagttactcagctgcttcccaaatgcttttctggcttccaagaaggagtcggttgtctatggggggatctccaggctccaggctgacctgaactgcctggaagaccttgtggcctctgaagttccctggaagtatgtcatcaacacctgcgggcaagactttcccctgaaaaccaacagggaaatagttcagtatctgaagggatttaaagggaaaaatatcacccccggagtgctgcctcctgaccacgctgttggacggactaaatacgtccaccaagaactgttaaaccacaaaaattcctacgtgattaaaacaacaaaattaaaaactcctcctcctcatgacatggtgatttactttggcacggcctacgtggctctcacaagggactttgctaacttcgtcctccaagaccagctcgcacttgacttactctcctggtccaaggacacctacagccccgacgaacatttctgggtgacactcaacaggattcccggtgttcctggctctatgccaaatgcatcctggactggaaacctcagagctataaagtggagtgacatggaagacagacacggaggctgccacggccactatgtacatggtatttgtatctatggaaacggagacttaaagtggctggttaattcaccaagcctgtttgctaacaagtttgagcttaatacctacccccttactgtggaatgcctagaactgaggcatcrcgaaagaaccctcaatcagagtgaaactgcgatacaacccagctggtatttttgagctattcatgagctactcatgactgaagggaaactgcagctgggaagaggagcctgtttttgtgagagacttttgccttcrtaatgttaaccgtttcaggaccacgtttatagcttcaggacctggctacgtaattatacttaaaatatccactggacactgtgaaatacactaacaggatggctgggtagagcaatctgggcactttggccaattttagtcttgctgtttcttgatgctcacctctatattagtttattgttaggatcaatgataaatttaaatgacctcagatctttgcaccagatactcatcatatacaaatgttttagtaaaaaagagaattgtagataatactgtctaggaaaataagaattaggtttctttgaagaaggaatcttttataacaccttaacagtcaccactgtgctcaaccagacagatagtgaaacagctttctgggtaattcaccaatttcctttaaaacataagctacctgaatggagaatacatcttgtttctgagtttcaacactagcatttttggcttactcatggacaaagttctgtatatagtataaagtcattaacaagaaacaggatatgctttaagacagaattcactgtctgttgcttcagtaaaaggacctcggggaataaaacatttctctcttatatgccagaatgtaggctggtccctatgtcatgtcttccattaagaacactaaaaagtccttgcaagaatggagatatgcattcaagagaggtgctatcacatagatctagtctgaagtctggaacactttcctcttctatgacccctctctccccagtattatcttacttgcaaaatggagaccaaattctatcctgtgaggcttttaattgcaccatagtatgctctgagtagctttacactgcctggtactgatagtagtggctcgatttttaagagccttcaattgtagatgaacatctctgttatttatccctcattcatccatccgttcattcattcagccttcaatcaacatctcttgagtgtctattatgtacaggacatgtactgagacaaaaaggaaacataagagctttttcactctaaaaatcttggcaataatgtcaacaccagaaagcctcctctggagaatcttacagagtgattgtagtttaayacaggaacacacagggctgtgtagcatgataccaggcccaggagatcagtaattacaaattaagggttaaatcagagattattcaacagagagggagaaaggaggagacagagggaggacctgttgtgttccagccattctggtattcctttatgtatctaatttcattcaaacctcacaacagtcttgtgaggcccttatataattactcccattttgcagatgaagtaactgaggcttagaaaggttaatagcaccggggaacaatttctctgggtgagaattgggactctgttgctggtcttctcagttcatttcctgaggtggatttactgagagaaggtgaaataaagccatatttagtayaccagagaaggtagattttaagaatggtctcagtgttaatactgagaaaaagtcctgtcagttcagaaaaaatgtgaagtctactttagtattcctgtaatactaaaccgttgagtttctaaatatttatttattctaacaaaaagcaattactacaaatggatgacacatttaatgaacacaattttattttttttctgtaactgtgcttgttgaatgtcaatcatatttaaagggaatgactttgaagtaaaaccttttttcttgctactgaaaaaaatggagttgttttgggtggtaaagtgttaaggaatagggacagctggtcacacaaggaactcttgaaggccacatgtgaaaacctgtcacttgcacagaggccagtcccactaaggtgaccagagtgggctccaagcacaaactgccattggctatagatgggactgtgtccccccaaaattcatgtgttggagccttaaccctcaatgtgatggtatttgagatggggcctttggtaagggaagtttagatgaggtcacgagggtaggaccctcatgatgggatgagtccccttacaagacctctggcttgggccgggcgtggtggctcacacctgtaatcccaacactttgggaggccaaggcaggtagatcacttgatgccaggagttccagaccaggctggccgacatggtgaaaccccatctctactaaaaaatataaaaattagccgggctttgtggcatgtgcctgtaatcccagctatttggcaggctgaggcatgagaatcgcttgaacccaggaggtggaggttacagtgagctgagagtgccccactgcactccagcctgggtgacagagcgagactttgtcccaaaacaaaataggtgaggggatagcgaatgcactcagggtcagcagtggagtttaaaaattgtctcttttcaacttatttaaatgacagcacctgagaagaggaaccgttttacactggatgtttctcatgtagaacaagaaatctttctggaattgatgtttacatgtctgttgttggtcatctctcctgtgtcttaaatactttaatgttggaagagcatagtgtttgggctagtgggtttctgacagcccatgggaatgccctgaaactactgtatctgatgtttgttttcgatgaggttccatgttttgttttcttgggaataaattaatatattgttttcc

SEQ ID NO: 2008 - DNA, 3222 bp, Homo sapiens
ggtaggtggaggtcagcgtgctgggaaactggtggagggaggaaactgcggggagctggtcttctcgtgttacctctgttaaatcgctgacagcagtttaaggtccaataggctggtactcaaatgggctgcgtggatgttttatatttccagaacctagcacagtgccgggcataaagtgttcctggctctatgccaaatgcatcctggactggaaacctcagagctataaagtggagtgacatggaagacagacacggaggctgccacggccactatgtacatggtatttgtatctatggaaacggagacttaaagtggctggttaattcaccaagcctgtttgctaacaagtttgagcttaatacctacccccttactgtggaatgcctagaactgaggcatcrcgaaagaaccctcaatcagagtgaaactgcgatacaacccagctggtatttttgagctattcatgagctactcatgactgaagggaaactgcagctgggaagaggagcctgtttttgtgagagacttttgccttcrtaatgttaaccgtttcaggaccacgtttatagcttcaggacctggctacgtaattatacttaaaatatccactggacactgtgaaatacactaacaggatggctgggtagagcaatctgggcactttggccaattttagtcttgctgtttcttgatgctcacctctatattagtttattgttaggatcaatgataaatttaaatgacctcagatctttgcaccagatactcatcatatacaaatgttttagtaaaaaagagaattgtagataatactgtctaggaaaataagaattaggtttctttgaagaaggaatcttttataacaccttaacagtcaccactgtgctcaaccagacagatagtgaaacagctttctgggtaattcaccaatttcctttaaaacataagctacctgaatggagaatacatcttgtttctgagtttcaacactagcatttttggcttactcatggacaaagttctgtatatagtataaagtcattaacaagaaacaggatatgctttaagacagaattcactgtctgttgcttcagtaaaaggacctcggggaataaaacatttctctcttatatgccagaatgtaggctggtccctatgtcatgtcttccattaagaacactaaaaagtccttgcaagaatggagatatgcattcaagagaggtgctatcacatagatctagtctgaagtctggaacactttcctcttctatgacccctctctccccagtattatcttacttgcaaaatggagaccaaattctatcctgtgaggcttttaattgcaccatagtatgctctgagtagctttacactgcctggtactgatagtagtggctcgatttttaagagccttcaattgtagatgaacatctctgttatttatccctcattcatccatccgttcattcattcagccttcaatcaacatctcttgagtgtctattatgtacaggacatgtactgagacaaaaaggaaacataagagctttttcactctaaaaatcttggcaataatgtcaacaccagaaagcctcctctggagaatcttacagagtgattgtagtttaayacaggaacacacagggctgtgtagcatgataccaggcccaggagatcagtaattacaaattaagggttaaatcagagattattcaacagagagggagaaaggaggagacagagggaggacctgttgtgttccagccattctggtattcctttatgtatctaatttcattcaaacctcacaacagtcttgtgaggcccttatataattactcccattttgcagatgaagtaactgaggcttagaaaggttaatagcaccggggaacaatttctctgggtgagaattgggactctgttgctggtcttctcagttcatttcctgaggtggatttactgagagaaggtgaaataaagccatatttagtayaccagagaaggtagattttaagaatggtctcagtgttaatactgagaaaaagtcctgtcagttcagaaaaaatgtgaagtctactttagtattcctgtaatactaaaccgttgagtttctaaatatttatttattctaacaaaaagcaattactacaaatggatgacacatttaatgaacacaattttattttttttctgtaactgtgcttgttgaatgtcaatcatatttaaagggaatgactttgaagtaaaaccttttttcttgctactgaaaaaaatggagttgttttgggtggtaaagtgttaaggaatagggacagctggtcacacaaggaactcttgaaggccacatgtgaaaacctgtcacttgcacagaggccagtcccactaaggtgaccagagtgggctccaagcacaaactgccattggctatagatgggactgtgtccccccaaaattcatgtgttggagccttaaccctcaatgtgatggtatttgagatggggcctttggtaagggaagtttagatgaggtcacgagggtaggaccctcatgatgggatgagtccccttacaagacctctggcttgggccgggcgtggtggctcacacctgtaatcccaacactttgggaggccaaggcaggtagatcacttgatgccaggagttccagaccaggctggccgacatggtgaaaccccatctctactaaaaaatataaaaattagccgggctttgtggcatgtgcctgtaatcccagctatttggcaggctgaggcatgagaatcgcttgaacccaggaggtggaggttacagtgagctgagagtgccccactgcactccagcctgggtgacagagcgagactttgtcccaaaacaaaataggtgaggggatagcgaatgcactcagggtcagcagtggagtttaaaaattgtctcttttcaacttatttaaatgacagcacctgagaagaggaaccgttttacactggatgtttctcatgtagaacaagaaatctttctggaattgatgtttacatgtctgttgttggtcatctctcctgtgtcttaaatactttaatgttggaagagcatagtgtttgggctagtgggtttctgacagcccatgggaatgccctgaaactactgtatctgatgtttgttttcgatgaggttccatgttttgttttcttgggaataaattaatatattgttttcc

SEQ ID NO: 2009 - DNA, 604 bp, Homo sapiens
acacacagaacctctgcttttgtacataaattagtaccttactggctagggaatgttgaatcacagttggatgaagaaacaattcatgttaatgtttctctaaagttctttaacacattattgaaattacaagcatccaaagcagtttcatgtggacagattgcatattttgaaagcctgaggtattttatcatgaaacatgccatgtggaatctttgaagcatagacctctgcgcaacacctgaataaagaatcttttacctggtatgtgacagagcttctcaccaccaccatgacaaaccaggaaaaatgggcccacctcagcccttcggaattttcccaacttcagawatatgctgagtattctacaaagaaattaaaggatgttcttgaagaattccatggtaatggtgtgcttgcaaagtataatcctgaagggaaacaagacattcttaaccaagtctgagaatgaataaaggtgccatcacccctccccgractacttctcctgcaaatacgtgttccccagaagtaatccatctgaaggacattgtctgttacctgtctctgcttgaaagaggaagacctgaggataagcttgagt

SEQ ID NO: 2010 - DNA, 4410 bp, Homo sapiens
acacacagaacctctgcttttgtacataaattagtaccttactggctagggaatgttgaatcacagttggatgaagaaacaattcatgttaatgtttctctaaagttctttaacacattattgaaattacaagcatccaaagcagtttcatgtggacagattgcatattttgaaagcctgaggtattttatcatgaaacatgccatgtggaatctttgaagcatagacctctgcgcaacacctgaataaagaatcttttacctggtatgtgacagagcttctcaccaccaccatgacaaaccaggaaaaatgggcccacctcagcccttcggaattttcccaacttcagawatatgctgagtattctacaaagaaattaaaggatgttcttgaagaattccatggtaatggtgtgcttgcaaagtataatcctgaagggaaacaagacattcttaaccaaacaatagattttgaaggtttcaaactattcatgaagacattcctggaagccgagcttcctgatgatttcactgcacaccttttcatgtcatttagcaacaagtttcctcattctagtccaatggtaaaaagtaagcctgctctcctatcaggcggtctgagaatgaataaaggtgccatcacccctccccgractacttctcctgcaaatacgtgttccccagaagtaatccatctgaaggacattgtctgttacctgtctctgcttgaaagaggaagacctgaggataagcttgagtttatgtttcgcctttatgacacggatgggaatggcttcctggacagctcggagctagaaaatatcatcagtcagatgatgcatgttgcagaataccttgagtgggatgtcactgaacttaatccaatcctccatgaaatgatggargaaattgactatgatcatgatggaaccgtgtctctggaggaatggattcaaggaggaatgacaacgattccacttcttgtgctcctgggcttagaaaataacgtgaaggatgatggacagcacgtgtggcgactgaagcactttaacaaacctgcctattgcaacctttgcctgaacatgctgattggcgtggggaagcagggcctctgctgttccttctgcaagtacacagtccatgagcgctgtgtggctcgagcacctccctcttgcatcaagacctatgtgaagtccaaaaggaacactgatgtcatgcaccattactgggttgaaggtaactgcccaaccaagtgtgataagtgccacaaaactgttaaatgttaccagggcctgacaggactgcattgtgtttggtgtcagatcacactgcataataaatgtgcttctcatctaaaacctgaatgtgactgtggacctttgaaggaccatattttaccacccacaacaatctgtccagtggtactgcagactctgcccacttcaggagtttcagttcctgaggaaagacaatcaacagtgaaaaaggaaaagagtggttcccagcagccaaacaaagtgattgacaagaataaaatgcaaagagccaactctgttactgtagatggacaaggcctgcaggtcactcctgtgcctggtactcacccacttttagtttttgtgaaccccaaaagtggtggaaaacaaggagaacgaatttacagaaaattccagtatctattaaatcctcgtcaggtttacagtctttctggaaatggaccaatgccagggttaaactttttccgtgatgttcctgacttcagagtgttagcctgtggtggagatggaaccgtgggctgggttttggattgcatagaaaaggccaatgtaggcaagcatcctccagttgcgattctgcctcttgggactggcaatgatctagcaagatgcctgcgatggggaggaggttacgaaggtgagaatctgatgaaaattctaaaagacattgaaaacagcacagaaatcatgttggacaggtggaagtttgaagtcatacctaatgacaaagatgagaaaggagacccagtgccttacagtatcatcaataattacttttccattggcgtggatgcctccattgcacacagattccacatcatgagagaaaaacacccagagaaattcaacagtagaatgaagaacaaattttggtattttgagtttggcacatctgaaactttctcagccacctgcaagaagctacaygaatctgtagaaatagaatgtgatggagtacagatagatttaataaacatctctctggaaggaattgctattttgaatataccaagcatgcatggaggatccaatctttggggagagtctaagaaaagacgaagccatcgacgaatagagaaaaaagggtctgacaaaaggaccaccgtcacagatgccaaagagttgaagtttgcaagtcaagatctcagtgaccagctgctggaggtggtcggcttggaaggagccatggagatggggcaaatatacacaggcctgaaaagtgctggccggcggctggctcagtgytcctgcgtggtcatcaggacgagcaagtctctgccaatgcaaattgatggggagccatggatgcagaccccatgcacaataaaaattacacacaagaaccaagccccaatgctgatgggcccgcctccaaaaaccrgtttattctgctccctcgtcaaaaggacaagaaaccgaagcaaggaataatcctgtgttgtttcactcttagaaattgaattagcataattgggccatggaacacatatgctggaaatctttgaaccatttcaagtctcctgctcatgcaaaatcatggaagtggtttaacagtttttgttactaagctaatgtaaaattcagctattagaaaatttattgtctcagtttttataggcatctttgcatgaagaaagcagaagtttacctgaagtgatactgcatatttttggtgcatgcattcccatagatttttacatctcccacccaactcttccccaatttccttttactaacctgtgagaaaaacccgtgaaacatgaaaaaggaaataccatgggaaacgtgattctcagtgtgattccaattattacgaagcactaatcagtaacgctacaatgatcataattgcagattgctatacgtttcccttttagaatcagtgtatcagtgacctatgacttgaggagaaacttttaattcgaagattttattaaatagttgactacaataccttgctatatatacatagtttttcttcaacatcttaactcttctgagtggaaataaaaatatcaggcataaggttttctcatgctgaaaaatagaacgcggtttttattttgcttagttttctttttaattccagaaataagtgaaaacatgttacttgacagtcaagtgtggtaatatggcaagccttgttcctttctgcatgagaatctaggagagaattcataaccacaccaataacgaaatagaagttttaaactatgtgcctaatcaatgtgtttcccaccaaagattcagaaaacaatgcttgagagaaatgggttaatgcataattaattaagcattgtggagcaaatttagggttcctgtgattaattttgtgatgactaaaatgctggaaagcragtgagttgcccattaattatgattaaaattctcacctttcacagacagacaataagccagacaacacaatcaaagctcaatagatgatttcttgcttttttcagtcatttataaatataggtgtaatttttcatggatcagttaagtacacttgaaggaagtaaatgattgtatcagtttatttctagtataaatgggtacctgtaataatactgagctcttggaagcgaatcatgcatgcaattagctccctcctcctcacctactccactcccatctttatgacatttcaaatgtttatttggraacaacagcctagatcactgttgaaggtgttcatggcatagttggagtctctgactgtttaaagaaatcacagaacagtacttttcttttagtgtttcattaagcctatgatgtaaaatgaaatgcttctgagcagtcttgtaatattgttcattcatattgacctgcatctcatcattgcatgttttatgttttcaaacatgccataaggaaaacgagtgcctgaactgcatgatttattagtttctctccactctgcattaaagtgctaatgatttatcggttctattttgttattgattcattcatctttctttgaataacaaatagcatttagtgattctgttgaacacaatcctgtgcatggatttatggatttcaagtgaaattgctataattttagttctttggtttgaaaactcaactgaatgctgttatatcaaatagctgctctcaagcaatgtgctata

SEQ ID NO: 2011 - DNA, 4443 bp, Homo sapiens
acacacagaacctctgcttttgtacataaattagtaccttactggctagggaatgttgaatcacagttggatgaagaaacaattcatgttaatgtttctctaaagttctttaacacattattgaaattacaagcatccaaagcagtttcatgtggacagattgcatattttgaaagcctgaggtattttatcatgaaacatgccatgtggaatctttgaagcatagacctctgcgcaacacctgaataaagaatcttttacctggtatgtgacagagcttctcaccaccaccatgacaaaccaggaaaaatgggcccacctcagcccttcggaattttcccaacttcagawatatgctgagtattctacaaagaaattaaaggatgttcttgaagaattccatggtaatggtgtgcttgcaaagtataatcctgaagggaaacaagacattcttaaccaaacaatagattttgaaggtttcaaactattcatgaagacattcctggaagccgagcttcctgatgatttcactgcacaccttttcatgtcatttagcaacaagtttcctcattctagtccaatggtaaaaagtaagcctgctctcctatcaggcggtctgagaatgaataaaggtgccatcacccctccccgractacttctcctgcaaatacgtgttccccagaagtaatccatctgaaggacattgtctgttacctgtctctgcttgaaagaggaagacctgaggataagcttgagtttatgtttcgcctttatgacacggatgggaatggcttcctggacagctcggagctagaaaatatcatcagtcagatgatgcatgttgcagaataccttgagtgggatgtcactgaacttaatccaatcctccatgaaatgatggargaaattgactatgatcatgatggaaccgtgtctctggaggaatggattcaaggaggaatgacaacgattccacttcttgtgctcctgggcttagaaaatgtaagcatttccacagaggagggtggcctggtgaacgtgaaggatgatggacagcacgtgtggcgactgaagcactttaacaaacctgcctattgcaacctttgcctgaacatgctgattggcgtggggaagcagggcctctgctgttccttctgcaagtacacagtccatgagcgctgtgtggctcgagcacctccctcttgcatcaagacctatgtgaagtccaaaaggaacactgatgtcatgcaccattactgggttgaaggtaactgcccaaccaagtgtgataagtgccacaaaactgttaaatgttaccagggcctgacaggactgcattgtgtttggtgtcagatcacactgcataataaatgtgcttctcatctaaaacctgaatgtgactgtggacctttgaaggaccatattttaccacccacaacaatctgtccagtggtactgcagactctgcccacttcaggagtttcagttcctgaggaaagacaatcaacagtgaaaaaggaaaagagtggttcccagcagccaaacaaagtgattgacaagaataaaatgcaaagagccaactctgttactgtagatggacaaggcctgcaggtcactcctgtgcctggtactcacccacttttagtttttgtgaaccccaaaagtggtggaaaacaaggagaacgaatttacagaaaattccagtatctattaaatcctcgtcaggtttacagtctttctggaaatggaccaatgccagggttaaactttttccgtgatgttcctgacttcagagtgttagcctgtggtggagatggaaccgtgggctgggttttggattgcatagaaaaggccaatgtaggcaagcatcctccagttgcgattctgcctcttgggactggcaatgatctagcaagatgcctgcgatggggaggaggttacgaaggtgagaatctgatgaaaattctaaaagacattgaaaacagcacagaaatcatgttggacaggtggaagtttgaagtcatacctaatgacaaagatgagaaaggagacccagtgccttacagtatcatcaataattacttttccattggcgtggatgcctccattgcacacagattccacatcatgagagaaaaacacccagagaaattcaacagtagaatgaagaacaaattttggtattttgagtttggcacatctgaaactttctcagccacctgcaagaagctacaygaatctgtagaaatagaatgtgatggagtacagatagatttaataaacatctctctggaaggaattgctattttgaatataccaagcatgcatggaggatccaatctttggggagagtctaagaaaagacgaagccatcgacgaatagagaaaaaagggtctgacaaaaggaccaccgtcacagatgccaaagagttgaagtttgcaagtcaagatctcagtgaccagctgctggaggtggtcggcttggaaggagccatggagatggggcaaatatacacaggcctgaaaagtgctggccggcggctggctcagtgytcctgcgtggtcatcaggacgagcaagtctctgccaatgcaaattgatggggagccatggatgcagaccccatgcacaataaaaattacacacaagaaccaagccccaatgctgatgggcccgcctccaaaaaccrgtttattctgctccctcgtcaaaaggacaagaaaccgaagcaaggaataatcctgtgttgtttcactcttagaaattgaattagcataattgggccatggaacacatatgctggaaatctttgaaccatttcaagtctcctgctcatgcaaaatcatggaagtggtttaacagtttttgttactaagctaatgtaaaattcagctattagaaaatttattgtctcagtttttataggcatctttgcatgaagaaagcagaagtttacctgaagtgatactgcatatttttggtgcatgcattcccatagatttttacatctcccacccaactcttccccaatttccttttactaacctgtgagaaaaacccgtgaaacatgaaaaaggaaataccatgggaaacgtgattctcagtgtgattccaattattacgaagcactaatcagtaacgctacaatgatcataattgcagattgctatacgtttcccttttagaatcagtgtatcagtgacctatgacttgaggagaaacttttaattcgaagattttattaaatagttgactacaataccttgctatatatacatagtttttcttcaacatcttaactcttctgagtggaaataaaaatatcaggcataaggttttctcatgctgaaaaatagaacgcggtttttattttgcttagttttctttttaattccagaaataagtgaaaacatgttacttgacagtcaagtgtggtaatatggcaagccttgttcctttctgcatgagaatctaggagagaattcataaccacaccaataacgaaatagaagttttaaactatgtgcctaatcaatgtgtttcccaccaaagattcagaaaacaatgcttgagagaaatgggttaatgcataattaattaagcattgtggagcaaatttagggttcctgtgattaattttgtgatgactaaaatgctggaaagcragtgagttgcccattaattatgattaaaattctcacctttcacagacagacaataagccagacaacacaatcaaagctcaatagatgatttcttgcttttttcagtcatttataaatataggtgtaatttttcatggatcagttaagtacacttgaaggaagtaaatgattgtatcagtttatttctagtataaatgggtacctgtaataatactgagctcttggaagcgaatcatgcatgcaattagctccctcctcctcacctactccactcccatctttatgacatttcaaatgtttatttggraacaacagcctagatcactgttgaaggtgttcatggcatagttggagtctctgactgtttaaagaaatcacagaacagtacttttcttttagtgtttcattaagcctatgatgtaaaatgaaatgcttctgagcagtcttgtaatattgttcattcatattgacctgcatctcatcattgcatgttttatgttttcaaacatgccataaggaaaacgagtgcctgaactgcatgatttattagtttctctccactctgcattaaagtgctaatgatttatcggttctattttgttattgattcattcatctttctttgaataacaaatagcatttagtgattctgttgaacacaatcctgtgcatggatttatggatttcaagtgaaattgctataattttagttctttggtttgaaaactcaactgaatgctgttatatcaaatagctgctctcaagcaatgtgctata

SEQ ID NO: 2012 - DNA, 2286 bp, Homo sapiens
  misc_feature (1)...(2286): n = A,T,C or G
ggcgcgggcgcactggccgcatagagacgcagcgcacgcgcagtcgcgtatccgtgtgatgggcgggctgttgacggcgctgcgatggctgcctgcgagggcaggagaagcggagctctcggttcctctcagtcggacttcctgacgccgccagtgggcggggccccttgggccgtcgccaccactgtagtcatgtacccaccgccgccgccgccgcctcatcgggacttcatctcggtgacgctgagctttggcgagarctatgacaacagcaagagttggcggcggcgctcgtgctggaggaaatggaagcaactgtcgagattgcagcggaatatgattctcttcctccttgcctttctgcttttctgtggactcctcttctacatcaacttggctgaccattggaaagctctggctttcaggctagaggaagagcagaagatgaggccagaaattgctgggttaaaaccagcaaatccacccgtcttaccagctcctcagaaggcggacaccgaccctgagaacttacctgagatttcgtcacagaagacacaaagacacatccagcggggaccacctcacctgcagattagacccccaagccaagacctgaaggatgggacccaggaggaggccacaaaaaggcaagaagcccctgtggatccccgccyggaaggagatccgcagaggacagtcatcagctggaggggagcggtgatcgagcctgagcagggcaccgagctnnnnnnnnnnnnnnnnnnnncagaagtgcccaccaagtcctcccctgccaccggaccagggacacagggcacaccagtgcatctgaactatcgccagaagggcgtgattgacgtcttcctgcatgcatggaaaggataccgcaagtttgcatggggccatgacgagctgaagcctgtgtccaggtccttcagtgagtggtttggcctcggtctcacactgatcgacgcgctggacaccatgtggatcttgggtctgaggaaagaatttgaggaagccaggaagtgggtgtcgaagaagttacactttgaaaaggacgtggacgtcaacctgtttgagagcacgatccgcatcctgggggggctcctgagtgcctaccacctgtctggggacagcctcttcctgaggaaagctgaggattttggaaatcggctaatgcctgccttcagaacaccatccaagattccttactcggatgtgaacatcggtactggagttgcccacccgccacggtggacctccgacagcactgtggccgaggtgaccagcattcagctggagttccgggagctctcccgtctcacaggggataagaagtttcaggaggcagtggagaaggtgacacagcacatccacggcctgtctgggaagaaggatgggctggtgcccatgttcatcaatacccacagtggcctcttcacccacctgggcgtattcacgctgggcgccagggccgacagctactatgagtacctgctgaagcagtggatccagggcgggaagcaggagacacagctgctggaagactacgtggaagccatcgagggtgtcagaacgcacctgctgcggcactccgagcccagtaagctcacctttgtgggggagcttgcccacggccgcttcagtgccaagatggaccacctggtgtgcttcctgccagggacgctggctctgggcgtctaccacggcctgcccgccagccacatggagctggcccaggagctcatggagacttgttaccagatgaaccggcagatggagacggggctgagtcccgagatygtgcacttcaacctttacccccagccgggccgtcgggacgtggaggtcaagccagcagacaggcacaacctgctgcggccagagaccgtggagagcctgttctacctgtaccgcgtcacaggggaccgcaaataccaggactggggctgggagattctgcagagcttcagccgattcacacgggtgagcacctgtcctcgccccgcgtggtcacggccaccgggccacaggcacggctgggctgtggrgctcaggytggctccgctcttggtggtggctgtgacctgggtccgggaggggcgggcttgccgcagcctcggggtggccacrctgcagcttgggggccctggcatccccatccccactgagcttcatggttgtgggacccagagtacttggaggggctgggcamccctcattttcatttctcagggcctgtctagggagggtctctgctgtgggcccagcatccccccagtt

SEQ ID NO: 2013 - DNA, 2795 bp, Homo sapiens
  misc_feature (1)...(2795): n = A,T,C or G
ggcgcgggcgcactggccgcatagagacgcagcgcacgcgcagtcgcgtatccgtgtgatgggcgggctgttgacggcgctgcgatggctgcctgcgagggcaggagaagcggagctctcggttcctctcagtcggacttcctgacgccgccagtgggcggggccccttgggccgtcgccaccactgtagtcatgtacccaccgccgccgccgccgcctcatcgggacttcatctcggtgacgctgagctttggcgagarctatgacaacagcaagagttggcggcggcgctcgtgctggaggaaatggaagcaactgtcgagattgcagcggaatatgattctcttcctccttgcctttctgcttttctgtggactcctcttctacatcaacttggctgaccattggaaagctctggctttcaggctagaggaagagcagaagatgaggccagaaattgctgggttaaaaccagcaaatccacccgtcttaccagctcctcagaaggcggacaccgaccctgagaacttacctgagatttcgtcacagaagacacaaagacacatccagcggggaccacctcacctgcagattagacccccaagccaagacctgaaggatgggacccaggaggaggccacaaaaaggcaagaagcccctgtggatccccgccyggaaggagatccgcagaggacagtcatcagctggaggggagcggtgatcgagcctgagcagggcaccgagctnnnnnnnnnnnnnnnnnnnncagaagtgcccaccaagtcctcccctgccaccggaccagggacacagggcacaccagtgcatctgaactatcgccagaagggcgtgattgacgtcttcctgcatgcatggaaaggataccgcaagtttgcatggggccatgacgagctgaagcctgtgtccaggtccttcagtgagtggtttggcctcggtctcacactgatcgacgcgctggacaccatgtggatcttgggtctgaggaaagaatttgaggaagccaggaagtgggtgtcgaagaagttacactttgaaaaggacgtggacgtcaacctgtttgagagcacgatccgcatcctgggggggctcctgagtgcctaccacctgtctggggacagcctcttcctgaggaaagctgaggattttggaaatcggctaatgcctgccttcagaacaccatccaagattccttactcggatgtgaacatcggtactggagttgcccacccgccacggtggacctccgacagcactgtggccgaggtgaccagcattcagctggagttccgggagctctcccgtctcacaggggataagaagtttcaggaggcagtggagaaggtgacacagcacatccacggcctgtctgggaagaaggatgggctggtgcccatgttcatcaatacccacagtggcctcttcacccacctgggcgtattcacgctgggcgccagggccgacagctactatgagtacctgctgaagcagtggatccagggcgggaagcaggagacacagctgctggaagactacgtggaagccatcgagggtgtcagaacgcacctgctgcggcactccgagcccagtaagctcacctttgtgggggagcttgcccacggccgcttcagtgccaagatggaccacctggtgtgcttcctgccagggacgctggctctgggcgtctaccacggcctgcccgccagccacatggagctggcccaggagctcatggagacttgttaccagatgaaccggcagatggagacggggctgagtcccgagatygtgcacttcaacctttacccccagccgggccgtcgggacgtggaggtcaagccagcagacaggcacaacctgctgcggccagagaccgtggagagcctgttctacctgtaccgcgtcacaggggaccgcaaataccaggactggggctgggagattctgcagagcttcagccgattcacacgggtcccctcgggtggctattcttccatcaacaatgtycaggatcctcagaagcccgagcctagggacaagatggagagcttcttcctgggggagacgctcaagtatctgttcttgctcttctccgatgacccaaacctgctcagcctggaygcctacgtgttcaacaccgaagcccaccctctgcctatctggacccctgcctagggtggatggctgctggtgtggggacttcgggtgggcagaggcaccttgctgggtctgtggcattttccaagggcccacgtagcaccggcaaccgccaagtggcccaggctctgaactggctctgggctcctcctcgtctctgctttaatcaggacaccgtgaggacaagtgaggccgtcagtcttggtgtgatgcggggtgggctgggccgctggagcctccgcctgcttcctccagaagacacgaatcatgactcacgattgctgaagcctgagcaggtctctgtgggccgaccagaggggggcttcgaggtggtccctggtactggggtgaccgagtggacagcccagggtgcagctctgcccgggctcgtgaagcctcagrtgtccccaatccaagggtctggaggggctgccgtgactccagaggcctgaggctccagggctggctctggtgtttacaagctggactcagggatcctcctggccgccccgcagggggcttggagggctggacggcaagtccgtctagctcacgggcccctccagtggaatgggtcttttcggtggagataaaagttgatttgctctaaccgcaatgtc

SEQ ID NO: 2014 - DNA, 5573 bp, Homo sapiens
gcagagctgcagaggcaccggacgagagagggctccgcgggcccagctggcagccaggccggagacaagttgcagtcccgggctctggtgacgccgtggccgcagcatgggcttctgcctggctctagcatggacacttctggttggggcatggacccctctgggagctcagaaccccatttcgtgggaggtgcagcgatttgatgggtggtacaacaacctcatggagcacagatggggcagcaaaggctcccggctgcagcgcctggtcccagccagctatgcagatggcgtgtaccagcccttgggagaaccccacctgcccaacccccgagaccttagcaacaccatctcaaggggccctgcagggctggcctccctgagaaaccgcacagtgttgggggtcttctttggctatcacgtgctttcagacctggtgagcgtggaaactcccggctgccccgccgagttcctcaacattcgcatcccgcccggagaccccatgttcgaccccgaccagcgcggggacgtggtgctgcccttccagagaagccgctgggaccccgagaccggacggagtcccagcaatccccgggacccggccaaccaggtgacgggctggctggacggcagcgccatctatggttcctcgcattcctggagcgacgcgctgcggagcttctccaggggacagctggcgtcggggcccgaccccgcttttccccgagactcgcagaaccccctgctcatgtgggcggcgcccgaccccgccaccgggcagaacgggccccgggggctgtacgcagaacatcgctgtgtatgagtggctgcccagcttcctgcagaaaacactcccggagtatacaggataccggccatttctggaccccagcatctcctcagagttcgtggcggcctctgagcagttcctgtccaccatggtgccccctggcgtctacatgagaaatgccagctgccacttccagggggtcatcaatcggaactcaagtgtctccagagctctccgggtctgcaacagctactggagccgtgagcacccaagcctacaaagtgctgaagatgtggatgcactgctgctgggcatggcctcccagatcgcagagcgagaggaccatgtgttggttgaagatgtgcgggatttctggcctgggccactgaagttttcccgcacagaccacctggccagctgcctgcagcggggccgggatctgggcctgccctcttacaccaaggccagggcagcactgggcttgtctcccattacccgctggcaggacatcaaccctgcactctcccggagcaatgacactgtactggaggccacagctgccctgtacaaccaggacttatcctggctagagctgctccctgggggactcctggagagccaccgggaccctggacctctgttcagcaccatcgtccttgaacaatttgtgcggctacgggatggtgaccgctactggtttgagaacaccaggaatgggctgttctccaagaaggagattgaagaaatccgaaataccaccctgcaggacgtgctggtcgctgttatcaacattgaccccagtgctctgcagcccaatgtctttgtctggcataaaggagacccctgtccgcagccgagacagctcagcactgaaggcctgccagcgtgtgctccctctgttgttcgtgactattttgagggcagtggatttggcttcggggtcaccatcgggaccctctgttgcttccctttggtgagcctgctcagtgcctggattgttgcccggctccggatgagaaatttcaagaggctccagggccaggaccgccagagcatcgtgtctgagaagctcgtgggaggcatggaagctttggaatggcaaggccacaaggagccctgccggcccgtgcttgtgtacctgcagcccgggcagatccgtgtggtagatggcaggctcaccgtgctccgcaccatccagctgcagcctccacagaaggtcaacttcgtcctgtccagcaaccgtggacgccgcactctgctgctcaagatccccaaggagtatgacctggtgctgctgtttaacttggaggaagagcggcaggcgctggtggaaaatctccggggagctctgaaggagagcgggttgagcatccaggagtgggagctgcgggagcaggagctgatgagagcagctgtgacacgggagcagcggaggcacctcctggagacctttttcaggcaccttttctcccaggtgctggacatcaaccaggccgacgcagggaccctgcccctggactcctcccagaaggtgcgggaggccctgacctgtgagctgagcagggccgagtttgccgagtccctgggcctcaagccccaggacatgtttgtggagtccatgttctctctggctgacaaggatggcaatggctacctgtccttccgagagttcctggacatcctggtggtcttcatgaaaggctctcctgaggaaaagtctcgccttatgttccgcatgtacgactttgatgggaatggcctcatttccaaggatgagttcatcaggatgctgagatccttcatcgagatctccaacaactgcctgtccaaggcccagctggctgaggtggtggagtccatgttccgggagtcgggattccaggacaaggaggaactgacatgggaagattttcacttcatgctgcgggaccacaatagcgagctccgcttcacgcagctctgtgtcaaaggggtggaggtgcctgaagtcatcaaggacctctgccggcgagcctcctacatcagccaggatatgatctgtccctctcccagagtgagtgcccgctgttcccgcagcgacattgagactgagttgacacctcagagactgcagtgccccatggacacagaccctccccaggagattcggcggaggtttggcaagaaggtaacgtcattccagcccttgctgttcactgaggcgcaccgagagaagttccaacgcagctgtctccaccagacggtgcaacagttcaagcgcttcattgagaactaccggcgccacatcggctgcgtggccgtgttctacgccatcgctggggggcttttcctggagagggcctactactacgcctttgccgcacatcacacgggcatcacrgacaccacccgcgtgggaatcatcctgtcgcggggcacagcagccagcatctctttcatgttctcctacatcttgctcaccatgtgccgcaacctcatcaccttcctgcgagaaaccttcctcaaccgctacgtgcccttcgacgccgccgtggacttccatcgcctcattgcctccaccgccatcgtcctcacagtcttacacagtgtgggccatgtggtgaatgtgtacctgttctccatcagccccctcagcgtcctctcttgcctctttcctggcctcttccatgatgatgggtctgagytcccccagaagtattactggtggttcttccagaccgtaccaggcctcacgggggttgtgctgctcctgatcctggccatcatgtatgtctttgcctcccaccacttccgccgccrcagtttccggggcttctggctgacccaccacctctacatcctgctctatgtcctgctcatcatccatggtagctttgccctgatccagctgccccgtttccacatcttcttcctggtcccagcaatcatctatgggggcgacaagctggtgagcctgagccggaagaaggtggagatcagcgtggtgaaggcggagctgctgccctcaggagtgacccacctgcggttccagcggccccagggctttgagtacaagtcagggcagtgggtgcggatcgcttgcctggctctggggaccaccgagtaccaccccttcacactgacctctgcgccccatgaggacacgcttagcctgcacatccgggcagcagggccctggaccactcgcctcagggagatctactcagccccgacgggtgacagatgtgccagatacccaaagctgtaccttgatggaccatttggagagggccaccaggagtggcataagtttgaggtgtcagtgttagtgggagggggcattggggtcaccccttttgcctccatcctcaaagacctggtcttcaagtcatccgtcagctgccaagtgttctgtaagaagatctacttcatctgggtgacgcggacccagcgtcagtttgagtggctggctgacatcatccgagaggtggaggagaatgaccaccaggacctggtgtctgtgcacatctacatcacccagctggctgagaagttcgacctcaggaccactatgctgtacatctgtgagcggcacttccagaaggttctgaaccggagtctattcacaggcctgcgctccatcacccactttggccgtcccccctttgagcccttcttcaactccctgcaggaggtccacccccaggtccggaagatcggggtgtttagctgtggcccccctggcatgaccaagaatgtggaaaaggcctgtcagctcatcaacaggcaggaccggactcacttctcccaccattatgagaacttctaggccccttcccgggggttctgcccactgyccagttgagcagaggtttgagcccacacctcacctctgttcttcctatttctggctgmctcagccttctctgatttcccacctcccaaccttgttccaggtggccatagtcagtcaccatgtgtgggctcagggacccccaggaccaggatgtgtctcagcctggagaaatggtgggggggcagtgtctagggactagagtgagaagtaggggagctactgrtttggggcaaagtgaaacctctgcttccagacttcagaaacaaatctcagaagacaagctgacctgacaagtactatgtgtgtgcatgtctgtatgtgtgttggggcgktgagtgtaaggatgcagtgggagcatggatgctggcatcttagaaccctccctactcccakacctcctcctcttctgggctccccactgtcagacgggctggcaaatgccttgcaggaggtagaggctggacccatggcaagccatttacagaaacccactcggcaccccagtctaacaccacaactaatttcacccaaggttttaagcacgttctttcatcagaccctggcccaatacctatgtatgcaatgctcctcagccctcttctccctgctccagtagtctcccttccaaataaatcacttttctgccttcagggtttctttattctgccctaggaccggaaggggcatggggagaggaagccactaacccagccagctcaccaggctggcccagacatctctcaagctgcccagtgtcctgagtaaaggagctggcccaaggcaaagtgccccagctagcaatcccttccccggcccaggggtgcccttcctgacagagggcctgtcagccactagtgtgaggcctggtgagcctgctcaggaggggcagaaacagagggtgtggaagcttctggaggaggttggctggggaagagaacggggtsgggg

SEQ ID NO: 2015 - DNA, 5815 bp, Homo sapiens
gcgcagagctgcagaggcaccggacgagagagggctccgcgggcccagctggcagccaggccggagacaagttgcagtcccgggctctggtgacgccgtggccgcagctggaagaggaaaacaaggatcagattggagaagtgatttatctaagatcccacagtggactggsagcagcactgagacctcagcctagtctcctgatccccaagcagggccctgcctaaggaacacactctgcagagtgctgggccaaagcagggttttccaactaatcttagaaggtaaagtccatgaagggtctccattttgggacattctaatccctgagcccctattattttcatcatgggcttctgcctggctctagcatggacacttctggttggggcatggacccctctgggagctcagaaccccatttcgtgggaggtgcagcgatttgatgggtggtacaacaacctcatggagcacagatggggcagcaaaggctcccggctgcagcgcctggtcccagccagctatgcagatggcgtgtaccagcccttgggagaaccccacctgcccaacccccgagaccttagcaacaccatctcaaggggccctgcagggctggcctccctgagaaaccgcacagtgttgggggtcttctttggctatcacgtgctttcagacctggtgagcgtggaaactcccggctgccccgccgagttcctcaacattcgcatcccgcccggagaccccatgttcgaccccgaccagcgcggggacgtggtgctgcccttccagagaagccgctgggaccccgagaccggacggagtcccagcaatccccgggacccggccaaccaggtgacgggctggctggacggcagcgccatctatggttcctcgcattcctggagcgacgcgctgcggagcttctccaggggacagctggcgtcggggcccgaccccgcttttccccgagactcgcagaaccccctgctcatgtgggcggcgcccgaccccgccaccgggcagaacgggccccgggggctgtacgcagaacatcgctgtgtatgagtggctgcccagcttcctgcagaaaacactcccggagtatacaggataccggccatttctggaccccagcatctcctcagagttcgtggcggcctctgagcagttcctgtccaccatggtgccccctggcgtctacatgagaaatgccagctgccacttccagggggtcatcaatcggaactcaagtgtctccagagctctccgggtctgcaacagctactggagccgtgagcacccaagcctacaaagtgctgaagatgtggatgcactgctgctgggcatggcctcccagatcgcagagcgagaggaccatgtgttggttgaagatgtgcgggatttctggcctgggccactgaagttttcccgcacagaccacctggccagctgcctgcagcggggccgggatctgggcctgccctcttacaccaaggccagggcagcactgggcttgtctcccattacccgctggcaggacatcaaccctgcactctcccggagcaatgacactgtactggaggccacagctgccctgtacaaccaggacttatcctggctagagctgctccctgggggactcctggagagccaccgggaccctggacctctgttcagcaccatcgtccttgaacaatttgtgcggctacgggatggtgaccgctactggtttgagaacaccaggaatgggctgttctccaagaaggagattgaagaaatccgaaataccaccctgcaggacgtgctggtcgctgttatcaacattgaccccagtgctctgcagcccaatgtctttgtctggcataaaggagacccctgtccgcagccgagacagctcagcactgaaggcctgccagcgtgtgctccctctgttgttcgtgactattttgagggcagtggatttggcttcggggtcaccatcgggaccctctgttgcttccctttggtgagcctgctcagtgcctggattgttgcccggctccggatgagaaatttcaagaggctccagggccaggaccgccagagcatcgtgtctgagaagctcgtgggaggcatggaagctttggaatggcaaggccacaaggagccctgccggcccgtgcttgtgtacctgcagcccgggcagatccgtgtggtagatggcaggctcaccgtgctccgcaccatccagctgcagcctccacagaaggtcaacttcgtcctgtccagcaaccgtggacgccgcactctgctgctcaagatccccaaggagtatgacctggtgctgctgtttaacttggaggaagagcggcaggcgctggtggaaaatctccggggagctctgaaggagagcgggttgagcatccaggagtgggagctgcgggagcaggagctgatgagagcagctgtgacacgggagcagcggaggcacctcctggagacctttttcaggcaccttttctcccaggtgctggacatcaaccaggccgacgcagggaccctgcccctggactcctcccagaaggtgcgggaggccctgacctgtgagctgagcagggccgagtttgccgagtccctgggcctcaagccccaggacatgtttgtggagtccatgttctctctggctgacaaggatggcaatggctacctgtccttccgagagttcctggacatcctggtggtcttcatgaaaggctctcctgaggaaaagtctcgccttatgttccgcatgtacgactttgatgggaatggcctcatttccaaggatgagttcatcaggatgctgagatccttcatcgagatctccaacaactgcctgtccaaggcccagctggctgaggtggtggagtccatgttccgggagtcgggattccaggacaaggaggaactgacatgggaagattttcacttcatgctgcgggaccacaatagcgagctccgcttcacgcagctctgtgtcaaaggggtggaggtgcctgaagtcatcaaggacctctgccggcgagcctcctacatcagccaggatatgatctgtccctctcccagagtgagtgcccgctgttcccgcagcgacattgagactgagttgacacctcagagactgcagtgccccatggacacagaccctccccaggagattcggcggaggtttggcaagaaggtaacgtcattccagcccttgctgttcactgaggcgcaccgagagaagttccaacgcagctgtctccaccagacggtgcaacagttcaagcgcttcattgagaactaccggcgccacatcggctgcgtggccgtgttctacgccatcgctggggggcttttcctggagagggcctactactacgcctttgccgcacatcacacgggcatcacrgacaccacccgcgtgggaatcatcctgtcgcggggcacagcagccagcatctctttcatgttctcctacatcttgctcaccatgtgccgcaacctcatcaccttcctgcgagaaaccttcctcaaccgctacgtgcccttcgacgccgccgtggacttccatcgcctcattgcctccaccgccatcgtcctcacagtcttacacagtgtgggccatgtggtgaatgtgtacctgttctccatcagccccctcagcgtcctctcttgcctctttcctggcctcttccatgatgatgggtctgagytcccccagaagtattactggtggttcttccagaccgtaccaggcctcacgggggttgtgctgctcctgatcctggccatcatgtatgtctttgcctcccaccacttccgccgccrcagtttccggggcttctggctgacccaccacctctacatcctgctctatgtcctgctcatcatccatggtagctttgccctgatccagctgccccgtttccacatcttcttcctggtcccagcaatcatctatgggggcgacaagctggtgagcctgagccggaagaaggtggagatcagcgtggtgaaggcggagctgctgccctcaggagtgacccacctgcggttccagcggccccagggctttgagtacaagtcagggcagtgggtgcggatcgcttgcctggctctggggaccaccgagtaccaccccttcacactgacctctgcgccccatgaggacacgcttagcctgcacatccgggcagcagggccctggaccactcgcctcagggagatctactcagccccgacgggtgacagatgtgccagatacccaaagctgtaccttgatggaccatttggagagggccaccaggagtggcataagtttgaggtgtcagtgttagtgggagggggcattggggtcaccccttttgcctccatcctcaaagacctggtcttcaagtcatccgtcagctgccaagtgttctgtaagaagatctacttcatctgggtgacgcggacccagcgtcagtttgagtggctggctgacatcatccgagaggtggaggagaatgaccaccaggacctggtgtctgtgcacatctacatcacccagctggctgagaagttcgacctcaggaccactatgctgtacatctgtgagcggcacttccagaaggttctgaaccggagtctattcacaggcctgcgctccatcacccactttggccgtcccccctttgagcccttcttcaactccctgcaggaggtccacccccaggtccggaagatcggggtgtttagctgtggcccccctggcatgaccaagaatgtggaaaaggcctgtcagctcatcaacaggcaggaccggactcacttctcccaccattatgagaacttctaggccccttcccgggggttctgcccactgyccagttgagcagaggtttgagcccacacctcacctctgttcttcctatttctggctgmctcagccttctctgatttcccacctcccaaccttgttccaggtggccatagtcagtcaccatgtgtgggctcagggacccccaggaccaggatgtgtctcagcctggagaaatggtgggggggcagtgtctagggactagagtgagaagtaggggagctactgrtttggggcaaagtgaaacctctgcttccagacttcagaaacaaatctcagaagacaagctgacctgacaagtactatgtgtgtgcatgtctgtatgtgtgttggggcgktgagtgtaaggatgcagtgggagcatggatgctggcatcttagaaccctccctactcccakacctcctcctcttctgggctccccactgtcagacgggctggcaaatgccttgcaggaggtagaggctggacccatggcaagccatttacagaaacccactcggcaccccagtctaacaccacaactaatttcacccaaggttttaagcacgttctttcatcagaccctggcccaatacctatgtatgcaatgctcctcagccctcttctccctgctccagtagtctcccttccaaataaatcacttttctgccttcagggtttctttattctgccctaggaccggaaggggcatggggagaggaagccactaacccagccagctcaccaggctggcccagacatctctcaagctgcccagtgtcctgagtaaaggagctggcccaaggcaaagtgccccagctagcaatcccttccccggcccaggggtgcccttcctgacagagggcctgtcagccactagtgtgaggcctggtgagcctgctcaggaggggcagaaacagagggtgtggaagcttctggaggaggttggctggggaagagaacggggtsgggg

SEQ ID NO: 2016 - DNA, 3506 bp, Homo sapiens
gcagagctgcagaggcaccggacgagagagggctccgcgggcccagctggcagccaggccggagacaagttgcagtcccgggctctggtgacgccgtggccgcagcatgggcttctgcctggctctagcatggacacttctggttggggcatggacccctctgggagctcagaaccccatttcgtgggaggtgcagcgatttgatgggtggtacaacaacctcatggagcacagatggggcagcaaaggctcccggctgcagcgcctggtcccagccagctatgcagatggcgtgtaccagcccttgggagaaccccacctgcccaacccccgagaccttagcaacaccatctcaaggggccctgcagggctggcctccctgagaaaccgcacagtgttgggggtcttctttggctatcacgtgctttcagacctggtgagcgtggaaactcccggctgccccgccgagttcctcaacattcgcatcccgcccggagaccccatgttcgaccccgaccagcgcggggacgtggtgctgcccttccagagaagccgctgggaccccgagaccggacggagtcccagcaatccccgggacccggccaaccaggtgacgggctggctggacggcagcgccatctatggttcctcgcattcctggagcgacgcgctgcggagcttctccaggggacagctggcgtcggggcccgaccccgcttttccccgagactcgcagaaccccctgctcatgtgggcggcgcccgaccccgccaccgggcagaacgggccccgggggctgtacgcagaacatcgctgtgtatgagtggctgcccagcttcctgcagaaaacactcccggagtatacaggataccggccatttctggaccccagcatctcctcagagttcgtggcggcctctgagcagttcctgtccaccatggtgccccctggcgtctacatgagaaatgccagctgccacttccagggggtcatcaatcggaactcaagtgtctccagagctctccgggtctgcaacagctactggagccgtgagcacccaagcctacaaagtgctgaagatgtggatgcactgctgctgggcatggcctcccagatcgcagagcgagaggaccatgtgttggttgaagatgtgcgggatttctggcctgggccactgaagttttcccgcacagaccacctggccagctgcctgcagcggggccgggatctgggcctgccctcttacaccaaggccagggcagcactgggcttgtctcccattacccgctggcaggacatcaaccctgcactctcccggagcaatgacactgtactggaggccacagctgccctgtacaaccaggacttatcctggctagagctgctccctgggggactcctggagagccaccgggaccctggacctctgttcagcaccatcgtccttgaacaatttgtgcggctacgggatggtgaccgctactggtttgagaacaccaggaatgggctgttctccaagaaggagattgaagaaatccgaaataccaccctgcaggacgtgctggtcgctgttatcaacattgaccccagtgctctgcagcccaatgtctttgtctggcataaaggagacccctgtccgcagccgagacagctcagcactgaaggcctgccagcgtgtgctccctctgttgttcgtgactattttgagggcagtggatttggcttcggggtcaccatcgggaccctctgttgcttccctttggtgagcctgctcagtgcctggattgttgcccggctccggatgagaaatttcaagaggctccagggccaggaccgccagagcatcgtgtctgagaagctcgtgggaggcatggaagctttggaatggcaaggccacaaggagccctgccggcccgtgcttgtgtacctgcagcccgggcagatccgtgtggtagatggcaggctcaccgtgctccgcaccatccagctgcagcctccacagaaggtcaacttcgtcctgtccagcaaccgtggacgccgcactctgctgctcaagatccccaaggagtatgacctggtgctgctgtttaacttggaggaagagcggcaggcgctggtggaaaatctccggggagctctgaaggagagcgggttgagcatccaggagtgggagctgcgggagcaggagctgatgagagcagctgtgacacgggagcagcggaggcacctcctggagacctttttcaggcaccttttctcccaggtgctggacatcaaccaggccgacgcagggaccctgcccctggactcctcccagaaggtgcgggaggccctgacctgtgagctgagcagggccgagtttgccgagtccctgggcctcaagccccaggacatgtttgtggagtccatgttctctctggctgacaaggatggcaatggctacctgtccttccgagagttcctggacatcctggtggtcttcatgaaaggctctcctgaggaaaagtctcgccttatgttccgcatgtacgactttgatgggaatggcctcatttccaaggatgagttcatcaggatgctgagatccttcatcgagatctccaacaactgcctgtccaaggcccagctggctgaggtggtggagtccatgttccgggagtcgggattccaggacaaggaggaactgacatgggaagattttcacttcatgctgcgggaccacaatagcgagctccgcttcacgcagctctgtgtcaaaggggtggaggtgcctgaagtcatcaaggacctctgccggcgagcctcctacatcagccaggatatgatctgtccctctcccagagtgagtgcccgctgttcccgcagcgacattgagactgagttgacacctcagagactgcagtgccccatggacacagaccctccccaggagattcggcggaggtttggcaagaaggtaacgtcattccagcccttgctgttcactgaggcgcaccgagagaagttccaacgcagctgtctccaccagacggtgcaacagttcaagcgcttcattgagaactaccggcgccacatcggctgcgtggccgtgttctacgccatcgctggggggcttttcctggagagggcctactactacgcctttgccgcacatcacacgggcatcacrgacaccacccgcgtgggaatcatcctgtcgcggggcacagcagccagcatctctttcatgttctcctacatcttgctcaccatgtgccgcaacctcatcaccttcctgcgagaaaccttcctcaaccgctacgtgcccttcgacgccgccgtggacttccatcgcctcattgcctccaccgccatcgtcctcacaggcagggcctgggtgtccctgggaggctctccagggcctcccgcccccgctgacttcccctcgtatgagagcccccctctctgctggcacttacctttaatgtccttctccatcaggatggagttggcctgggccagggtg

SEQ ID NO: 2017 - DNA, 2310 bp, Homo sapiens
ccagcttccaggatcgccctatcctggccccgccccaggacccgccaacctggactctacccaggacctgccccctacccaggacctgccccaacgacgcttatcctggccccaccccaggccccgccctcataacaatcatcctggccccgccctagagtccgcccccacgacgttcctcctgactcccgggggacccccgggccccgccccctctctgcccccgctcactgccctgggcccgccccctcttcagtccaggccgggcttccgcccggtctgccggcaacgctgcggccccgcccacgtcatggcgcccgaggagaacgcggggaccgaactcttgctgcagagtttcgagcgccgcttcctggcggcacgcacactgcgctccttcccctggcagagcttagaagcaaagttaagagactcatcagattctgagctrctgcgggatattttgcacaagactgtgaagcatcctgtgtgtgtgaagcacccgccgtccgtcaaatatgcccggtgctttctctcagaactcatcaaaaagatgtgctgtattgcccagaagccatcatgtcgctggtcggcgtcctgcggaggctggctgcctgccgggaggaccagcgggctcctgaggtctacgtggcctttaccgtccgcaacccagagacgtgccagctgttcaccaccgagctaggccgggccgggatcagatgggaagtggaacctcgtcatgagcagaaactgtttccctacgaagagcacttggagatggcaatgctgaatctcaccctgtaggactcayacacgactccaacgggattgtgagaatcaagtcactctcatgggaagaatttttayatgggaaagcggataaaactttcattggactggaatgtttggagaatgttaatttccaaatcaggaaccacaaactgccctctaataagacatcggctatctaagcgtgtgggtgccccctttctgccagcagttctggttcttaagaaaatcaccataaatcagacatgaaaattctggctccaaaaayagcattttctttgtgcaaataaaaacgtgtgtatcaagtatgggacacactcagttcctcacaaagccaagcccactgcagctgccacatccctgggcttacggtgcagcaggtgcttttttcaagacaggaatcaaaatgttaggaacacggcagaaaggggacacctggagaccaaacgcaggatgaggagttctgcagaggtcacagggaagtcacagaacagtaatacgctagcaggggcatggggcgtgaagaacagaagaagagaggaagcgtttccaagcctccagagaagaaatcaaggccaaccamagcttcccgggtcacagaaccaattcwttyaccaggyrgyacyactgctgtcatttcagcttctggccactgggaggtgctgctcraaaggrtttgccctgagactcyaagaagaagctgcgggaaggacagcaggggtcctggggttttatagcctctggcccaggagttatgtgtccataaccaaagggagcacagtctgcacccagctctmatcccatcggagctgctgcgaytcccgcaggttcttccggaactggtttagcttgcccgcaggatcaggaaagtttgagaaaagcatctgcaaaaaaataaagagcagagcttacctcattgcctgtccccaccccatcccaggtcaccacctggmtgaccccaggtccccgacccaacaacaacccctcccaagtccctaactccctcacttggactygagacycttcacaccccagcagcactccgcctccaacttgacatcacagtttctggaaacttccccgyatgtcccactttcccacacttggtgccctggagcacctcccggcctctacrtgctgcccattcccctgtgagcaccctcctctcggcctctggccaacgcagtcccacccatctgtgggtaacaagggggtgtbggtgttctttkcagccttgctaaactstctgaatcaaggatcacaaactacagcctgcaggccaaatccagcccacagcctgtgtttgtaaataaagttttattggaacaaagccacaccccttaatctacagatgatctgtggctactttcacaccccaacagagtaccatggttctgacagagactggggaacccagtctaaaygacttccgacctggacctttactgaaaatcctgccaatcattctgttggcaagaatgatgtattactttttgcaataagaaacaagtaacctttgcagaa

SEQ ID NO: 2018 - DNA, 2540 bp, Homo sapiens
ccagcttccaggatcgccctatcctggccccgccccaggacccgccaacctggactctacccaggacctgccccctacccaggacctgccccaacgacgcttatcctggccccaccccaggccccgccctcataacaatcatcctggccccgccctagagtccgcccccacgacgttcctcctgactcccgggggacccccgggccccgccccctctctgcccccgctcactgccctgggcccgccccctcttcagtccaggccgggcttccgcccggtctgccggcaacgctgcggccccgcccacgtcatggcgcccgaggagaacgcggggaccgaactcttgctgcagagtttcgagcgccgcttcctggcggcacgcacactgcgctccttcccctggcagagcttagaagcaaagttaagagactcatcagattctgagctrctgcgggatattttgcacaagactgtgaagcatcctgtgtgtgtgaagcacccgccgtccgtcaaatatgcccggtgctttctctcagaactcatcaaaaagcacgaggctgtccacacagagcctttggaygagctgtatgaagcgctggcggagaccctgatggccaaggagtccacccagggccaccggagctatttgctgccctcrggaggctcggtcacactctccgagagcacggccatcatctcctacggtaccacaggcctggtcacatgggacgccgccctctaccttgcagaatgggccatcgagaacccggcagtcttcactaacaggactgtcctagagcttggcagtggtgctggcctcacaggcctggccatctgcaagatgtgccgcccccgggcatacatcttcagcgactgtcacagccgggtccttgagcagctccgagggaatgtccttctcaatggcctctcattagaggcagacatcactgccaagttagacagccccagggtgacagtggcccagctggactgggacgtcgcgacggtccatcagctctctgccttccagccagatgttgtcattgcagcagatgtgctgtattgcccagaagccatcatgtcgctggtcggcgtcctgcggaggctggctgcctgccgggaggaccagcgggctcctgaggtctacgtggcctttaccgtccgcaacccagagacgtgccagctgttcaccaccgagctaggccgggccgggatcagatgggaagtggaacctcgtcatgagcagaaactgtttccctacgaagagcacttggagatggcaatgctgaatctcaccctgtaggactcayacacgactccaacgggattgtgagaatcaagtcactctcatgggaagaatttttayatgggaaagcggataaaactttcattggactggaatgtttggagaatgttaatttccaaatcaggaaccacaaactgccctctaataagacatcggctatctaagcgtgtgggtgccccctttctgccagcagttctggttcttaagaaaatcaccataaatcagacatgaaaattctggctccaaaaayagcattttctttgtgcaaataaaaacgtgtgtatcaagtatgatgttcccccaacgtggacacactcagttcctcacaaagccaagcccactgcagctgccacatccctggacyactgctgtcatttcagcttctggccactgggaggtgctgctcraaaggrtttgccctgagactcyaagaagaagctgcgggaaggacagcaggggtcctggggttttatagcctctggcccaggagttatgtgtccataaccaaagggagcacagtctgcacccagctctmatcccatcggagctgctgcgaytcccgcaggttcttccggaactggtttagcttgcccgcaggatcaggaaagtttgagaaaagcatctgcaaaaaaataaagagcagagcttacctcattgcctgtccccaccccatcccaggtcaccacctggmtgaccccaggtccccgacccaacaacaacccctcccaagtccctaactccctcacttggactygagacycttcacaccccagcatttctggaaacttccccgyatgtcccactttcccacacttggtgccctggagcacctcccggcctctacrtgctgcccattcccctgtgagcaccctcctctcggcctctggccaacgcagtcccacccatctgtgggtaacaagggggtgtbggtgttctttkcagccttgctaaactstctgaatcaaggatcacaaactacagcctgcaggccaaatccagcccacagcctgtgtttgtaaataaagttttattggaacaaagccacaccccttaatctacagatgatctgtggctactttcacaccccaacagagtaccatggttctgacagagactggggaacccagtctaaaygacttccgacctggacctttactgaaaatcctgccaatcattctgttggcaagaatgatgtattactttttgcaataagaaacaagtaacctttgcagay

SEQ ID NO: 2019 - DNA, 2357 bp, Homo sapiens
ccagcttccaggatcgccctatcctggccccgccccaggacccgccaacctggactctacccaggacctgccccctacccaggacctgccccaacgacgcttatcctggccccaccccaggccccgccctcataacaatcatcctggccccgccctagagtccgcccccacgacgttcctcctgactcccgggggacccccgggccccgccccctctctgcccccgctcactgccctgggcccgccccctcttcagtccaggccgggcttccgcccggtctgccggcaacgctgcggccccgcccacgtcatggcgcccgaggagaacgcggggaccgaactcttgctgcagagtttcgagcgccgcttcctggcggcacgcacactgcgctccttcccctggcagagcttagaagcaaagttaagagactcatcagattctgagctrctgcgggatattttgcacaagccctcrggaggctcggtcacactctccgagagcacggccatcatctcctacggtaccacaggcctggtcacatgggacgccgccctctaccttgcagaatgggccatcgagaacccggcagtcttcactaacaggactgtcctagagcttggcagtggtgctggcctcacaggcctggccatctgcaagatgtgccgcccccgggcatacatcttcagcgactgtcacagccgggtccttgagcagctccgagggaatgtccttctcaatggcctctcattagaggcagacatcactgccaagttagacagccccagggtgacagtggcccagctggactgggacgtcgcgacggtccatcagctctctgccttccagccagatgttgtcattgcagcagatgtgctgtattgcccagaagccatcatgtcgctggtcggcgtcctgcggaggctggctgcctgccgggaggaccagcgggctcctgaggtctacgtggcctttaccgtccgcaacccagagacgtgccagctgttcaccaccgagctaggccgggccgggatcagatgggaagtggaacctcgtcatgagcagaaactgtttccctacgaagagcacttggagatggcaatgctgaatctcaccctgtaggactcayacacgactccaacgggattgtgagaatcaagtcactctcatgggaagaatttttayatgggaaagcggataaaactttcattggactggaatgtttggagaatgttaatttccaaatcaggaaccacaaactgccctctaataagacatcggctatctaagcgtgtgggtgccccctttctgccagcagttctggttcttaagaaaatcaccataaatcagacatgaaaattctggctccaaaaayagcattttctttgtgcaaataaaaacgtgtgtatcaagtatgatgttcccccaacgtggacacactcagttcctcacaaagccaagcccactgcagctgccacatccctggacyactgctgtcatttcagcttctggccactgggaggtgctgctcraaaggrtttgccctgagactcyaagaagaagctgcgggaaggacagcaggggtcctggggttttatagcctctggcccaggagttatgtgtccataaccaaagggagcacagtctgcacccagctctmatcccatcggagctgctgcgaytcccgcaggttcttccggaactggtttagcttgcccgcaggatcaggaaagtttgagaaaagcatctgcaaaaaaataaagagcagagcttacctcattgcctgtccccaccccatcccaggtcaccacctggmtgaccccaggtccccgacccaacaacaacccctcccaagtccctaactccctcacttggactygagacycttcacaccccagcatttctggaaacttccccgyatgtcccactttcccacacttggtgccctggagcacctcccggcctctacrtgctgcccattcccctgtgagcaccctcctctcggcctctggccaacgcagtcccacccatctgtgggtaacaagggggtgtbggtgttctttkcagccttgctaaactstctgaatcaaggatcacaaactacagcctgcaggccaaatccagcccacagcctgtgtttgtaaataaagttttattggaacaaagccacaccccttaatctacagatgatctgtggctactttcacaccccaacagagtaccatggttctgacagagactggggaacccagtctaaaygacttccgacctggacctttactgaaaatcctgccaatcattctgttggcaagaatgatgtattactttttgcaataagaaacaagtaacctttgcagay

SEQ ID NO: 2020 - DNA, 2143 bp, Homo sapiens
cccacgtcatggcgcccgaggagaacgcggggaccgaactcttgctgcagagtttcgagcgccgcttcctggcggcacgcacactgcgctccttcccctggcaggtgggcggcggggcgagcggagaggcccgcggggctcgcgggagtccaggggcagacgggacgggtctccgtgctgaagcccctggcgctcccgccacagcttagaagcaaagttaagagactcatcagattctgagctrctgcgggatattttgcacaagactgtgaagcatcctgtgtgtgtgaagcacccgccgtccgtcaaatatgcccggtgctttctctcagaactcatcaaaaagccctcrggaggctcggtcacactctccgagagcacggccatcatctcctacggtaccacaggcctggtcacatgggacgccgccctctaccttgcagaatgggccatcgagaacccggcagtcttcactaacaggactgtcctagagcttggcagtggtgctggcctcacaggcctggccatctgcaagatgtgccgcccccgggcatacatcttcagcgactgtcacagccgggtccttgagcagctccgagggaatgtccttctcaatggcctctcattagaggcagacatcactgccaagttagacagccccagggtgacagtggcccagctggactgggacgtcgcgacggtccatcagctctctgccttccagccagatgttgtcattgcagcagatgtgctgtattgcccagaagccatcatgtcgctggtcggcgtcctgcggaggctggctgcctgccgggaggaccagcgggctcctgaggtctacgtggcctttaccgtccgcaacccagagacgtgccagctgttcaccaccgagctaggccgggccgggatcagatgggaagtggaacctcgtcatgagcagaaactgtttccctacgaagagcacttggagatggcaatgctgaatctcaccctgtaggactcayacacgactccaacgggattgtgagaatcaagtcactctcatgggaagaatttttayatgggaaagcggataaaactttcattggactggaatgtttggagaatgttaatttccaaatcaggaaccacaaactgccctctaataagacatcggctatctaagcgtgtgggtgccccctttctgccagcagttctggttcttaagaaaatcaccataaatcagacatgaaaattctggctacyactgctgtcatttcagcttctggccactgggaggtgctgctcraaaggrtttgccctgagactcyaagaagaagctgcgggaaggacagcaggggtcctggggttttatagcctctggcccaggagttatgtgtccataaccaaagggagcacagtctgcacccagctctmatcccatcggagctgctgcgaytcccgcaggttcttccggaactggtttagcttgcccgcaggatcaggaaagtttgagaaaagcatctgcaaaaaaataaagagcagagcttacctcattgcctgtccccaccccatcccaggtcaccacctggmtgaccccaggtccccgacccaacaacaacccctcccaagtccctaactccctcacttggactygagacycttcacaccccagcagcactccgcctccaacttgacatcacagtttctggaaacttccccgyatgtcccactttcccacacttggtgccctggagcacctcccggcctctacrtgctgcccattcccctgtgagcaccctcctctcggcctctggccaacgcagtcccacccatctgtgggtaacaagggggtgtbggtgttctttkcagccttgctaaactstctgaatcaaggatcacaaactacagcctgcaggccaaatccagcccacagcctgtgtttgtaaataaagttttattggaacaaagccacaccccttaatctacagatgatctgtggctactttcacaccccaacagagtaccatggttctgacagagactggggaacccagtctaaaygacttccgacctggacctttactgaaaatcctgccaatcattctgttggcaagaatgatgtattactttttgcaataagaaacaagtaacctttgcagay

SEQ ID NO: 2021 - DNA, 1208 bp, Homo sapiens
aatctcagctcactgcaacctccacctcctgggttcaagcaattctcccacctcagcctcccaagtagctgggattacaggcactcgccatcatgcctggctaatttctgtatttttgtagagatgggatttcaccatgttggccaggctggtctcgaactcctgacctcaagtgatccgcccgccttggcctcccaaagtgttgkgattacaggcatgagccactgtgcccggccgctttctaagctttgtgaagagtgggttgactattcagatctctgcttctgtcccgctgtgccaagtgctggggcrgacacaggcagagagtggacagmggcacggtscctgctgctagccatttctatgcaaaaccagctttctggtcccatcctggaggccaattctaggcacctgggtgggcctgggaacctgtgaaccaagtaaactgacttggacacccccctaccccgccaggcctgtcctagcagccccacacaataccctcatgtcctgtccccaaacaccgccatcctcaaacacatgtgctctgtttccaggccgggccgggatcagatgggaagtggaacctcgtcatgagcagaaactgtttccctacgaagagcacttggagatggcaatgctgaatctcaccctgtaggactcayacacgactccaacgggattgtgagaatcaagtcactctcatgggaagaatttttayatgggaaagcggataaaactttcattggactggaatgtttggagaatgttaatttccaaatcaggaaccacaaactgccctctaataagacatcggctatctaagcgtgtgggtgccccctttctgccagcagttctggttcttaagaaaatcaccataaatcagacatgaaaattctggctccaaaaayagcattttctttgtgcaaataaaaacgtgtgtatcaagtatgatgttcccccaacgtggacacactcagttcctcacaaagccaagcccactgcagctgccacatccctgggcttacggtgcagcaggtgcttttttcaagacaggaatcaaaatgttaggaacacggcagaaaggggacacctggagaccaaacgcaggatgaggagttctgcagaggtcacagggaagtcacagaacagtaatacgctagcaggggcatggggcgtgaagaacagaagaagagaggaagcgtttc

SEQ ID NO: 2022 - DNA, 2077 bp, Homo sapiens
ccagcttccaggatcgccctatcctggccccgccccaggacccgccaacctggactctacccaggacctgccccctacccaggacctgccccaacgacgcttatcctggccccaccccaggccccgccctcataacaatcatcctggccccgccctagagtccgcccccacgacgttcctcctgactcccgggggacccccgggccccgccccctctctgcccccgctcactgccctgggcccgccccctcttcagtccaggccgggcttccgcccggtctgccggcaacgctgcggccccgcccacgtcatggcgcccgaggagaacgcggggaccgaactcttgctgcagagtttcgagcgccgcttcctggcggcacgcacactgcgctccttcccctggcagagcttagaagcaaagttaagagactcatcagattctgagctrctgcgggatattttgcacaagcacgaggctgtccacacagagcctttggaygagctgtatgaagcgctggcggagaccctgatggccaaggagtccacccagggccaccggagctatttgctgatgtgctgtattgcccagaagccatcatgtcgctggtcggcgtcctgcggaggctggctgcctgccgggaggaccagcgggctcctgaggtctacgtggcctttaccgtccgcaacccagagacgtgccagctgttcaccaccgagctaggccgggccgggatcagatgggaagtggaacctcgtcatgagcagaaactgtttccctacgaagagcacttggagatggcaatgctgaatctcaccctgtaggactcayacacgactccaacgggattgtgagaatcaagtcactctcatgggaagaatttttayatgggaaagcggataaaactttcattggactggaatgtttggagaatgttaatttccaaatcaggaaccacaaactgccctctaataagacatcggctatctaagcgtgtgggtgccccctttctgccagcagttctggttcttaagaaaatcaccataaatcagacatgaaaattctggctccaaaaayagcattttctttgtgcaaataaaaacgtgtgtatcaagtatgatgttcccccaacgtggacacactcagttcctcacaaagccaagcccactgcagctgccacatccctggtcatttcagcttctggccactgggaggtgctgctcraaaggrtttgccctgagactcyaagaagaagctgcgggaaggacagcaggggtcctggggttttatagcctctggcccaggagttatgtgtccataaccaaagggagcacagtctgcacccagctctmatcccatcggagctgctgcgaytcccgcaggttcttccggaactggtttagcttgcccgcaggatcaggaaagtttgagaaaagcatctgcaaaaaaataaagagcagagcttacctcattgcctgtccccaccccatcccaggtcaccacctggmtgaccccaggtccccgacccaacaacaacccctcccaagtccctaactccctcacttggactygagacycttcacaccccagcagcactccgcctccaacttgacatcacagtttctggaaacttccccgyatgtcccactttcccacacttggtgccctggagcacctcccggcctctacrtgctgcccattcccctgtgagcaccctcctctcggcctctggccaacgcagtcccacccatctgtgggtaacaagggggtgtbggtgttctttkcagccttgctaaactstctgaatcaaggatcacaaactacagcctgcaggccaaatccagcccacagcctgtgtttgtaaataaagttttattggaacaaagccacaccccttaatctacagatgatctgtggctactttcacaccccaacagagtaccatggttctgacagagactggggaacccagtctaaaygacttccgacctggacctttactgaaaatcctgccaatcattctgttggcaagaatgatgtattactttttgcaataagaaacaagtaacctttgcagaa

SEQ ID NO: 2023 - DNA, 2438 bp, Homo sapiens
ccagcttccaggatcgccctatcctggccccgccccaggacccgccaacctggactctacccaggacctgccccctacccaggacctgccccaacgacgcttatcctggccccaccccaggccccgccctcataacaatcatcctggccccgccctagagtccgcccccacgacgttcctcctgactcccgggggacccccgggccccgccccctctctgcccccgctcactgccctgggcccgccccctcttcagtccaggccgggcttccgcccggtctgccggcaacgctgcggccccgcccacgtcatggcgcccgaggagaacgcggggaccgaactcttgctgcagagtttcgagcgccgcttcctggcggcacgcacactgcgctccttcccctggcagagcttagaagcaaagttaagagactcatcagattctgagctrctgcgggatattttgcacaagactgtgaagcatcctgtgtgtgtgaagcacccgccgtccgtcaaatatgcccggtgctttctctcagaactcatcaaaaagccctcrggaggctcggtcacactctccgagagcacggccatcatctcctacggtaccacaggcctggtcacatgggacgccgccctctaccttgcagaatgggccatcgagaacccggcagtcttcactaacaggactgtcctagagcttggcagtggtgctggcctcacaggcctggccatctgcaagatgtgccgcccccgggcatacatcttcagcgactgtcacagccgggtccttgagcagctccgagggaatgtccttctcaatggcctctcattagaggcagacatcactgccaagttagacagccccagggtgacagtggcccagctggactgggacgtcgcgacggtccatcagctctctgccttccagccagatgttgtcattgcagcagatgtgctgtattgcccagaagccatcatgtcgctggtcggcgtcctgcggaggctggctgcctgccgggaggaccagcgggctcctgaggtctacgtggcctttaccgtccgcaacccagagacgtgccagctgttcaccaccgagctaggccgggccgggatcagatgggaagtggaacctcgtcatgagcagaaactgtttccctacgaagagcacttggagatggcaatgctgaatctcaccctgtaggactcayacacgactccaacgggattgtgagaatcaagtcactctcatgggaagaatttttayatgggaaagcggataaaactttcattggactggaatgtttggagaatgttaatttccaaatcaggaaccacaaactgccctctaataagacatcggctatctaagcgtgtgggtgccccctttctgccagcagttctggttcttaagaaaatcaccataaatcagacatgaaaattctggctccaaaaayagcattttctttgtgcaaataaaaacgtgtgtatcaagtatgatgttcccccaacgtggacacactcagttcctcacaaagccaagcccactgcagctgccacatccctggacyactgctgtcatttcagcttctggccactgggaggtgctgctcraaaggrtttgccctgagactcyaagaagaagctgcgggaaggacagcaggggtcctggggttttatagcctctggcccaggagttatgtgtccataaccaaagggagcacagtctgcacccagctctmatcccatcggagctgctgcgaytcccgcaggttcttccggaactggtttagcttgcccgcaggatcaggaaagtttgagaaaagcatctgcaaaaaaataaagagcagagcttacctcattgcctgtccccaccccatcccaggtcaccacctggmtgaccccaggtccccgacccaacaacaacccctcccaagtccctaactccctcacttggactygagacycttcacaccccagcatttctggaaacttccccgyatgtcccactttcccacacttggtgccctggagcacctcccggcctctacrtgctgcccattcccctgtgagcaccctcctctcggcctctggccaacgcagtcccacccatctgtgggtaacaagggggtgtbggtgttctttkcagccttgctaaactstctgaatcaaggatcacaaactacagcctgcaggccaaatccagcccacagcctgtgtttgtaaataaagttttattggaacaaagccacaccccttaatctacagatgatctgtggctactttcacaccccaacagagtaccatggttctgacagagactggggaacccagtctaaaygacttccgacctggacctttactgaaaatcctgccaatcattctgttggcaagaatgatgtattactttttgcaataagaaacaagtaacctttgcagay

SEQ ID NO: 2024 - DNA, 2139 bp, Homo sapiens
aggcagtaatcgttctggtcactgggacacagctgccctcgcccattctaaaaagtcagcgccgtcaggaccgcaggtaaccacgtcctcctgagcgcggtgaccggagcttagaagcaaagttaagagactcatcagattctgagctrctgcgggatattttgcacaagactgtgaagcatcctgtgtgtgtgaagcacccgccgtccgtcaaatatgcccggtgctttctctcagaactcatcaaaaagccctcrggaggctcggtcacactctccgagagcacggccatcatctcctacggtaccacaggcctggtcacatgggacgccgccctctaccttgcagaatgggccatcgagaacccggcagtcttcactaacaggactgtcctagagcttggcagtggtgctggcctcacaggcctggccatctgcaagatgtgccgcccccgggcatacatcttcagcgactgtcacagccgggtccttgagcagctccgagggaatgtccttctcaatggcctctcattagaggcagacatcactgccaagttagacagccccagggtgacagtggcccagctggactgggacgtcgcgacggtccatcagctctctgccttccagccagatgttgtcattgcagcagatgtgctgtattgcccagaagccatcatgtcgctggtcggcgtcctgcggaggctggctgcctgccgggaggaccagcgggctcctgaggtctacgtggcctttaccgtccgcaacccagagacgtgccagctgttcaccaccgagctaggccgggccgggatcagatgggaagtggaacctcgtcatgagcagaaactgtttccctacgaagagcacttggagatggcaatgctgaatctcaccctgtaggactcayacacgactccaacgggattgtgagaatcaagtcactctcatgggaagaatttttayatgggaaagcggataaaactttcattggactggaatgtttggagaatgttaatttccaaatcaggaaccacaaactgccctctaataagacatcggctatctaagcgtgtgggtgccccctttctgccagcagttctggttcttaagaaaatcaccataaatcagacatgaaaattctggctccaaaaayagcattttctttgtgcaaataaaaacgtgtgtatcaagtatgatgttcccccaacgtggacacactcagttcctcacaaagccaagcccactgcagctgccacatccctggacyactgctgtcatttcagcttctggccactgggaggtgctgctcraaaggrtttgccctgagactcyaagaagaagctgcgggaaggacagcaggggtcctggggttttatagcctctggcccaggagttatgtgtccataaccaaagggagcacagtctgcacccagctctmatcccatcggagctgctgcgaytcccgcaggttcttccggaactggtttagcttgcccgcaggatcaggaaagtttgagaaaagcatctgcaaaaaaataaagagcagagcttacctcattgcctgtccccaccccatcccaggtcaccacctggmtgaccccaggtccccgacccaacaacaacccctcccaagtccctaactccctcacttggactygagacycttcacaccccagcatttctggaaacttccccgyatgtcccactttcccacacttggtgccctggagcacctcccggcctctacrtgctgcccattcccctgtgagcaccctcctctcggcctctggccaacgcagtcccacccatctgtgggtaacaagggggtgtbggtgttctttkcagccttgctaaactstctgaatcaaggatcacaaactacagcctgcaggccaaatccagcccacagcctgtgtttgtaaataaagttttattggaacaaagccacaccccttaatctacagatgatctgtggctactttcacaccccaacagagtaccatggttctgacagagactggggaacccagtctaaaygacttccgacctggacctttactgaaaatcctgccaatcattctgttggcaagaatgatgtattactttttgcaataagaaacaagtaacctttgcagay

SEQ ID NO: 2025 - DNA, 2086 bp, Homo sapiens
tgcaccaggatgactctgaaatggacttcagttcttctgctgatacatctcagttgttactttagctctgggagttgtggaaaagtgctggtgtgggccgcagaatacagccattggatgaatatgaagacaatcctgaaagagcttgttcagagaggtcatgaggtgactgtactggcatcttcagcttccattctttttgatcccaatgatgcatccactcttaaatttgaagtttatcctacatctttaactaaaactgaatttgagaatatcatcatgcaacaggttaagagatggtcagacattcgaaaagatagcttttggttatatttttcacaagaacaagaaatcctgtgggaattatatgacatatttagaaacttctgtaaagatgtagtttcaaataagaaagttatgaaaaaactacaagagtcaagatttgacatcgtttttgcagatgctgtttttccctgtggtgagctgctggctgcgctacttaacatacggtttgtgtacagtctccgctttactcctggctacacaattgaaaggcacagtggaggactgattttccctccttcctacatacctattgttatgtcaaaattgagtgatcaaatgactttcatggagagggtaaaaaatatgatctatgtgctttattttgacttttggttccaaatgtctgatatgaagaagtgggatcagttttacagtgaagttttaggaagacccactaccttatttgagacaatgggaaaagctgacatatggcttatgcgaaactcctggagttttcaatttcctcatccattcttaccaaacgttgattttgttggaggattccactgcaaacctgccaaacccctacytaaggaaatggaggagtttgtacagagctctggagaaaatggtgttgtggtgttttctctggggtcagtgataagtaacatgacagcagaaagggccaatgtaattgcaacagcccttgccaagatcccacaaaaggttctgtggagatttgacgggaataaaccagatgccttaggtctcaatactcggctgtacaagtggataccccagaatgaccttctaggtcatccaaaaaccagagcttttataactcatggtggagccaatggcatctatgaggcaatctaccatgggatccctatggtgggcattccattgttttttgatcaacctgataacattgctcacatgaaggccaagggagcagctgttagattggacttcaacacaatgtcgagtacagacctgctgaatgcactgaagacagtaattaatgatcctttatataaagagaatattatgaaattatcaagaattcaacatgatcaaccagtaaagcccctggatcgagcagtcttctggattgaatttgtcatgccccacaaaggagccaaacaccttcgagttgcagcccatgacctcacctggttccagtaccactctttggatgtgattgggtttctgctggcctgtgtggcaactgtgatatttatcatcacaaagttttgtctgttttgtttctggaagtttgctagaaaagggaagaagggaaaaagagattagttatgtctgacatttgaagctggaaaaccagatagataggacaacttcagtttattccagcaagaaagaaaagattgttatgcaagatttctttcttcctgtgacaaaaaaaaaaaaaaaaaaaaattttcaaatctaccttgtcaagtaaaaatttgtttttcagagatttaccacccaggtaatggttagaaatattttgtggcaatgaagaaaatactaggaaaattaaaaaataatataaagccatttgagctcatattgaaatttgttgcacttatattgagatttgttgtttgaattcacaagttacatgaaaaaatttactcagcttaactatatttcacacattttacataaacacaagaacattaagaagtctactgacagtatcagtagtcacatcctcagaataatttggcttcattttgaacaggattctgttgttttaactgttgctaaagaaactattacatagttaaattgt

SEQ ID NO: 2026 - DNA, 1657 bp, Homo sapiens
tgcaccaggatgactctgaaatggacttcagttcttctgctgatacatctcagttgttactttagctctgggagttgtggaaaagtgctggtgtgggccgcagaatacagccattggatgaatatgaagacaatcctgaaagagcttgttcagagaggtcatgaggtgactgtactggcatcttcagcttccattctttttgatcccaatgatgcatccactcttaaatttgaagtttatcctacatctttaactaaaactgaatttgagaatatcatcatgcaacaggttaagagatggtcagacattcgaaaagatagcttttggttatatttttcacaagaacaagaaatcctgtgggaattatatgacatatttagaaacttctgtaaagatgtagtttcaaataagaaagttatgaaaaaactacaagagtcaagatttgacatcgtttttgcagatgctgtttttccctgtggtgagctgctggctgcgctacttaacatacggtttgtgtacagtctccgctttactcctggctacacaattgaaaggcacagtggaggactgattttccctccttcctacatacctattgttatgtcaaaattgagtgatcaaatgactttcatggagagggtaaaaaatatgatctatgtgctttattttgacttttggttccaaatgtctgatatgaagaagtgggatcagttttacagtgaagttttaggaagacccactaccttatttgagacaatgggaaaagctgacatatggcttatgcgaaactcctggagttttcaatttcctcatccattcttaccaaacgttgattttgttggaggattccactgcaaacctgccaaacccctacytaaggaaatggaggagtttgtacagagctctggagaaaatggtgttgtggtgttttctctggggtcagtgataagtaacatgacagcagaaagggccaatgtaattgcaacagcccttgccaagatcccacaaaaggttctgtggagatttgacgggaataaaccagatgccttaggtctcaatactcggctgtacaagtggataccccagaatgaccttctaggtcatccaaaaaccagagcttttataactcatggtggagccaatggcatctatgaggcaatctaccatgggatccctatggtgggcattccattgttttttgatcaacctgataacattgctcacatgaaggccaagggagcagctgttagattggacttcaacacaatgtcgagtacagacctgctgaatgcactgaagacagtaattaatgatcctttgtgagtagaacaatgtttttcactaggtggtatttgtggacagcttctcttgtcaatagtgagcatgagtttcatcctttttataagagagtaatcttgaaagaatttaaatgatataaccaatctgaaatctgctttgtttttatcatctattatttaaaaattgtgtttgaatcccatacatctaatgagtaaccagttagtgaagcaattttctaaacaaaaataattttaaaatgatatagataatataaaaaatacatttcttaaaattttaacatgaatccatagaagaaaggaagaataaacttgaaataatataataaaatgttttaatt

SEQ ID NO: 2027 - DNA, 1532 bp, Homo sapiens
ggatgactctgaaatggacttcagttcttctgctgatacatctcagttgttactttagctctgggagttgtggaaaagtgctggtgtgggccgcagaatacagccattggatgaatatgaagacaatcctgaaagagcttgttcagagaggtcatgaggtgactgtactggcatcttcagcttccattctttttgatcccaatgatgcatccactcttaaatttgaagtttatcctacatctttaactaaaactgaatttgagaatatcatcatgcaacaggttaagagatggtcagacattcgaaaagatagcttttggttatatttttcacaagaacaagaaatcctgtgggaattatatgacatatttagaaacttctgtaaagatgtagtttcaaataagaaagttatgaaaaaactacaagagtcaagatttgacatcgtttttgcagatgctgtttttccctgtggtgagctgctggctgcgctacttaacatacggtttgtgtacagtctccgctttactcctggctacacaattgaaaggcacagtggaggactgattttccctccttcctacatacctattgttatgtcaaaattgagtgatcaaatgactttcatggagagggtaaaaaatatgatctatgtgctttattttgacttttggttccaaatgtctgatatgaagaagtgggatcagttttacagtgaagttttaggaagacccactaccttatttgagacaatgggaaaagctgacatatggcttatgcgaaactcctggagttttcaatttcctcatccattcttaccaaacgttgattttgttggaggattccactgcaaacctgccaaacccctacytaaggaaatggaggagtttgtacagagctctggagaaaatggtgttgtggtgttttctctggggtcagtgataagtaacatgacagcagaaagggccaatgtaattgcaacagcccttgccaagatcccacaaaagatataaagagaatattatgaaattatcaagaattcaacatgatcaaccagtaaagcccctggatcgagcagtcttctggattgaatttgtcatgccccacaaaggagccaaacaccttcgagttgcagcccatgacctcacctggttccagtaccactctttggatgtgattgggtttctgctggcctgtgtggcaactgtgatatttatcatcacaaagttttgtctgttttgtttctggaagtttgctagaaaagggaagaagggaaaaagagattagttatgtctgacatttgaagctggaaaaccagatagataggacaacttcagtttattccagcaagaaagaaaagattgttatgcaagatttctttcttcctgtgacaaaaaaaaaaaaaaaaaaaaattttcaaatctaccttgtcaagtaaaaatttgtttttcagagatttaccacccaggtaatggttagaaatattttgtggcaatgaagaaaatactaggaaaattaaaaaataatataaagcc

SEQ ID NO: 2028 - DNA, 947 bp, Homo sapiens
cgaccttttggtcccgggcagcccctctgcctcccaaagcactgaggctggatagcaccaggcacccagctagcaggacaactcgaggtgaggcccctgttttccccgccccgctcgccgactcgagaagatggctgatccttggcaggaatgcatggattatgcagtaamcctagcaagacaagctggagaggtggttcatgatgctcttaaaaatgaagtgaatgttatcctgaaaggttctccagttgatttggtaactgctactgaccaaaaagttgaaaaaatgcttatctcttccataaaggaaaagtatccatctcatagtttcactggtgaggaatctggcagctggggaaaaaggtgtcttaactgacaaccctacgtggatcattgaccctattgatggaacaactaagtttgtccatagatttccttttgtagctgtttcgattggccttgttgtaaataagaagatagaatttggagttgtgtacagttgtgtggaagacaagaggtacactgtcaggaaaggaaaaggtgccttttataatggtcaaaaactacaggtttcacaagaagatattaccaaatcactcttggtgaccgagctgggctattgcagaacatcagaaattgtaagaactattctttccaatatggaaaagctttcttgcattcctattcacgcacagggcatcacatgtgttggaacagcagctactaatatgtgcattgcggcaagtggaggagcagaggcattttatgaaatgggaattcactgctgggatattgcagtarctgccattattgttactgaagctggtggcgtgctaatggatgttactggtggaccattccatttaatgtcacggagaataattgctgcaaattgtacagcattagcagaaaggatagccaaagaaattcaggtagcaccttttcaa

SEQ ID NO: 2029 - DNA, 2274 bp, Homo sapiens
atgggcaagtacacggtccgcgtagccaccggggatttgctcctggcgggctctcccaacctgstgcagctatggctggtgggcgagcacggggaggcagacctagggaagcagctgccaccggtgtggggaaaggaggcagagtttgagatcgacgtccccctgcacctggggcgcctcctgatggtgaagctgcgcaaacacaacgtgctgttgagtctcgactggttctgcaagtggatctcagtgcagggcccggggacccaaggcgmggcctttttcccctgctaccgctgggtgcagggccacggaaytatctgcctgcctgagggtactgcccggaccgtgagtgatgacccccagaacctgtttaagaaatatcgggaacaggagctcgaggaaagaaggaaggtgtggggctcctggaaagatgggttaatcctgcctatagcagggaataggcaaccggaccttcctagggacgagcgattcctcgaggataaggatttagactttaatgtctccctagcaaaagggttgaaggrcttggccattaaggggacactggatttcataaattgtgtgaaaaggctggaagatttcaaaaaaatattcccacatggaaagactgtcctggctgagcgggtttatgattcttggaagaatgatgccttctttgggtaccagtttctcaatggtgcaaaccccatgctcctgaggtgttyttcaaggctcccagcctgcctggtgctgcctccagggatggaagacttgaagacccagctggagaaagaactccaggctggatctctgtttgaagtggatttctccttgctggatggagtcaagcctaatgtcatcatttttaagcagcaatgcgtggcagcccctttggtcatgctgaagcttcagcctgatggaggactcttacccatggtcatccagctccagccaccttgacacggatgtcccccacctctgctctttctgccctcgcatccccccatggcctggctcctggccaagacctgggtccggagctctgatttccagctgcagcagttacagtcacatctgctgaggggacacttgattgctgaggttattgctgtggctacaatgagaagcttgcctagcctccatcctatctacaagctcctgatcccccacttccgctacaccatggcgatcaacacgctggcccagagtagtcttgtctccgaatggggaatttttgacctggtggtgagcactggtagtggaagccacgtggacattcttcagagagccatggcttgtttgacctatcattccctctgtcctcctgatgacctggctgaccgtgggctcctggatgtgaaatcttctttttatggctaagatgccatcaggctgtggggaatcatcagccggtacrtggaggggatggttgggcttttctacaatagtgaccaagccatgaaggatgatctagagctgcagrcctggtgcagagagatgactgagactggactgcagagrgcccaagaccaggggttcctcatctccttagagtcccgggctcagctctgccactttgtcaccatgtgcatcttcacatgcacaggtcagcatgcttctaaccacctgggccagctggactggtacycctggatccctaatggcccatgcaccatgcagaagcccccrcccrtctctaaggatgtgacagagaaggatmtagtggacttactgcccaatctccaccaggcacgtatgcaaaagaccttcacaaagttccttggcagacgccagcctgtcatgcatgaggagaaatatttctctggtcctgagccccaagctgtgctgagacaattccaggaggaactggcttccatggacaaggagattgaggtccggaatgcagtcctggacctgccctgtgagtacctttgacccagcatggtagagaacagcgtgaccatctgagaggccttgcccgcctcagctccaaagctccaccatccstgagtgcctttgagtattccgtcctcctcacatcctctggtgaacaaattgtccccaaagctttgtggtcagggtatccagagctgctcaccacacaactatggggaatacacagtgatggtccccattgcatttggaagtggcatcccccaaagctgccctaccttaaatgtccatccagtcctgcacttcctcaccccgatccctgcacacctcctcattgccaaaggacctggcttagatacaagtaaaaatatatgattaaat

SEQ ID NO: 2030 - DNA, 1298 bp, Homo sapiens
  misc_feature (1)...(1298): n = A,T,C or G
gcagctgggaggaccctcccgccccaggcagaggtgggggatatccgggagttcatttctgacctcctcgctcttcagcacctccttgaactcccgcttgattcgctgcaccgcgatgttggccatgtctccgcccgcagctgattcgtacccgcctcctccgccaccgctacgaccaccgccaccgccgccacctcttcctccaccgcctcctccctcggcgattcagacctgagcacacgaacactgccrctmccaccccggccgccgcgctcgcctcagtgtggaatcacctccgcgcccggccaccaaaatggcgccgggtcggcgcatgcgcacgacgttgacccggccgggcggcgcagccgctcccgttggagcccccatacgcccgagccacgagctcgcgtctcggctggggctgcggccgcgtggctccgccctgccggcgtctggggccgcgagggtgcggcttccaagctggccggccctagccggcccccccggcccttcccggcgcctccgctcctgtttaaacccgggtgctgtggtctgggcttccagcgctggcctctgaccgaaggttcgggcgcaaccgaacgggtttccgacgccgcactcggctggaacgccgccctgactcagctagacccggaacccggaggctgaacgccgtgtctagcgcaggaaaacgctctcccggatctcggtccggcccattttcagttggtgtagccccagaaaatctactgcagtcgtttttgttctgcaacatttatagtaccacgattattcccatcatctcaggtagcacagattattgaattaaggctggttattgttggatcagattgggtttgagacaggtactcggtggagaggcctgagggtgggtttagaagccagatgttgctctttgacctatttaataccgagcttgacacacacacacaatctctctctctctctctcwcwwacacwcacacacacacacacacacamwcactcctatgcccatccctagagtgtagggtgggcctaagactgcgcttctaacaagtctcccagttgctgctgctgttggtgctggttccgggaccacawgagaaccactgaactgaatgaagcatgtgaaaattcacatatattaaagtgaaaattggagaaatggaaacaattacagtacccttcaggggactcggggtgggggagggggagccttatttctgtaaacctaggcntcaaaggtgcctggtgatagtaggcactcaataaatattgaatgagtaaatgagtac

SEQ ID NO: 2031 - DNA, 984 bp, Homo sapiens
gatcccttgttcactagaaacaaggagccccctgtcaccttcttttaaaacagatctttctgtctctgtcttcatttctcyattcatcccccttcattcaatcctgtagcaactggcagtgacaagtggtgcccaggacagggacatgagcaaagaaggtctgctggagcagagaaagtgaaactgaccagatgagcaagaaaccttgggacaagtctrctggcagctaatataagcacataccaaggttaccagcactcggggaagcaaggacggaagaagaaaagaggatgctctttctccctcatgtaccccaggtatctgctagaaagagaagagaactagggacacctgccaccctcttcctagytgattgacaatttctttagagttctaacatcttatagctttggcattctactcatggaacaagatattttctttaccccaacaggttctgtggatggaaagagaccaaatactttagcatccaatactcagctgtacaagtggatatcccagaatgaccttcttggtcatccaaaaactaaatcttttatgactcatggtgaaaccagtggcatctatgaggcaatctaccatgggatccctatggtgggcattcctttgtttgcagatcaacctgataacattgctcacatgaaggccctcaatgtggacatcaggaccatgtcaagtacagatttgctcaatgcactgaagacagtcattaatgaccctgtctacaaagagaatgctatgaagttatcaataattcgccatgatttgccaattaagcccctggatcaagcagccttctggattgagtttgtcatgcagcrcaaaggagccaagcaccttcgggttgcagcccacgacctcacctggttccaataccacaacttgcatgtgattaggttcctgctggcctatgtgtcaactgtgatcttcatcatcacaagatgttgcctgtttyctttctga

SEQ ID NO: 2032 - DNA, 934 bp, Homo sapiens
ctgctcaccagggcagcttttaactctagtaaagtggatattgttgccattaatgacccttcattgacctcaactacatggtttacatgttcgagtatgattccacccatggcaaattccatggcactgtcaaggctgagaaagggaagcttgtcatcaatggaaatcccatcaccatcttccaggagcaagatccctccaaaatcaaatggggcgatgctggcgctgaatatgttgtgaagtccaccagcggaggagctamaagggtcatcatctctgccccctctgctgatgcccccatgttcgtgatgggcatgaaccacaagaagtatgacaacagactcaatatcgtcagctatgcctcctgcaccaccaactgcttagtgcccctgggcgaggtcatccatgacaactttggtattgtggaaagattccagaatacagtccacgccatcactgccacccagaagattgtggatggcctctctgggaaactgtggtgcgacggctgcggggctctccagaacatcacccctgcctctactggcactgccaaggctgtgggtaggggtcatctctaagctgaacaagaagctcactgacatgggcttctgtgtccacatcaccaacgtgtcagtcatggacctcacctgccgtctcgaaaaacctgccaaatatgatgacattaagaagggcatctggggcgacactgagcaccaggttgtctcctctgacttcaacagagacacccactcctccacctttgatgctggggccggcattgccctcaaagaccattttgtcaagctcatttcctggtatgacaacgaatttggctacagcaacagggtggtggacctcatggcccacatagcctccaaggagtaacacccctggaccaccagccccagtgagagcatgagaggaagcgaga

SEQ ID NO: 2033 - DNA, 1052 bp, Homo sapiens
gtggtgaaggtgaaggctggagtcaacggatttggatgtattgggcacctgctcaccagggcagcttttaactctagtaaagtggatattgttgccattaatgacccttcattgacctcaactacatggtttacatgttcgagtatgattccacccatggcaaattccatggcactgtcaaggctgagaaagggaagcttgtcatcaatggaaatcccatcaccatcttccaggagcaagatccctccaaaatcaaatggggcgatgctggcgctgaatatgttgtgaagtccaccagcgtctttcaccatggagaaggctggggctgacttgcagggaggagctamaagggtcatcatctctgccccctctgctgatgcccccatgttcgtgatgggcatgaaccacaagaagtatgacaacagactcaatatcgtcagctatgcctcctgcaccaccaactgcttagtgcccctgggcgaggtcatccatgacaactttggtattgtggaaagattccagaatacagtccacgccatcactgccacccagaagattgtggatggcctctctgggaaactgtggtgcgacggctgcggggctctccagaacatcacccctgcctctactggcactgccaaggctgtgggtaggggtcatctctaagctgaacaagaagctcactgacatgggcttctgtgtccacatcaccaacgtgtcagtcatggacctcacctgccgtctcgaaaaacctgccaaatatgatgacattaagaaggtggkgragtgagcattggagtgtccccccaagggcatctggggcgacactgagcaccaggttgtctcctctgacttcaacagagacacccactcctccacctttgatgctggggccggcattgccctcaaagaccattttgtcaagctcatttcctggtatgacaacgaatttggctacagcaacagggtggtggacctcatggcccacatagcctccaaggagtaacacccctggaccaccagccccagtgagagcatgagaggaagcgaga

SEQ ID NO: 2034 - DNA, 1555 bp, Homo sapiens
cggcccagccaggctggggtccgcgcggggcctcccgagaggcggcaaggggcgctgggaaggcgcaagcccgcgccggctccctgcggatgcccgggtcggagaggggcgcccgggaggggcgggtctactggcacgtggaggggccggcccgggttcgcggttccccgtgcccaggcaggaggggctgcagacgcctgagctccgtaggggttggggctgggggctgcggagctgtctacatcggactcctccgggtcagcccgttaggagccgcctcccctctgcccctccgaagagacgagcggcccagacaggcctgggaaggcccctctgccccgtcaggggtgaaaagcaaagctggaaggattcggagagggttggggccgtcttcctcatccttccttttctcggggctcccgtgggcccccacgcattccagtcttcggaacccggcctctgaagagggcgcagtagggccccagcggagcgcgagaacccgctctacagcctattgcttccccgccctgggcagagccacctggacatgagacccgccctcaatgccgaagcctctcggaagcaatctttcgggacggaagttaagtagccccgagcgggaggctgtggcggaagtggtcgcgttaccgcttgtttgtgcgcatgcgccactctcgtctggccgccgcgctttcaggaggtgcttttggttctctccggtcttgtccacgctagggggtgcacgtactcccaactgtggtcgcgctctcaccccttctgctgctctcgtggccccctcgcgatggcgggcatcctgtttgaggatattttcgatgtgaaggatattgacccggagggcaagaagtttgaccgagtgtctcgactgcattgtgagagtgaatctttcaagatggatctaatcttagatgtaaacattcaaatttaccctgtagacttgggtgacaagtttcggttggtcatagctagtaccttgtatgaagatggtaccctggatgatggtgaatacaaccccactgatgataggccttccagggctgaccagtttgagtatgtaatgtatggaaaagtgtacaggattgagggagatgaaacttctactgaagcagcaacacgcctctctgcgtacgtgtcctatgggggcctgctcatgaggctgcagggggatgccaacaacctgcatggattcgaggtggactccagagtttatctcctgatgaagaagctagccttctgaacctcgcctgaagccagcctctctgccaagtcactcaggtcatgggcattgttcaagcctgagtggcagccgctcttgctcacctgttgaggaagggctggctcactgtccaccgtggcggcatctttaactggcctccactcaatgggaaactgactcgcctgtgaaagacacagtgggagagctgaaaatgaatcagaagctttatgtawatgatttttaaattaaactttactttttcagactgcccctcccctttttgtaaaaagtccatttactgtaaaatcgttttttccagtt

SEQ ID NO: 2035 - DNA, 1130 bp, Homo sapiens
gcccccacgcattccagtcttcggaacccggcctctgaagagggcgcagtagggccccagcggagcgcgagaacccgctctacagcctattgcttccccgccctgggcagagccacctggacatgagacccgccctcaatgccgaagcctctcggaagcaatctttcgggacggaagttaagtagccccgagcgggaggctgtggcggaagtggtcgcgttaccgcttgtttgtgcgcatgcgccactctcgtctggccgccgcgctttcaggaggtgcttttggttctctccggtcttgtccacgctagggggtgcacgtactcccaactgtggtcgcgctctcaccccttctgctgctctcgtggccccctcgcgatggcgggcatcctgtttgaggatattttcgatgtgaaggatattgacccggagggcaagaagtttgaccgagtgtctcgactgcattgtgagagtgaatctttcaagatggatctaatcttagatgtaaacattcaaatttaccctgtagacttgggtgacaagtttcggttggtcatagctagtaccttgtatgaagatggtaccctggatgatggtgaatacaaccccactgatgataggccttccagggctgaccagtttgagtatgtaatgtatggaaaagtgtacaggattgagggagatgaaacttctactgaagcagcaacacgcctctctgcgtacgtgtcctatgggggcctgctcatgaggctgcagggggatgccaacaacctgcatggattcgaggtggactccagagtttatctcctgatgaagaagctagccttctgaacctcgcctgaagccagcctctctgccaagtcactcaggtcatgggcattgttcaagcctgagtggcagccgctcttgctcacctgttgaggaagggctggctcactgtccaccgtggcggcatctttaactggcctccactcaatgggaaactgactcgcctgtgaaagacacagtgggagagctgaaaatgaatcagaagctttatgtawatgatttttaaattaaactttactttttcagactgcccctcccctttttgtaaaaagtccatttactgtaaaatcgttttttccagtt

SEQ ID NO: 2036 - DNA, 1808 bp, Homo sapiens
ccggaggggacggcccagccaggctggggtccgcgcggggcctcccgagaggcggcaaggggcgctgggaaggcgcaagcccgcgccggctccctgcggatgcccgggtcggagaggggcgcccgggaggggcgggtctactggcacgtggaggggccggcccgggttcgcggttccccgtgcccaggcaggaggggctgcagacgcctgagctccgtaggggttggggctgggggctgcggagctgtctacatcggactcctccgggtcagcccgttaggagccgcctcccctctgcccctccgaagagacgagcggcccagacaggcctgggaaggcccctctgccccgtcaggggtgaaaagcaaagctggaaggattcggagagggttggggccgtcttcctcatccttccttttctcggggctcccgtggcgacgtcatggcaaattcccaaactggacggatccggctcgggttacgtccagcagggccgagccggcccaggccggccccggggtcctcggtgccggctggaggggctgggcacctctggggcggggttctgctccacctgccctcggcgcggactgtgccctcggcgggcacgcggaccggcggggtagggctagggcccggcttctctgggccaaggatcaaggtccctgcctgggttaggcccccacgcattccagtcttcggaacccggcctctgaagagggcgcagtagggccccagcggagcgcgagaacccgctctacagcctattgcttccccgccctgggcagagccacctggacatgagacccgccctcaatgccgaagcctctcggaagcaatctttcgggacggaagttaagtagccccgagcgggaggctgtggcggaagtggtcgcgttaccgcttgtttgtgcgcatgcgccactctcgtctggccgccgcgctttcaggaggtgcttttggttctctccggtcttgtccacgctagggggtgcacgtactcccaactgtggtcgcgctctcaccccttctgctgctctcgtggccccctcgcgatggcgggcatcctgtttgaggatattttcgatgtgaaggatattgacccggagggcaagaagtttgaccgagtgtctcgactgcattgtgagagtgaatctttcaagatggatctaatcttagatgtaaacattcaaatttaccctgtagacttgggtgacaagtttcggttggtcatagctagtaccttgtatgaagatggtaccctggatgatggtgaatacaaccccactgatgataggccttccagggctgaccagtttgagtatgtaatgtatggaaaagtgtacaggattgagggagatgaaacttctactgaagcagcaacacgcctctctgcgtacgtgtcctatgggggcctgctcatgaggctgcagggggatgccaacaacctgcatggattcgaggtggactccagagtttatctcctgatgaagaagctagccttctgaacctcgcctgaagccagcctctctgccaagtcactcaggtcatgggcattgttcaagcctgagtggcagccgctcttgctcacctgttgaggaagggctggctcactgtccaccgtggcggcatctttaactggcctccactcaatgggaaactgactcgcctgtgaaagacacagtgggagagctgaaaatgaatcagaagctttatgtawatgatttttaaattaaactttactttttcagactgcccctcccctttttgtaaaaagtccatttactgtaaaatcgttttttccagtt

SEQ ID NO: 2037 - DNA, 2972 bp, Homo sapiens
caatccctccctccggcgggcgtcgctggcgggtggctaggcccaacggcaggaagccgacgctatcctccgttccgcggcgccgggtccgccttccgtctgttctagggcctgctcctgcgcggcagctgctttagaaggtctcgagcctcctgtaccttcccagggatgaaccgggccttccctctggaaggcgagggttcsggccacagtgagcgagggccagggcggtgggcgcgcgcagagggaaaccggatcagttgagagagaatcaagagtagcggatgaggcgcttgtggggcgcggcccggaagccctcgggcgcgggctgggagaaggagtgggcggaggcgccgcaggaggctcccggggcctggtcgggccggctgggccccgggcgcagtggaagaaagggacgggcggtgcccggttgggcgtcctggccagctcaccttgccctggcggctcgccccgcccggcacttgggaggagcagggcagggcccgcggcctttgcattctgggaccgcccccttccattcccgggccagcggcgagcggcagcgacggctggagccgcagctacagcatgagagccggtgccgctcctccacgcctgcggacgcgtggcgagcggaggcagcgctgcctgttcgcgccatgggggcaccgtggggctcgccgacggcggcggcgggcgggcggcgcgggtggcgccgaggccgggggctgccatggaccgtctgtgtgctggcggccgccggcttgacgtgtacggcgctgatcacctacgcttgctgggggcagctgccgccgctgccctgggcgtcgccaaccccgtcgcgaccggtgggcgtgctgctgtggtgggagcccttcggggggcgcgatagcgccccgaggccgccccctgactgccggctgcgcttcaacatcagcggctgccgcctgctcaccgaccgcgcgtcctacggagaggctcaggccgtgcttttccaccaccgcgacctcgtgaaggggccccccgactggcccccgccctggggcrtccaggcgcacactgccgaggaggtggatctgcgcgtgttggactacgaggaggcagcggcggcggcagaagccctggcgacctccagccccaggcccccgggccagcgctgggtttggatgaacttcgagtcgccctcgcactccccggggctgcgaagcctggcaagtaacctcttcaactggacgctctcctaccgggcggactcggacgtctttgtgccttatggctacctctaccccagaagccaccccggcgacccgccctcaggcctggccccgccactgtccaggaaacaggggctggtggcatgggtggtgagccactgggacgagcgccaggcccgggtccgctactaccaccaactgagccaacatgtgaccgtggacgtgttcggccggggcgggccggggcagccggtgcccgaaattgggctcctgcacacagtggcccgctacaagttctacctggctttcgagaactcgcagcacctggattatatcaccgagaagctctggcgcaacgcgttgctcgctggggcggtgccggtggtgctgggcccagaccgtgccaactacgagcgctttgtgccccgcggcgccttcatccacgtggacgacttcccaagtgcctcctccctggcctcgtacytgcttttcctcgaccgcaaccccgcggtctatcgccgctacttccactggcgccggagctacgctgtccacatcacctccttctgggacgagccttggtgccgggtgtgccaggctgtacagagggctggggaccggcccaagagcatacggaacttggccagctggttcgagcggtgaagccgcgctcccctggaagcgacccaggggaggccaagttgtcagctttttgatcctctactgtgcatctccttgactgccgcatcatgggagtaagttcttcaaacacccatttttgctctatgggaaaaaaacgatttaccaattaatattactcagcacagagatgggggcccggtttccatattttttgcacagctagcaattgggctccctttgctgctgatgggcatcattgtttaggggtgaaggagggggttcttcctcaccttgtaaccagtgcagaaatgaaatagcttagcggcaagaagccgttgaggcggtttcctgaatttccccatctgccacaggccatatttgtggcccgtgcagcttccaaatctcatacacaactgttcccgattcacgtttttctggaccaaggtgaagcaaatttgtggttgtagaaggagccttgttggtggagagtggaaggactgtggctgcaggtgggactttgttgtttggattcctcacagccttggctcctgagaaaggtgaggagggcagtccaagaggggccgctgacttctttcacaagtactatctgttcccctgtcctgtgaatggaagcaaagtgctggattgtccttggaggaaacttaagatgaatacatgcgtgtacctcactttacataagaaatgtattcctgaaaagctgcatttaaatcaagtcccaaattcattgacttaggggagttcagtatttaatgaaaccctatggagaatttatccctttacaatgtgaatagtcatctcctaatttgtttcttctgtctttatgtttttctataacctggattttttaaatcatattaaaattacagatgtgaaaataaagcagaagcaacctttttccctcttcccagaaaaccagtctgtgtttacagacagaagagaaggaagccatagtgtcacttccacacaattatttatttcatgtctttactggacctgaaatttaaactgcaatgccagtcctgcaggagtgctggcattaccctctgcagaacagtgaaaggtattgcactacattatggaatcatgcaaaaggaa

SEQ ID NO: 2038 - DNA, 2055 bp, Homo sapiens
agccatctcttcccaaggcaggtggtgacttgagaactctgtgcctggtttctgaggactgtttcaccatgcagtggctaatgaggttccggaccctctggggcatccacaaatccttccacaacatccaccctgccccttcacagctgcgctgccggtctttatcagaatttggagccccaagatggaatgactatgaagtaccggaggaatttaactttgcaagttatgtactggactactgggctcaaaaggagaaggagggcaagagaggtccaaatccagctttttggtgggtgaatggccaaggggatgaagtaaagtggagcttcagagagatgggagacctaacccgccgtgtagccaacgtcttcacacagacctgtggcctacaacagggagaccatctggccttgatgctgcctcgagttcctgagtggtggctggtggctgtgggctgcatgcgaacagggatcatcttcattcctgcgaccatcctgttgaaggccaaagacattctctatcgactacagttgtctaaagccaagggcattgtgaccatagatgcccttgcctcagaggtggactccatascttctcagtgcccctctctgaaaaccaagctcctggtgtctgatcacagccgtgaagggtggctggacttccgatcgctggttaaatcagcatccccagaacacacctgtgttaagtcaaagaccttggacccaatggtcatcttcttcaccagtgggaccacaggcttccccaagatggcaaaacactcccatgggttggccttacaaccctccttcccaggaagtaggaaattacggagcctgargacatctgatgtctcctggtgcctgtcggactcaggatggattgtggctaccatttggwccctggtagaaccatggacagcgggttgtacagtctttatccaccatctgccacagtttgacaccaaggtcatcatacagacattgttgaaataccccattaaccacttttggggggtatcatctatatatcgaatgattctgcagcaggatttcaccagcatcaggttccctgccctggagcactgctatactggcggggaggtcgtgttgcccaaggatcaggaggagtggaaaagacggacgggccttctgctctacgagaactatgggcagtcggaaacgggactaatttgtgccacctactggggaatgaagatcaagccgggtttcatggggaaggccactccaccctaygacgtccaggtcattgatgacaagggcagcatcctgccacctaacacagaaggaaacattggcatcagaatcaaacctgtcaggcctgtgagcctmttcatgtgctatgagggtgacccagagaagacagctaaagtggaatgtggggacttctacaacactggggacagaggwaagatggatgaagagggctacatttgtttcctggggaggagtgatgacatcattaatgcctctgggtatcrcatcgggcctgcagaggttgaaagygctttggtggagcacccagcggtggcggagtcagccgtggtgggcagcccagacccgattcgaggggaggtggtgaaggcctttattgtcctgaccccacagttcctgtcccatgacaaggatcagctgaccaaggaactgcagcagcatgtcaagtcagtgacagccccatacaagtacccaaggaargtggagtttgtctcagagctgccaaaaaccatcactggcaagattgaacggaaggaacttcggaaaaaggagactggtcagatgtaatcggcagtgaactcagaacgcactgcacacctraggcaaatccctggccactttagtctccccactatggtgaggacgagggtggggcattgagagtgttgatttgggaaagtatcaggagtgccatgattccaatgttttccttcttttaaattaaattcagttgctctgcttcctccaagtcctctgtatctttagaatttcccaggtgagcactcataacgcaagtaataaaatactgatatcaacaata

SEQ ID NO: 2039 - DNA, 1137 bp, Homo sapiens
atgcagtggctaatgaggttccggaccctctggggcatccacaaatccttccacaacatccaccctgccccttcacagctgcgctgccggtctttatcagaatttggagccccaagatggaatgactatgaagtaccggaggaatttaactttgcaagttatgtactggactactgggctcaaaaggagaaggtatgtcaagaaaaaccaagccctgtgtcttccagaggttatgtgtttctgcagaaaaccccaagtgcttggtttgtcttctcacaagacacagaccaagagagaagcagtagtgacattaggagtcaggagggcaagagaggtccaaatccagctttttggtgggtgaatggccaaggggatgaagtaaagtggagcttcagagagatgggagacctaacccgccgtgtagccaacgtcttcacacagacctgtggcctacaacagggagaccatctggccttgatgctgcctcgagttcctgagtggtggctggtggctgtgggctgcatgcgaacagggatcatcttcattcctgcgaccatcctgttgaaggccaaagacattctctatcgactacagttgtctaaagccaagggcattgtgaccatagatgcccttgcctcagaggtggactccatascttctcagtgcccctctctgaaaaccaagctcctggtgtctgatcacagccgtgaagggtggctggacttccgatcgctggttaaatcagcatccccagaacacacctgtgttaagtcaaagaccttggacccaatggtcatcttcttcaccagtgggaccacaggcttccccaagatggcaaaacactcccatgggttggccttacaaccctccttcccaggaaggaaattacggagcctgargacatctgatgtctcctggtgcctgtcggactcaggatggattgtggctaccatttggwccctggtagaaccatggacagcgggttgtacagtctttatccaccatctgccacagtttgacaccaaggtcatcatacagacattgttgaaataccccattaaccacttttggggggtatcatctatatatcgaatgattctgcagcaggatttcaccaggtatggtagaagtggcttg

SEQ ID NO: 2040 - DNA, 940 bp, Homo sapiens
atgaagatcaagccgggtttcatggggaaggccactccaccctaygacgtccagtttcatatggaggcctcagttgaaaactgcattattgtgagcatgaacaccgctgaccctggcagccagggcatcacacacagcctcttgctacaggtcattgatgacaagggcagcatcctgccacctaacacagaaggaaacattggcatcagaatcaaacctgtcaggcctgtgagcctmttcatgtgctatgagggtgacccagagaagacagctaaagtggaatgtggggacttctacaacactggggacagaggwaagatggatgaagagggctacatttgtttcctggggaggagtgatgacatcattaatgcctctgggtatcrcatcgggcctgcagaggttgaaagygctttggtggagcacccagcggtggcggagtcagccgtggtgggcagcccagacccgattcgaggggaggtggtgaaggcctttattgtcctgaccccacagttcctgtcccatgacaaggatcagctgaccaaggaactgcagcagcatgtcaagtcagtgacagccccatacaagtacccaaggaargtggagtttgtctcagagctgccaaaaaccatcactggcaagattgaacggaaggaacttcggaaaaaggagactggtcagatgtaatcggcagtgaactcagaacgcactgcacacctraggcaaatccctggccactttagtctccccactatggtgaggacgagggtggggcattgagagtgttgatttgggaaagtatcaggagtgccatgattccaatgttttccttcttttaaattaaattcagttgctctgcttcctccaagtcctctgtatctttagaatttcccaggtgagcactcataacgcaagtaataaaatactgatatcaacaata

SEQ ID NO: 2041 - DNA, 2245 bp, Homo sapiens
gcacggagacctcgcaggcccccggaactgtcgcccttccaggatgtggctccctgctcttgtcctggccactctcgctgcttccgcggcttgggcagtgcatccgtcctcgccacctgtggtggacaccgtgcatggcaaagtgttggggaagttcatcagcttagaaggatttgcacagcctgtggccgttttcctgggaatcccttttgccaagccccctcttggacccctgaggtttactccaccgcagcctgcagagccgtggagctttgtgaagaatgccaccttgtaccctcctatgttcacccaagatcccaaggcggggcagttamtctcagagctatttacaaactgaaaagagaacattcctctcaagctttctgaagactgtctttacctcaatatttacactcctgctgacttgaccaagaaaaacaggctgccggtgatggtgtggatccacggaggggggctgatggtgggtgcggcatcaacctacgatgggctggcccttgctgcccatgaaaacgtggtggtggtgaccattcaatatcgcctgggcatctggggattcttcagcacaggggatgaacacagcccggggaactgtggtcacctggaccagctggctgccctgcactgggtccaggacaacattgccagctttggagggaacccaggctctgtgaccatctttggagggtcagtgggaggagaaagtgtctctgttcttgttttgtctccattggccaagaacctcttccaccgggccatttctgagagtggcgtggccctcacttctgttctggtgaagaaaggtgatgtcaagcccttggctgaggtaggtctccggctggtacgtctctggctggacacccacacctccttggctctatgctcctgaatcctcagggatctctcttgtggttggttgtagctaatgttctcctagaatcactgaggcaccaatggctgagcaggaagggcgaggagacaccttgatcagcgtcccagtttcacagccaggcaaaccgacacagggcttggaagggatttgccaagggcagcaggtgatcagggcagagctgggactccagctcatggccctagcagccagtacagtgccctgtctgtgaccacactccacctatgtgccagggcctggtgccatgttgggcagtgatggtgtcttgtgtctctcagggtctgagttctgtggacccacttgtgggctgtgggcctgaagcagttccacactgagcgcctgataaccagggttggttcctggagaattcactcattgattcatttgttcacacaacaaaactaggtgactaagtgaaggcaaaaacaagaaatgggcagacgtcatcctttggctcaaagccagatgtccgtgtggaggggacatagacactgcatggccctatgtggctctgcattctagtcagacayctaacacctccccaagcttctgctataatgtagggaatagatgaatagctacagaatcacacaactagaaagtgtcacctatgacaagagcagtgaaggtgaggtacttgctgccacagcagaatctaaagaaagcattgagtcctggggctggamgaggttaccagggaaggcttgctggaaaagtgactaatgagtcaggagcaaggaacgtccagggagtgggagcagcacatgcgcgtgctgtggcaggaggacgcatcccaatcgggagggagagacagagacagagccgatggggccagagcaggcagaacaggcggagcgcggcgagtactgacagaggggacgttgggaggggccaccctgcacaggaccctggcaaggattttgtcatcatctggagagtggttgaaagccaaaggaagaggtgatcgataggaatccagacctaggctgaggatcgcccactggagccagtggcatggaggatttcggtagatttgaaagcttgtttggggaaagcatccaaatttaaagggccggtacataggaggagagaaaatggggatgccaagaatttttagaatttttgagaattttttaagaattcattggttataagcaacagttgcccattgaccagacttaagtcaagaaggagcattagcctggtgtggtggctcatgcctgtaatccctgcaatttgggagaccaaatgagaaggattgcttgagcccaggagtttgagaccagccagggcaacaaagtgataccctgtctctac

SEQ ID NO: 2042 - DNA, 2582 bp, Homo sapiens
cacaggaacaccagattgccatccctggggaacagaatgcaacccgggatctagagagctgtcacattccaagaaatatttaaattgtgctgattttcttctggagaactgagcccagggaatgaaactctccatcaagtcatggctttgcgggcaatagatcagaggatattgccagttttctaatggattattgttatcgggcaggttttctctgaagcttctcagctgctgttacattctacttggatgggaactggagatcagccagatcacttgtatgcacaaagctgctgtggatctgtctttcaaacaagagctgcagaaaacgctatagcaaggttgaagctttatccactctgactcacccagaaagcacagccctgattctgcgtgagaaaggctatctctacagaaactaaaacggtatcaacggtttctgtacagcacagattatgacagcgtctttcttaagcagatggaatcttggaacgtctcatgcttgggaaggacatggtcagatttgttgtaagaaagactgtgcagaggagtgtggcaaagggatccagaagatgcaaggtattatttagaaaagaagagaatgtttaaatttcatcaaatgaaacatatttttgaaatacttgataaaatgagatgcctgagaaaacgttctacagtgtcattcttgggagttcttgtcatttttctcctttttatgaacttgtacattgaagatagctatgttctggaaggagacaaacaacttataagggaaacatccacacatcaactgaattcagaacgctatgttcatactttcaaggatttatctaatttctcaggagccataaatgtcacctatcgctacctagctgccacacctttacaaagaaagcggtatcttacaattggactttcttcagtaaagcgaaaaaaaggaaactatttacttgagacaattaagtcaatttttgagcaatccagctatgaagagctgaaggaaatttcagtggtggttcacctagcagactttaattcttcctggcgtgatgccatggtccaggatattacacagaaatttgcgcaccatattattgcaggaagattaatggttatacatgctccagaggagtattacccaatcctagatggccttaaaagaaattacaatgatccagaagatagagtcaaatttcgttccaagcaaaatgtagattatgcttttctgcttaatttttgtgccaatacttcagactattatgtaatgcttgaagatgatgttcgatgttcaaaaaatttcttaactgccatcaagaaagtcattgcatccctagaaggaacttactgggtaactcttgaattctctaagcttggctacattggtaaactctatcattctcatgatctcccacgtttggcccattttttattaatgttttatcaagaaatgccttgtgattggctattgactcatttccgtggtctgttggctcagaaaaatgtgatccgttttaaaccatctctctttcagcacatgggctattattcatcatacaaagggacggagaataagctgaaggatgatgattttgaagaggagtcatttgacattcctgataacccccctgcaagtctgtacaccaacatgaatgtgtttgaaaattatgaagcaagcaaggcttacagtagtgttgatgagtacttttgggggaaaccaccttcarcaggagatgtttttgtgattgtatttgaaaatccaattataataaaaaaaattaaagtaaatactggaacagaagatcggcaaaatgatattttgcatcatggagccctrgatgttggggaaaaygttatgcctagcaaacaaaggagacaatgttctasttacttaagactaggagaattcaaaaatggaaactttgaaatgtcaggtgtaaatcaaaaaattccatttgatatacattgtatgaggatatatgtcaccaaaacacaaaaggaatggctaattattaggagtattagcatttggacttcttagccaattaaatcagtatgttcagtttctgaagcagttcttcctgcttcgtcttttgctacctttgtcttttggagggaaagcaatggatgggatatgttaaaagaaacattaattacattggcagttttcatttatacattgttgacataattttactcttaatacacacttgtatttattttaacgtctgaagttgaatatcagtctatagctaatgctactttcatttatatttttaaatgttcttagttttaaaatttcaactgattgtcgaaagggtaatatgaaagattttaaatgaaaaaaatttgttggatgatgatttttgaaaaatagtcaccaactgtatatacttcctcaagaactgataattcattatatcatcagatagcttttattaagcatctgtgggaatatacagttgggtggaatgataatctggtttattttttctgtaaacttaagtttccgttgacttctgtacatctacaatgaatacctcctcatagaagtggtgtctttacataattttttgtgtaggtga

SEQ ID NO: 2043 - DNA, 543 bp, Homo sapiens
atgggccatggggtggagcagacagacttgsagtttggaagccagatggaccaagcaaggagmctgactctgagctcaccagctgtgcaattcgggccaagrtcacatgtgcaccatggagggcaaaagacttggcggtttcgaaccctatggtttaaaggaaagtcaatgttagaaaacataacatcaacacaagaattcctgactgtagttacggtacctccagtggtcacaatggactcgctcaagatactgtggccttgtgaccagccagaaatggacgaggtgccctcttatcccgagcagctcaaggaggaaaaargcatcttctccatttcagatgtgtctttctgggtgaagggatctccatttgcgttaacatccctgaccccctctgccactcacttattcctgctcaagggagctgatccaacttatgttgtgaatgatagaaacttgctaccaatgaagcttgccctaactgtcagcgaagctattttcagcaatggtacaatttctccacctgaaagcaggctcatcaaa

SEQ ID NO: 2044 - DNA, 582 bp, Homo sapiens
accaaatccaagatggcggccagcaggaggctgattaagagaactctccatatgattaggtgaccttcagaatcgaaatcaactttccagcagagtatccattcaaactaccaaakatcacatttaaaacaaagatctatcacccaaatatcgacgaaaaggggcaggtctgtctgtcagtaattagtgctgaaaactggaagccagcaaccaaaaccgaccaagtaatccagtccctcatagcactggtgaatgacccccagcccgagcacccgcttcgggctgacctagctgaagaatactctaaggaccgtaaaaaattctgtaagaatgctgaagagtttacaaagaaatatggggaaagtgacctgtggactaaaatctgccacgattggttccagcaagtgtaagcagaggccccatgcagtgcattcagacacccggcaaagcaggactctgtggaaattgacacgtgccaccgcctgacattcacttgtggcagttactaactttctacagttttcttagtgaaaaatggtgtaggtaatctgtaaagaaaggattaaaatctaagatgtttta

SEQ ID NO: 2045 - DNA, 683 bp, Homo sapiens
aaataccaaatccaagatggcggccagcaggaggctgattaagagcttgaggaaatctgcaaatgtgggatgaaaaacttcccgtaacatccaggttgatgaagctaatttattgacttagcaagggcttattgttcctgacaactctccatatgattaggtgaccttcagaatcgaaatcaactttccagcagagtatccattcaaactaccaaakatcacatttaaaacaaagatctatcacccaaatatcgacgaaaaggggcaggtctgtctgtcagtaattagtgctgaaaactggaagccagcaaccaaaaccgaccaagtaatccagtccctcatagcactggtgaatgacccccagcccgagcacccgcttcgggctgacctagctgaagaatactctaaggaccgtaaaaaattctgtaagaatgctgaagagtttacaaagaaatatggggaaagtgacctgtggactaaaatctgccacgattggttccagcaagtgtaagcagaggccccatgcagtgcattcagacacccggcaaagcaggactctgtggaaattgacacgtgccaccgcctgacattcacttgtggcagttactaactttctacagttttcttagtgaaaaatggtgtaggtaatctgtaaagaaaggattaaaatctaagatgtttta

SEQ ID NO: 2046 - DNA, 2625 bp, Homo sapiens
cacgtgctgtcagaacgccgcctcctccgcttgcggccggtctgcaccatgctgcgaacgtccgtcctccgcctgctaggacgcacgggggctagtaggctgtctctcctggaggacttcggcccacgctactacagttcgggctccctcagtgccggcgatgatgcttgtgatgtgcgcgcctacttcactacacccattttctacgtgaacgcggcgccgcacatcgggcacctgtactcggcactactggcggacgccctatgccgccaccgtcgcctccgaggtcccagcacggccgccacgcgattctccactggtaccgacgagcacgggctgaagattcagcaggcagcagctaccgcgggcctggccccgaccgagctgtgcgaccgagtctctgagcagttccagcagcttttccaggaggccggtatctcctgcacagatttcatccgcaccacggaggcccggcaccgggtggctgtgcagcacttctggggggtgcttaagtcccgyggtctgctctacaagggcgtctatgaaggttggtattgcgcttccgacgagtgcttcctgcctgaggccaaggtcacccagcagccgggcccatcgggggattcgtttcctgtatctctcgagagcgggcatccrgtctcctggaccaaggaagaaaactacattttcaggctttcccagttccggaagccactccagcggtggctgcggggcaaccctcaggcgatcacccccgaaccatttcatcacgtagttcttcagtggctggacgaggagytgcccgacctgtccgtgtctcgcagaagtagccacttgcactggggcattccggtgcccggggatgattcgcagaccatctatgtatggctggatgccctggtcaactacctcactgtaattggctacccaaatgctgagttcaaatcttggtggccggccacctctcatatcataggtaaggacattctcaaattccatgccatctattggcctgccttcctgttaggggccggcatgagcccgccacagcgcatctgtgtccattcccactggacagtctgtggccaaaagatgtccaagagcttgggcaacgtggtggatcctaggacttgccttaaccgctataccgtggatggcttccgctactttctccttcggcagggcgtccccaactgggactgtgactactatgatgaaaaggtggttaagttgctgaactccgagctggcagatgccttgggaggtctcttgaaccgatgcactgccaaaagaataaatccttctgagacctacccagccttctgcactacctgcttccctagtgagccagggttggtggggccgtcagttcgtgctcaggcagaggattatgctctggtgagcgcagtggccactttgccaaagcaggtagcagaccactatgataactttcggatatataaggctctggaggccgtgtccagctgtgtccggcaaactaatggttttgtccaaaggcatgcaccatggaagctgaactgggagagcccagtggatgctccctggctgggtactgtgcttcatgtggccttggaatgtttgcgagtctttgggactttgctgcagcctgtcaccccaagcctagctgacaagctgctgtctaggctgggggtctctgcctcagagaggagtcttggagagctctatttcttgcctcgattctatggacatccatgcccttttgaagggaggaggctgggacctgaaactgggcttttgtttccaagactagaccagtccaggacttggctggtgaaagcccaccggacctagaaactcagttcttaccggcttgtggtaaaaaagcaaatgtgttatctttttattttttattttcaggaaagttatactagtattttcttaagtgtggaatcaaatgagcacataagctgtgtccctgtgaaaagaggtttgtagcctttcaggtgcctgctcctattcttcatttctctgtgaccattgatcactgtcctttgtgcattgtgtgtctaagatgtcttcaggggaaagatgggtaagagacagtgttgctaatgctgttccttctttgtgcctccttccaaaccacagttatttgcccaaactacctctcgtggctggtttttcattggcctggcctctgcttctcaggctaattagtgactcctttctttgagggtcagggttggaggccccttactggtggttttacagggggatcctactttgttacacatgttgggtttcctgataaaaagagagtattttattaaacccttgaaccagtgtcctagaccagatgatttttgcccatgtgtatccccatttaaattcctacaactaagtctccctgctttgttaatagtccaacagttgggttgtgtaacatcacacttcaaccggtagatggctctaatctcacacatttacttactaaagattgaggattcggaatatttagaataaattagttttctgctttctaattttgcagatctttacatttttattgcttttcttaaaataagggatagctttgcaaccactattgttttaatggaaagcaaaaaacccccccaaacttatcag

SEQ ID NO: 2047 - DNA, 8362 bp, Homo sapiens
tggcggcggctccggggaccggggccttttgtttggagcggctgcgggggggccccggagcggcgaggccggcggccttccccagcttgctcggtcccggccacccctcgcgggggtggggggccgccccctgggccgggcatctcctcaggcgccgccgccccgccctaggccggccccgcccggcctgaggggaggaaccggccgggcctcgccgcgcggcccagccacctccggagtcgccgcctctgctctcagtgccccggatcggaggccgtccatcgcccctcgggccgacgccatgaagatcaaagatgccaagaaaccctctttcccrtggtttggcatggacattgggggaactctagtaaagctctcgtactttgaacctattgatatcacagcagaggaagagcaagaagaagttgagagtttaaaaagtattcggaaatatttgacttctaacgtggcatatggatccaccggcattcgggatgtacaccttgaactgaaagatttaacactttttggccgaagagggaacttgcactttatcaggtttccaacccaggacctgcctacttttatccaaatgggaagagataaaaacttctcaacattgcagacggtgctatgtgctacaggaggtggtgcttacaagtttgaaaaagattttcgcacaattggaaacctccacctgcacaaactggatgaacttgactgccttgtaaagggcttgctgtatatagactctgtcagtttcaatggacaagccgagtgctattattttgctaatgcctcagaacctgagcgatgccaaaagatgccttttaacctggatgatccctatccactgcttgtagtgaacattggctcaggagtcagtrttttagcagtccattccaaagacaactataaacgagtgactgggacaagccttggagggggtacctttctgggtttatgcagtttattgactggctgtgaaagttttgaagaggctcttgaaatggcatccaaaggtgatagcacacaagctgacaagctggtccgtgatatttatggaggagattatgaaagatttggtttgccaggttgggctgtagcatctagttttgggaatatgatttataaggagaagcgagaatctgttagtaaagaagatctggcaagagctactttagttactatcaccaataacattggttctgtggcacgaatgtgtgctgttaatgagaaaataaacagagttgtctttgttggaaactttttacgtgtcaataccctctcaatgaaacttttggcatatgcactggattactggtcaaaaggtcaactaaaagcattgtttctagaacatgagggttactttggagcagttggtgcacttcttgggctgccaaatttcagctaaagcatcaggtctctctctctgctaataaatgtcatccaagaggaactaaaaccagaggcattattactgcattgtttgtcactgggaaccaaaggataaaagagtagcataagctgctgaatgttgccatattaaaggagagaacttggtaacgtgaagtatttctcattgaaatgctttcccttttgtatatagccagtgttaaatccttaaatgcaatacagcctctgattattgagcttcctcttaaaaagatttttttattttatgtagccaacattgcagtactgtatgctcaaacacaaatcttaaagtatcggaactgtttagcttatgaaaataatcgactctgaatatttgttacaagtctgttttatgtgttttgattactagtgagcagaaaataacataccctgtattcaaaattactgaaatggcaatcaaagatgatcatttttatgtgattttagaaatgttaaggcaatactactaattattgtaggtttttttaacgtatcacccaaagcatgtatgtgatctttccccattagtatctttttctcaaatgccataattaactgaaatactattattaaattttcatgagaattctaaaatgaatcctgggaaatgcacgtttggtgatgttgcactttctgtattttacaggaattagtcaatacatgttgaaatgtttaacattttaagattggaggcttaattactgggagtctgtctaatgaagtcctgggactattgtaatggaatatgatttgagttcactgtgctctttttgtttgtttgttttggtcatatatacattcagaacttttattttaaaacaaccacaataacattaataatagaaaattcatctgtaaatattcacagtctagtcactgaaaaatgggaaaacctctaccatgccttattattaccctttgctgtttgaggagccagaaatagaggtgcagttagaggacggtcactttttccaacaaaacccactccatagccatgtggatttttatccaaaggctcaacaaccagagggaatggtgagacctgataactaaaatactgttattggcaagggtttgaaatgtgtaagaacctaggagggaaaggaagattgagcaacataggaaaaggggaagagaggctgagtgtcaccaaggtccaaactccatttataaaaatactgcaaaaccaggagttgatggtagaartgcatatgatccatggcaggagtaaatctctccacctcctctaactctctgaaaactctagagttggagcaagtcttccatttgcttcttatccccttaaaagaatgccttccacttcccaacagcccccatcaagggaccccaagaggccaccatgctcttatctcgcactttctttcctattccccttgcctgaatctggagtggggttgagccctctgccttcaaccttaagatttaggaagttctttccccaactgtctaacttggaaaggtagatgagtctgaattttgaagtaacraatgcaaattccactcagcagaggcaatgttatttatgtacatagggatagtggaatgagttttaatagattctgtccaaaaggggtttgttcctcttatttcctctatgtaggaagttgtgtcttaggcaactttatcagtatcaatggaaaaatgataggcactacaatgaaatggcaggatgccaatatgagatatttcaggaataataagaaatamagtttgtttgtataaaataaactatctcaagaaagttttcaacgacagtgatagtgttcatttgtaagagagagttctagaacttcgatgtccagtgcagtagccactacccatatgtagctgttgagcatttgaaatatggttagtccaaattgagatgtgctctaaaggacaataaaaggttaaatatctcctaattttttgtattgattacatgttgaaatgttaacattggaaatattgggttaaagaaaaatacacaattaaaatgaatcttggccaggcgcagtggctcacgcctctaatcccagcactttgagaggccagggtggkcaggtcacctgaggtcaggagttcgagaccagcctggccagtgtggcaaaaccctgcctactaaaaatacaaaaattagccaggcatggtggtgcgcacctgtagtcccagctacttgggaggctgaggcaggagaattgcttgaacccaggaggaggaggctgcagtgagctgagattgtgccactgcactccagcctgggcgacagagtgagactctgtctcaaaaaaaagaatcatctgtttccaattatttttaaatgtgcttactagaaaagataaaatcacacatggtttacattttatttctattaagacagcaccgttaagaacatagagctttgaggaattgtggtattagaaccaaatctatttaccacagtgagcttacagggagttactcgagatcttaataaaaaattataatctttggcagccttcattatgattttgtgttcttattattccagtacctctagattacatatgggaaaagctaaagagccacagtggtgagatggttgctcactctagcaggtaatttcagtttgaaaggataaaatatatgaatcatagttcacattaaccaaagtacagtgatgaaataacttagactctgaccattccattttttcttaaagattgccctaaatctatagatgctaatacagtatttgccacaggtataaaacttgtagttactgtcattcaattaagattcttatctgtacagatatacaaatcagaaacttttaaaataaattgaactaatggaattttggctccaatatttagtcactacaatggaaatattaaagcaaggaacatgaagtcattgtagggttttaaaatggctactgactgacatgaattcagagtttcaaacagtctaaattctaaaaacttaactttacacgcttttcctcctaaataaccactctaataattcatacattcatatcttcaggtaaagaaaactgaattttaaacaattgaggctgggtgcagtggctcatgcctgtaatcgaatataaggacttgagtataaaatttgaaaactacatggggaaatgtctttatcatgcatctcttgatagtctactgaaaactattaagtaaacctgcggtctgtaaacaaaaaaacccatagtgatacttaccttgtgtaatgtaaacaattttttaagctctttaaagtacatctagatttactggtaatgtatagaagtcaattttatccccaagcatttctacttcctaaaccattagcaagagtctcaaaacaacttcactaaactattggacctccagtgttaacttgccaacataaaaatctgaaaaactttgtaatcactatcaaaaatacaaaagagagaataaattcccaggtaaaaggctttacaaattttggaactattatgcttttgtttactaaacactgatccttttagtaattctgcagtattgcctcagactcccacaaagtttcaaaatagctcatctattagattcctgtaacatttatttgggataaacgtggttttgttgccgttgttcataatagaataaaatatttagctttgatggttcagatgtaatacaaagaaataactaagtttgggcctgagataaatgtggtaaagcaagaatgcagagatgctgtaatgatgagtgagttttatagcattactgaggacctgaaaacttgctgccaaggacactttgaaggttttgttggctggaagaagtgtctctggaatcccactcctagctcttcttgaatatttgaaaagaattagataagggccatggggacccaggtcaccccacctcttcttttcagtttggctacaacattggagtcatcagtgctcctgagacagtcatacaggactttctcagttacactttgaaagagaggtcagaagactctccctctgaggttttgctcatgtccccctggccctygtctgtggccatcttccccaatggtgatatgattggctcctttctgttgcactctttgtcaaccactttggcaggtgcagttcaatgcttatcataatttgttggctattactggttgccttatgggattctgcagacaagctgagttggttgaaatgctgatcctgggccactagattactggcttgtaatgcggactctgcacaagttttgtgcccatgtacattggagagatctcgcctactcccctttggggtacctttagtgctctcaaccagctggacgtcgttggtattctggagatccagatctttggtctggagttcatcttggggtctgaagagctatgcccagtgatactgggctttaccatccttccagctgtcctataaagtgtagcccttccattttgccctggaagtcgtaagtttttgctcattaacagaaaggaagagtactaatgagatccttcagcaattgtaggggactcaggatgtgtcccaggacatctaggagataagagtgctaggatgatacaagaaaagcaagtcactacactggcgctctttagagtacccagctaccaacaacccactgtcatttccatcatgctccagctctctcagtagctctctggaatcaatgttgtcttctattactcaatgagaatcttcaaggatgcaggtgttgagaagccaatctatagattagtgcaggagtggttaatattatcttcttgactgtagtctctctgtttgtggttgaaagggcaggaaggactttacatatgataggtcttgaggcatggcgttttgttctgtcctcatgattgtttctttgttattaaaggatgagtatggtgggatgagctttgtctgtagtggggctatcttggtctttgtggccttctctgaagttggaccagactccgttccctggaatactgtggccacactcttcagtttgcaatagcagtggctggttgctccaactggacctccaactttctagttggattgctcttcctgaacaattattatctagtttaagtgtgttgttgctttagggtcatggcatgcttatgtatttctgttaccatctgaccatggtactatgccaagttctcttaggggacctgaatctttccagtagaccacatttgagagagtatgagtcaactgggcatagttcccaacaacccaaaatacatacgtacttcactgaagcagatctcatgattccattgacttcatttctaaaattggactttgagcagccaatttctaaggattaaaaagaaactttaatgcattgtagacctctgtacacagaaaaatctttgtaacttttgggcttaattttcattcttaaaaaatctggtaactttttcaaatgcaaccactgtcagtttgctgtgaggctaggcaaacaacacaaggtatagaatttcccatcaccaccaccctgaccccgcgagaagattgccttttaattagagacttgtagaactagtgccttttaagttctacactcatcttttccaaagactattagtaaacttgccatgtaatttgacatggcagttccttgctcagctactctaaataaagttggaaattaggtggtctcttagtttgggtaaagtcagtactattgccagtaatatacatggtaattgaaagcccttaaagtggttcagattatttgccaaatattagactctataaaaatttctgaggttttttttcttttacctttgagtgtacatgtgattgctataatgtaaataccagtcccttaaasactgtttctataagcagaatgatgcagcacaaagtggaaaggttttcctcttattccagcagtattcttgccttcaaagagtagtccatcttgccttgatttttaaggttgttttcttggatggaaagcttaactggatagtaatttccatatgttctttataaccactctgtatattataagcaaagttttttcatattgtatctttttctgttgagcactttatgcattttaktctattgcatttgagaatgtagtttagaaattcactgtttaaagccatgtgaaaactgatagaggataatgaaaatgagtgtacattattttgaatttaacttaactgttttgtggtgggtgtgaacaaaacattagaaatatattatctttttgtgataatactctctgacctcacttaaagtgatctgccatgaggtatccatgatcaagtttatgtttattctaatacctaaggaattcagccaactttgtttctatcatcagataatctcagaaaatagtgtgttttatctatattactgcctcttttcaatatttaagagaataattgtcttctggtttctactgagcctagtaataatcactaaagacctaaaaaaggaattccttctgttaagagtatttggatagcccattcacgataatggtggtgtgaaaatcaatcatcccagcttttctgacatatctaaattttgaataattaatttccacttccaaaaaattcaaatgttttctcaaagcagtcactacttatttgcattattcctgcatattcagtgaatgtgaggtcatatttggtattgtattagaagtagtgttggtcactggtcttgcctctttgaacattatttttatttgtaaaatgagggagttggtttgttatgatgggaaatgagtcagttttcagggtcctgagaaaattgcttcattcatggctgtgtttgagataactaaagtaaattttttttcaggtatttggtgtcatgttttggagttaatatttagtgcttatataattttaagttattacgtatatatttgataggtactaggtattggattctcaccaaaccagt

SEQ ID NO: 2048 - DNA, 1019 bp, Homo sapiens
ggcggaagcggagcgagggggggctcgcgtcacgtgggcgttcggcctgggcgggctatttctcagtgcggcggcggcggcggtggcggcggctccggggaccggggccttttgtttggagcggctgcgggggggccccggagcggcgaggccggcggccttccccagcttgctcggtcccggccacccctcgcgggggtggggggccgccccctgggccgggcatctcctcaggcgccgccgccccgccctaggccggccccgcccggcctgaggggaggaaccggccgggcctcgccgcgcggcccagccacctccggagtcgccgcctctgctctcagtgccccggatcggaggccgtccatcgcccctcgggccgacgccatgaagatcaaagatgccaagaaaccctctttcccrtggtttggcatggacattgggggaactctagtaaagctctcgtactttgaacctattgatatcacagcagaggaagagcaagaagaagttgagagtttaaaaagtattcggaaatatttgacttctaacgtggcatatggatccaccggcattcgggatgtacaccttgaactgaaagatttaacactttttggccgaagagggaacttgcactttatcaggtttccaacccaggacctgcctacttttatccaaatgggaagagataaaaacttctcaacattgcagacggtgctatgtgctacaggaggtggtgcttacaagtttgaaaaagattttcgcacaattggaaacctccacctgcacaaactggatgaacttgactgccttgtaaagggcttgctgtatatagactctgtcagtttcaatggacaagccgagtgctattattttgctaatgcctcagaacctgagcgatgccaaaagatgccttttaacctggatgatccctatccactgcttgtagtgaacattggctcaggagtcagtrttttagcagtccattccaaagacaactataaacgagtgactgggacaag

SEQ ID NO: 2049 - DNA, 8399 bp, Homo sapiens
ggcggaagcggagcgagggggggctcgcgtcacgtgggcgttcggcctgggcgggctatttctcagtgcggcggcggcggcggtggcggcggctccggggaccggggccttttgtttggagcggctgcgggggggccccggagcggcgaggccggcggccttccccagcttgctcggtcccggccacccctcgcgggggtggggggccgccccctgggccgggcatctcctcaggcgccgccgccccgccctaggccggccccgcccggcctgaggggaggaaccggccgggcctcgccgcgcggcccagccacctccggagtcgccgcctctgctctcagtgccccggatcggaggccgtccatcgcccctcgggccgacgccatgaagatcaaagatgccaagaaaccctctttcccrtggtttggcatggacattgggggaactctagtaaagctctcgtactttgaacctattgatatcacagcagaggaagagcaagaagaagttgagagtttaaaaagtattcggaaatatttgacttctaacgtggcatatggatccaccggcattcgggatgtacaccttgaactgaaagatttaacactttttggccgaagagggaacttgcactttatcaggtttccaacccaggacctgcctacttttatccaaatgggaagagataaaaacttctcaacattgcagacggtgctatgtgctacaggaggtggtgcttacaagtttgaaaaagattttcgcacaattggaaacctccacctgcacaaactggatgaacttgactgccttgtaaagggcttgctgtatatagactctgtcagtttcaatggacaagccgagtgctattattttgctaatgcctcagaacctgagcgatgccaaaagatgccttttaacctggatgatccctatccactgcttgtagtgaacattggctcaggagtcagtrttttagcagtccattccaaagacaactataaacgagtgactgggacaagccttggagggggtacctttctgggtttatgcagtttattgactggctgtgaaagttttgaagaggctcttgaaatggcatccaaaggtgatagcacacaagctgacaagctggtccgtgatatttatggaggagattatgaaagatttggtttgccaggttgggctgtagcatctagttttgggaatatgatttataaggagaagcgagaatctgttagtaaagaagatctggcaagagctactttagttactatcaccaataacattggttctgtggcacgaatgtgtgctgttaatgagaaaataaacagagttgtctttgttggaaactttttacgtgtcaataccctctcaatgaaacttttggcatatgcactggattactggtcaaaaggtcaactaaaagcattgtttctagaacatgagggttactttggagcagttggtgcacttcttgggctgccaaatttcagctaaagcatcaggtctctctctctgctaataaatgtcatccaagaggaactaaaaccagaggcattattactgcattgtttgtcactgggaaccaaaggataaaagagtagcataagctgctgaatgttgccatattaaaggagagaacttggtaacgtgaagtatttctcattgaaatgctttcccttttgtatatagccagtgttaaatccttaaatgcaatacagcctctgattattgagcttcctcttaaaaagatttttttattttatgtagccaacattgcagtactgtatgctcaaacacaaatcttaaagtatcggaactgtttagcttatgaaaataatcgactctgaatatttgttacaagtctgttttatgtgttttgattactagtgagcagaaaataacataccctgtattcaaaattactgaaatggcaatcaaagatgatcatttttatgtgattttagaaatgttaaggcaatactactaattattgtaggtttttttaacgtatcacccaaagcatgtatgtgatctttccccattagtatctttttctcaaatgccataattaactgaaatactattattaaattttcatgagaattctaaaatgaatcctgggaaatgcacgtttggtgatgttgcactttctgtattttacaggaattagtcaatacatgttgaaatgtttaacattttaagattggaggcttaattactgggagtctgtctaatgaagtcctgggactattgtaatggaatatgatttgagttcactgtgctctttttgtttgtttgttttggtcatatatacattcagaacttttattttaaaacaaccacaataacattaataatagaaaattcatctgtaaatattcacagtctagtcactgaaaaatgggaaaacctctaccatgccttattattaccctttgctgtttgaggagccagaaatagaggtgcagttagaggacggtcactttttccaacaaaacccactccatagccatgtggatttttatccaaaggctcaacaaccagagggaatggtgagacctgataactaaaatactgttattggcaagggtttgaaatgtgtaagaacctaggagggaaaggaagattgagcaacataggaaaaggggaagagaggctgagtgtcaccaaggtccaaactccatttataaaaatactgcaaaaccaggagttgatggtagaartgcatatgatccatggcaggagtaaatctctccacctcctctaactctctgaaaactctagagttggagcaagtcttccatttgcttcttatccccttaaaagaatgccttccacttcccaacagcccccatcaagggaccccaagaggccaccatgctcttatctcgcactttctttcctattccccttgcctgaatctggagtggggttgagccctctgccttcaaccttaagatttaggaagttctttccccaactgtctaacttggaaaggtagatgagtctgaattttgaagtaacraatgcaaattccactcagcagaggcaatgttatttatgtacatagggatagtggaatgagttttaatagattctgtccaaaaggggtttgttcctcttatttcctctatgtaggaagttgtgtcttaggcaactttatcagtatcaatggaaaaatgataggcactacaatgaaatggcaggatgccaatatgagatatttcaggaataataagaaatamagtttgtttgtataaaataaactatctcaagaaagttttcaacgacagtgatagtgttcatttgtaagagagagttctagaacttcgatgtccagtgcagtagccactacccatatgtagctgttgagcatttgaaatatggttagtccaaattgagatgtgctctaaaggacaataaaaggttaaatatctcctaattttttgtattgattacatgttgaaatgttaacattggaaatattgggttaaagaaaaatacacaattaaaatgaatcttggccaggcgcagtggctcacgcctctaatcccagcactttgagaggccagggtggkcaggtcacctgaggtcaggagttcgagaccagcctggccagtgtggcaaaaccctgcctactaaaaatacaaaaattagccaggcatggtggtgcgcacctgtagtcccagctacttgggaggctgaggcaggagaattgcttgaacccaggaggaggaggctgcagtgagctgagattgtgccactgcactccagcctgggcgacagagtgagactctgtctcaaaaaaaagaatcatctgtttccaattatttttaaatgtgcttactagaaaagataaaatcacacatggtttacattttatttctattaagacagcaccgttaagaacatagagctttgaggaattgtggtattagaaccaaatctatttaccacagtgagcttacagggagttactcgagatcttaataaaaaattataatctttggcagccttcattatgattttgtgttcttattattccagtacctctagattacatatgggaaaagctaaagagccacagtggtgagatggttgctcactctagcaggtaatttcagtttgaaaggataaaatatatgaatcatagttcacattaaccaaagtacagtgatgaaataacttagactctgaccattccattttttcttaaagattgccctaaatctatagatgctaatacagtatttgccacaggtataaaacttgtagttactgtcattcaattaagattcttatctgtacagatatacaaatcagaaacttttaaaataaattgaactaatggaattttggctccaatatttagtcactacaatggaaatattaaagcaaggaacatgaagtcattgtagggttttaaaatggctactgactgacatgaattcagagtttcaaacagtctaaattctaaaaacttaactttacacgcttttcctcctaaataaccactctaataattcatacattcatatcttcaggtaaagaaaactgaattttaaacaattgaggctgggtgcagtggctcatgcctgtaatcgaatataaggacttgagtataaaatttgaaaactacatggggaaatgtctttatcatgcatctcttgatagtctactgaaaactattaagtaaacctgcggtctgtaaacaaaaaaacccatagtgatacttaccttgtgtaatgtaaacaattttttaagctctttaaagtacatctagatttactggtaatgtatagaagtcaattttatccccaagcatttctacttcctaaaccattagcaagagtctcaaaacaacttcactaaactattggacctccagtgttaacttgccaacataaaaatctgaaaaactttgtaatcactatcaaaaatacaaaagagagaataaattcccaggtaaaaggctttacaaattttggaactattatgcttttgtttactaaacactgatccttttagtaattctgcagtattgcctcagactcccacaaagtttcaaaatagctcatctattagattcctgtaacatttatttgggataaacgtggttttgttgccgttgttcataatagaataaaatatttagctttgatggttcagatgtaatacaaagaaataactaagtttgggcctgagataaatgtggtaaagcaagaatgcagagatgctgtaatgatgagtgagttttatagcattactgaggacctgaaaacttgctgccaaggacactttgaaggttttgttggctggaagaagtgtctctggaatcccactcctagctcttcttgaatatttgaaaagaattagataagggccatggggacccaggtcaccccacctcttcttttcagtttggctacaacattggagtcatcagtgctcctgagacagtcatacaggactttctcagttacactttgaaagagaggtcagaagactctccctctgaggttttgctcatgtccccctggccctygtctgtggccatcttccccaatggtgatatgattggctcctttctgttgcactctttgtcaaccactttggcaggtgcagttcaatgcttatcataatttgttggctattactggttgccttatgggattctgcagacaagctgagttggttgaaatgctgatcctgggccactagattactggcttgtaatgcggactctgcacaagttttgtgcccatgtacattggagagatctcgcctactcccctttggggtacctttagtgctctcaaccagctggacgtcgttggtattctggagatccagatctttggtctggagttcatcttggggtctgaagagctatgcccagtgatactgggctttaccatccttccagctgtcctataaagtgtagcccttccattttgccctggaagtcgtaagtttttgctcattaacagaaaggaagagtactaatgagatccttcagcaattgtaggggactcaggatgtgtcccaggacatctaggagataagagtgctaggatgatacaagaaaagcaagtcactacactggcgctctttagagtacccagctaccaacaacccactgtcatttccatcatgctccagctctctcagtagctctctggaatcaatgttgtcttctattactcaatgagaatcttcaaggatgcaggtgttgagaagccaatctatagattagtgcaggagtggttaatattatcttcttgactgtagtctctctgtttgtggttgaaagggcaggaaggactttacatatgataggtcttgaggcatggcgttttgttctgtcctcatgattgtttctttgttattaaaggatgagtatggtgggatgagctttgtctgtagtggggctatcttggtctttgtggccttctctgaagttggaccagactccgttccctggaatactgtggccacactcttcagtttgcaatagcagtggctggttgctccaactggacctccaactttctagttggattgctcttcctgaacaattattatctagtttaagtgtgttgttgctttagggtcatggcatgcttatgtatttctgttaccatctgaccatggtactatgccaagttctcttaggggacctgaatctttccagtagaccacatttgagagagtatgagtcaactgggcatagttcccaacaacccaaaatacatacgtacttcactgaagcagatctcatgattccattgacttcatttctaaaattggactttgagcagccaatttctaaggattaaaaagaaactttaatgcattgtagacctctgtacacagaaaaatctttgtaacttttgggcttaattttcattcttaaaaaatctggtaactttttcaaatgcaaccactgtcagtttgctgtgaggctaggcaaacaacacaaggtatagaatttcccatcaccaccaccctgaccccgcgagaagattgccttttaattagagacttgtagaactagtgccttttaagttctacactcatcttttccaaagactattagtaaacttgccatgtaatttgacatggcagttccttgctcagctactctaaataaagttggaaattaggtggtctcttagtttgggtaaagtcagtactattgccagtaatatacatggtaattgaaagcccttaaagtggttcagattatttgccaaatattagactctataaaaatttctgaggttttttttcttttacctttgagtgtacatgtgattgctataatgtaaataccagtcccttaaasactgtttctataagcagaatgatgcagcacaaagtggaaaggttttcctcttattccagcagtattcttgccttcaaagagtagtccatcttgccttgatttttaaggttgttttcttggatggaaagcttaactggatagtaatttccatatgttctttataaccactctgtatattataagcaaagttttttcatattgtatctttttctgttgagcactttatgcattttaktctattgcatttgagaatgtagtttagaaattcactgtttaaagccatgtgaaaactgatagaggataatgaaaatgagtgtacattattttgaatttaacttaactgttttgtggtgggtgtgaacaaaacattagaaatatattatctttttgtgataatactctctgacctcacttaaagtgatctgccatgaggtatccatgatcaagtttatgtttattctaatacctaaggaattcagccaactttgtttctatcatcagataatctcagaaaatagtgtgttttatctatattactgcctcttttcaatatttaagagaataattgtcttctggtttctactgagcctagtaataatcactaaagacctaaaaaaggaattccttctgttaagagtatttggatagcccattcacgataatggtggtgtgaaaatcaatcatcccagcttttctgacatatctaaattttgaataattaatttccacttccaaaaaattcaaatgttttctcaaagcagtcactacttatttgcattattcctgcatattcagtgaatgtgaggtcatatttggtattgtattagaagtagtgttggtcactggtcttgcctctttgaacattatttttatttgtaaaatgagggagttggtttgttatgatgggaaatgagtcagttttcagggtcctgagaaaattgcttcattcatggctgtgtttgagataactaaagtaaattttttttcaggtatttggtgtcatgttttggagttaatatttagtgcttatataattttaagttattac

SEQ ID NO: 2050 - DNA, 8222 bp, Homo sapiens
ggcggaagcggagcgagggggggctcgcgtcacgtgggcgttcggcctgggcgggctatttctcagtgcggcggcggcggcggtggcggcggctccggggaccggggccttttgtttggagcggctgcgggggggccccggagcggcgaggccggcggccttccccagcttgctcggtcccggccacccctcgcgggggtggggggccgccccctgggccgggcatctcctcaggcgccgccgccccgccctaggccggccccgcccggcctgaggggaggaaccggccgggcctcgccgcgcggcccagccacctccggagtcgccgcctctgctctcagtgccccggatcggaggccgtccatcgcccctcgggccgacgccatgaagatcaaagatgccaagaaaccctctttcccrtggtttggcatggacattgggggaactctagtaaagctctcgtactttgaacctattgatatcacagcagaggaagagcaagaagaagttgagagtttaaaaagtattcggaaatatttgacttctaacgtggcatatggatccaccggcattcgggatgtacaccttgaactgaaagatttaacactttttggccgaagagggaacttgcactttatcaggtttccaacccaggacctgcctacttttatccaaatgggaagagataaaaacttctcaacattgcagacggtgctatgtgctacaggaggtggtgcttacaagtttgaaaaagattttcgcacaattggaaacctccacctgcacaaactggatgaacttgactgccttgtaaagggcttgctgtatatagactctgtcagtttcaatggacaagccgagtgctattattttgctaatgcctcagaacctgagcgatgccaaaagatgccttttaacctggatgatccctatccactgcttgtagtgaacattggctcaggagtcagtrttttagcagtccattccaaagacaactataaacgagtgactgggacaagttttgggaatatgatttataaggagaagcgagaatctgttagtaaagaagatctggcaagagctactttagttactatcaccaataacattggttctgtggcacgaatgtgtgctgttaatgagaaaataaacagagttgtctttgttggaaactttttacgtgtcaataccctctcaatgaaacttttggcatatgcactggattactggtcaaaaggtcaactaaaagcattgtttctagaacatgagggttactttggagcagttggtgcacttcttgggctgccaaatttcagctaaagcatcaggtctctctctctgctaataaatgtcatccaagaggaactaaaaccagaggcattattactgcattgtttgtcactgggaaccaaaggataaaagagtagcataagctgctgaatgttgccatattaaaggagagaacttggtaacgtgaagtatttctcattgaaatgctttcccttttgtatatagccagtgttaaatccttaaatgcaatacagcctctgattattgagcttcctcttaaaaagatttttttattttatgtagccaacattgcagtactgtatgctcaaacacaaatcttaaagtatcggaactgtttagcttatgaaaataatcgactctgaatatttgttacaagtctgttttatgtgttttgattactagtgagcagaaaataacataccctgtattcaaaattactgaaatggcaatcaaagatgatcatttttatgtgattttagaaatgttaaggcaatactactaattattgtaggtttttttaacgtatcacccaaagcatgtatgtgatctttccccattagtatctttttctcaaatgccataattaactgaaatactattattaaattttcatgagaattctaaaatgaatcctgggaaatgcacgtttggtgatgttgcactttctgtattttacaggaattagtcaatacatgttgaaatgtttaacattttaagattggaggcttaattactgggagtctgtctaatgaagtcctgggactattgtaatggaatatgatttgagttcactgtgctctttttgtttgtttgttttggtcatatatacattcagaacttttattttaaaacaaccacaataacattaataatagaaaattcatctgtaaatattcacagtctagtcactgaaaaatgggaaaacctctaccatgccttattattaccctttgctgtttgaggagccagaaatagaggtgcagttagaggacggtcactttttccaacaaaacccactccatagccatgtggatttttatccaaaggctcaacaaccagagggaatggtgagacctgataactaaaatactgttattggcaagggtttgaaatgtgtaagaacctaggagggaaaggaagattgagcaacataggaaaaggggaagagaggctgagtgtcaccaaggtccaaactccatttataaaaatactgcaaaaccaggagttgatggtagaartgcatatgatccatggcaggagtaaatctctccacctcctctaactctctgaaaactctagagttggagcaagtcttccatttgcttcttatccccttaaaagaatgccttccacttcccaacagcccccatcaagggaccccaagaggccaccatgctcttatctcgcactttctttcctattccccttgcctgaatctggagtggggttgagccctctgccttcaaccttaagatttaggaagttctttccccaactgtctaacttggaaaggtagatgagtctgaattttgaagtaacraatgcaaattccactcagcagaggcaatgttatttatgtacatagggatagtggaatgagttttaatagattctgtccaaaaggggtttgttcctcttatttcctctatgtaggaagttgtgtcttaggcaactttatcagtatcaatggaaaaatgataggcactacaatgaaatggcaggatgccaatatgagatatttcaggaataataagaaatamagtttgtttgtataaaataaactatctcaagaaagttttcaacgacagtgatagtgttcatttgtaagagagagttctagaacttcgatgtccagtgcagtagccactacccatatgtagctgttgagcatttgaaatatggttagtccaaattgagatgtgctctaaaggacaataaaaggttaaatatctcctaattttttgtattgattacatgttgaaatgttaacattggaaatattgggttaaagaaaaatacacaattaaaatgaatcttggccaggcgcagtggctcacgcctctaatcccagcactttgagaggccagggtggkcaggtcacctgaggtcaggagttcgagaccagcctggccagtgtggcaaaaccctgcctactaaaaatacaaaaattagccaggcatggtggtgcgcacctgtagtcccagctacttgggaggctgaggcaggagaattgcttgaacccaggaggaggaggctgcagtgagctgagattgtgccactgcactccagcctgggcgacagagtgagactctgtctcaaaaaaaagaatcatctgtttccaattatttttaaatgtgcttactagaaaagataaaatcacacatggtttacattttatttctattaagacagcaccgttaagaacatagagctttgaggaattgtggtattagaaccaaatctatttaccacagtgagcttacagggagttactcgagatcttaataaaaaattataatctttggcagccttcattatgattttgtgttcttattattccagtacctctagattacatatgggaaaagctaaagagccacagtggtgagatggttgctcactctagcaggtaatttcagtttgaaaggataaaatatatgaatcatagttcacattaaccaaagtacagtgatgaaataacttagactctgaccattccattttttcttaaagattgccctaaatctatagatgctaatacagtatttgccacaggtataaaacttgtagttactgtcattcaattaagattcttatctgtacagatatacaaatcagaaacttttaaaataaattgaactaatggaattttggctccaatatttagtcactacaatggaaatattaaagcaaggaacatgaagtcattgtagggttttaaaatggctactgactgacatgaattcagagtttcaaacagtctaaattctaaaaacttaactttacacgcttttcctcctaaataaccactctaataattcatacattcatatcttcaggtaaagaaaactgaattttaaacaattgaggctgggtgcagtggctcatgcctgtaatcgaatataaggacttgagtataaaatttgaaaactacatggggaaatgtctttatcatgcatctcttgatagtctactgaaaactattaagtaaacctgcggtctgtaaacaaaaaaacccatagtgatacttaccttgtgtaatgtaaacaattttttaagctctttaaagtacatctagatttactggtaatgtatagaagtcaattttatccccaagcatttctacttcctaaaccattagcaagagtctcaaaacaacttcactaaactattggacctccagtgttaacttgccaacataaaaatctgaaaaactttgtaatcactatcaaaaatacaaaagagagaataaattcccaggtaaaaggctttacaaattttggaactattatgcttttgtttactaaacactgatccttttagtaattctgcagtattgcctcagactcccacaaagtttcaaaatagctcatctattagattcctgtaacatttatttgggataaacgtggttttgttgccgttgttcataatagaataaaatatttagctttgatggttcagatgtaatacaaagaaataactaagtttgggcctgagataaatgtggtaaagcaagaatgcagagatgctgtaatgatgagtgagttttatagcattactgaggacctgaaaacttgctgccaaggacactttgaaggttttgttggctggaagaagtgtctctggaatcccactcctagctcttcttgaatatttgaaaagaattagataagggccatggggacccaggtcaccccacctcttcttttcagtttggctacaacattggagtcatcagtgctcctgagacagtcatacaggactttctcagttacactttgaaagagaggtcagaagactctccctctgaggttttgctcatgtccccctggccctygtctgtggccatcttccccaatggtgatatgattggctcctttctgttgcactctttgtcaaccactttggcaggtgcagttcaatgcttatcataatttgttggctattactggttgccttatgggattctgcagacaagctgagttggttgaaatgctgatcctgggccactagattactggcttgtaatgcggactctgcacaagttttgtgcccatgtacattggagagatctcgcctactcccctttggggtacctttagtgctctcaaccagctggacgtcgttggtattctggagatccagatctttggtctggagttcatcttggggtctgaagagctatgcccagtgatactgggctttaccatccttccagctgtcctataaagtgtagcccttccattttgccctggaagtcgtaagtttttgctcattaacagaaaggaagagtactaatgagatccttcagcaattgtaggggactcaggatgtgtcccaggacatctaggagataagagtgctaggatgatacaagaaaagcaagtcactacactggcgctctttagagtacccagctaccaacaacccactgtcatttccatcatgctccagctctctcagtagctctctggaatcaatgttgtcttctattactcaatgagaatcttcaaggatgcaggtgttgagaagccaatctatagattagtgcaggagtggttaatattatcttcttgactgtagtctctctgtttgtggttgaaagggcaggaaggactttacatatgataggtcttgaggcatggcgttttgttctgtcctcatgattgtttctttgttattaaaggatgagtatggtgggatgagctttgtctgtagtggggctatcttggtctttgtggccttctctgaagttggaccagactccgttccctggaatactgtggccacactcttcagtttgcaatagcagtggctggttgctccaactggacctccaactttctagttggattgctcttcctgaacaattattatctagtttaagtgtgttgttgctttagggtcatggcatgcttatgtatttctgttaccatctgaccatggtactatgccaagttctcttaggggacctgaatctttccagtagaccacatttgagagagtatgagtcaactgggcatagttcccaacaacccaaaatacatacgtacttcactgaagcagatctcatgattccattgacttcatttctaaaattggactttgagcagccaatttctaaggattaaaaagaaactttaatgcattgtagacctctgtacacagaaaaatctttgtaacttttgggcttaattttcattcttaaaaaatctggtaactttttcaaatgcaaccactgtcagtttgctgtgaggctaggcaaacaacacaaggtatagaatttcccatcaccaccaccctgaccccgcgagaagattgccttttaattagagacttgtagaactagtgccttttaagttctacactcatcttttccaaagactattagtaaacttgccatgtaatttgacatggcagttccttgctcagctactctaaataaagttggaaattaggtggtctcttagtttgggtaaagtcagtactattgccagtaatatacatggtaattgaaagcccttaaagtggttcagattatttgccaaatattagactctataaaaatttctgaggttttttttcttttacctttgagtgtacatgtgattgctataatgtaaataccagtcccttaaasactgtttctataagcagaatgatgcagcacaaagtggaaaggttttcctcttattccagcagtattcttgccttcaaagagtagtccatcttgccttgatttttaaggttgttttcttggatggaaagcttaactggatagtaatttccatatgttctttataaccactctgtatattataagcaaagttttttcatattgtatctttttctgttgagcactttatgcattttaktctattgcatttgagaatgtagtttagaaattcactgtttaaagccatgtgaaaactgatagaggataatgaaaatgagtgtacattattttgaatttaacttaactgttttgtggtgggtgtgaacaaaacattagaaatatattatctttttgtgataatactctctgacctcacttaaagtgatctgccatgaggtatccatgatcaagtttatgtttattctaatacctaaggaattcagccaactttgtttctatcatcagataatctcagaaaatagtgtgttttatctatattactgcctcttttcaatatttaagagaataattgtcttctggtttctactgagcctagtaataatcactaaagacctaaaaaaggaattccttctgttaagagtatttggatagcccattcacgataatggtggtgtgaaaatcaatcatcccagcttttctgacatatctaaattttgaataattaatttccacttccaaaaaattcaaatgttttctcaaagcagtcactacttatttgcattattcctgcatattcagtgaatgtgaggtcatatttggtattgtattagaagtagtgttggtcactggtcttgcctctttgaacattatttttatttgtaaaatgagggagttggtttgttatgatgggaaatgagtcagttttcagggtcctgagaaaattgcttcattcatggctgtgtttgagataactaaagtaaattttttttcaggtatttggtgtcatgttttggagttaatatttagtgcttatataattttaagttattac

SEQ ID NO: 2051 - DNA, 1207 bp, Homo sapiens
gtgggtgtcagagagagaagactgggctttggagagacaagacagttggcttgaaaatactgctgaaaactgtggggcttgtggatttatttttctctcctgttccattcctaacggaggaaaagaggaaaaggctgttcctgacgtggaaagcactattcacagtagtcgagatatgaactcaaccttcaagatatgaactcaaccttcgtgcccatcagtgaataaatggatgaagaggayaaagggtcttcaaaaagttcataggaaatgtrtagtacttaaaaggaaactatgcatggatttcaacttttttacaccaaaataaactcatactaacttgtcataacatacctgaacaggaagtagtttgaggtactaagaaggataagacatcagtttcaaacagccccaatcagagcaacatgaattctgctaaaattgaagcaaggacaaacatcaaatttatggtgaagcttgggtggaagaatggtgaaattatttatgctttataaaaagtttatggggacaatgccctaaaggaattggcagtttataaatagctaactcattttaagaaggagtgaaataattttgaagatgaagcccgcagcagcagaccatccacatcaatrtgtgaaaaaaattaatctcgttcatgcctatgattaacagcagaaataatagccaacaccatagacatctcagtttgatcagcttacacaattctgactgaaaaattaaagtagagcaaattttccactcaatgggtgccaaaatgattgcacccagatcaggtgcagacaagagtagagtttttaatggagattttaaacaagtgtgatcaagatcctgaagtatttctttgaagaattgtaaaagaaatgaaacatagctttaccagtatgatcctgaagacaaacacaatcaaagcaatggctaccaagaggtggaagtgggagcctgtcaaagcaaaagcagactggtcaagagcaaagaccatagcaacggtttcttgggatgctcaaggcatttcacttgttggctttcyggatggccaaagaatgataatatttgtttactatgagagtgttttgaaaaaattacccaaagctttagcatgaaaatgcccaagaagcttcaccagacagtccttctcccctaaaactatgctcctgctcatttctctcagctaaatasggttatt

SEQ ID NO: 2052 - DNA, 824 bp, Homo sapiens
ttagaatggcaatcattaaaaagtcaggaaacaacaggtgctggagaggatgtggagaaataggaacacttttacactgttggtgggaccgtaaactagttcaaccactgtggaagtcagtgtggcgattcctcagggatctagaactagaaataccatttgacccagccatcccattactgggtatatacccaaaggactataaatcttgctgctataaagacacatgcacacgtatgtttattgcggcactmttcacaatagcaaagacttggaaccaacccaaatgtccarcaatgatagactggattaagaaaatgtggcayatatacaccatggaatactatgcagccataaaaaatgatgagttcatgtcctttgtagggacatggatgaaattgkaaatcatcattctcagtaaactatcrcaagaacaaaaaaccaarcactgcatattctcactcataggtgggaattgaayaatgagawcacatgatcattgtttttttaaaaaaatgctcttacataatattgtcagagaaatgtagcagtgaatttaaaacaaacttagaatctgtgaagactcacctttttgagaagactaccttggctgtgatcacgttctcctcataaccttcatgctaatcagacatggatgtttcctaaaagatacataaccctgagtcagttatatcctatttgatgtaagtaagaattacagattaattccagaaaaatccaagaggagtaaagttctttccatgaagctaattttgctaaaagaaattatttttatgtcctccactcttttatattattatcaa

SEQ ID NO: 2053 - DNA, 5287 bp, Homo sapiens
aaagtggaagaggaaagagttaccccagcgagaaccgggaaccgggctgcagactctccggcccgggggagggatgagtttcactctggttgcccaggctggagtgcaatggcgcgatctcggctcaccgcaacctctgcctcccggattcaagcgattctcctgcttcagcctcccgagtagctgggattacagatatgctctaacttatttatccccaaaggacgtgcatttgggtcattttcaatcttctgctatggtaagtaacacttcagcaaataaatctttgctcatcactgtctctcttatataaactcctgggcatggaatttcaggtcaaagaatgtgcttgctctgaaatgtaatggattttgccaaattgctattcacagaagatatacccacttacactgccccaaagcctacatttttctcactttagtttggtcacattgtcctggttggatactttctgtctcccgtatctcatagttggagatatcctaaccatggcctcctggggacactgtgcagtttcctttctgctcatcctgctgcctccccccctaatccaaacaacccctcatatctgtgtatgtcagagggctgtccacacagcatctcatttgatcctatcttgtggggtaggaaggaaaaccgtatcagcacagtctggggtatgaggaccagaggtgaaacaactggcccagggtcctaggatggaaggagagcctccttgctgagcactttcccaccatacaccattgtccaaagatggcctcctaagtctgggaagggtagtaccaaggaggtatatcagttggaagtgatgccactaacacactaacacttactgaaaacactgatgtgggccagagactggggatatagaggtggacaaaacctcctccctgcctccagggagcatgcagagatgggagtgcaatgtggggtagttcctaggcagcatggggagccatctatataagctgagattggaagggtgaatgagggttggccagactaaggaatggcatttcaggagtgtacagtgtgggcctgcagagaggggctggcccgtaagcctggttcttacatgcagtcttgtctggctgggtaaggtagacatctacggtttgctctgccccacatccattctcccttctgggcacagcacctggactttcctttgggtaactagcccatccccaccttcctgcagtcacagggcatgtgactgcaggtgaccaattgcagtattgttcagggatgggcatggggccagcaggccaatgagactcaacctggggacttgtacaagatgatgggaaaaacactctccttccatgggctgctgaggatctccatgagaaaaagcccacctgagagggaagccaactcagatgaaatagggactaggcattgagagagacctagcccgagtgagatgactgagtccctgcatccagcccggccttagggtctaccctggaatttcagttatgtgagcctatcaattctggtttttgcttaaatcagattgactaaggttttggttatctgtaagcaagaatccagactaatgcaatgggataagaggaaaaggggaaaggagagagcagtagggccagctcatgaacctagctggagctaggctatggagttaaagacttgtccaaccactagaactaggaagattctgacttccacgtgagaactttgctctgctgagagagacagacagagaaggagggagggaaagggaaagtcaatgacttttctagaaatttcagagctgttgggacactttttggggattttctcatcaggatagagaatccggtctggaatcagccctcagccctgaaggtacgtgttgattgatcttaatttctgaaaatacactcatgcctttcagaccaggcttctctctgtcaccaagaaaagggatcttagcagagatgaatcagagggaattcggtccttcgtaaatgccagctctggctgaaagagaacacctgcattccagcagggcgctgccagggatgaatgggctcacctgttcccctcagccctgcaggcagtctttccacagggtcctgggagacagtgcactggcagatgggctgttgctggctccagaaactctccttttccaagccaggagagagaaagcccagggagaaaagtctcccttccggacctcaggagcctcctcattacactgtctcatttcctctggagagtgacggacataattggatcaaatggaaatgtaagccagcctccttccccctcccggatgagatacttccaatatggcttcattaccaagtctattgtaaataactgtggagaaaaatgccatttgttctgccataattgcctgatgagcatcagtagatgggtctttgaaacacatagaatgaaatcattttgggctggtttagaaattcctttgtgcaaatctttctccattcactgttctccatggtgggggttctgaagagggtcttctagagcaaggagccagttaggagcttggaggctgattctggccagggacacacttacttggagtattcagccaatatttgttaactgctgtcaactaaagaaaaaaaacgaagcttttaaagaattaaagttagttttatttagaagtcttcttgaggattatagaccaaggcctgtagcctgggaggaggctkttagaaaggttctctcagactcctccaacgtagtattttagtttatacataggtggtgaagatttagtatgtgaaaaattacatcaaggtttgggtgttagagtacatctggttatagattacagaaacatagtcactattcttgtcgggtgttattttatgagtagagaaaggcgaggactagggtcatttatctttgatggaattagtgactcaggcgagagacatggggggccatgcgttctatcctgttttgcctttaaaacatttttccagagagctgcacagtgtcccggagtcaggggctttgtgaaattctcccagcaaagggaaatgggcaaacacggcctcttacatttgccactttgtttcacgaagtttttggtcataaattgtttggttgtgttggtaakaattaatrttgattgccatctgtagttagaagggctcttgtttaggaaggttggtaatttttagttgtagttgtatcagacctagtgtgttttttagccttttcttggaaaatatgttttggactgagtttagttctcattagtaggatgcagggggtttttgatggtgtcttttttttgtatttaatacaatattttaataggattattatgaggatattatagattctatacagtaatacagacttcatagtaataaagtctgttgtagactggaaaaaatatgatatttaataaaattggaatatatatttgtatacttttaattgtattattttttatacttatatttrttggagtcttttttatgaaaagcaatgttggactagaatttattgtaaatgcctttatagaagaatttagaataataattctaaataagtgagaaaaatagaataatcccagttaaaatttgataaaggtttttgatttttttttttttttgacatggagtctcgctttgtcgcccagattagagtgcagtggcacgatctcggctcactgcaacctctgcctcccagcttcaagcaattctcctgtctccacctcctgagtagctggaattacaggcatgtaccaccacgcctggctaatttttgtatttttagtaaagatggggtttcacaatgttggccaggctggtcttgaatttagttattttattatatgtagtattttaacatgataaccagaattatggctgacagtgttatatcagaactactagacttttatacattttacatatttttagaatatttataagatatttatataaatataattttagaaaagatttaatmcaataataaaaattatgactcataaaaattggtctcatagtgtcttttctgtgttggaccaggctttaggtacttgggatatggcggtgagtgaaacacaaaaagatccctcccccackgactactctttgctgataagcttggaagcagcctcagaatgcatatcaacacccacctggggcagcccctaccaatggatcagagttggcctggcarggagtagaaacctatttgctgtgtctctctctctgtctctctctctccctttccccctccctctctccctccccactccttctctctctctctttctttccttctttttttttttttttttaatgagatggggtcgtgttgtgttgtccaggctggtctcaaactcctaggctcaagagatcctcccatctcggccaccattcctggccctatttgccacttccgacttagattgttattaattccattaactaagaaattgcagaatatccaagtaaactaggaataataccagaagaggcaaaaaaaaaaaaaaaatcccagaaagggtgaggcagaggtccataaaacatggcaggttttcagaacagtctgggtatgatttaaacaacaacaaaaatagcaggtcagagcgtgggctttggagtcaagcagacctgcgtttgggccccagttctgcttcttccggctgtgcgaggccttggtctgagctttgcttgccttcctggtgaaacgggtataataatgatacaactctcctaaggttgttgtgaggattaaacaagtcagcatgtatgaagggcttggcacactgtcctgttagctatgatcaggaccgaacttcacttgttacacgctggagtggatgcaccattgtttatagctggtatctgttctgactggatgtgcttgtgttatcacagttgttacatattttgaacattacccttatgtgaatattaattttatttagggggctggtctccttatgggagacaacttcagaactctggtggttaaaatagatataaactggccaggcacagtggctcacacctgtaatcccagcactttgaaaggccgaggtgggtggatcacctgaggtcagggggtcaagaccagcctggtcaacatgtcgaaaccctatctctacattagctgggcgtggtggtgggcgcctgtagtcccagctactcaggaggctgaggcaggagaatcacttgaacccaggaggtggaggctgcagtgagccaagatcgcactactgcactccagcctgggcagcagagtgaaactccatctc

SEQ ID NO: 2054 - DNA, 546 bp, Homo sapiens
cagctagttgaggtaaagagagggcgtttaactgtcaagggaaccgcagaggagactgtagaaatccggaaagtctctcggatctttgagcgattttgggatgcagagatgtctgtgtgctatgaagattgcaaacggggtccagatgcattctgttttgagaatgtcaatggatacactagctgctgctttggatttcaccggttggtggtagttgacccgctgtttggaatgcagccaatttaagtgaagaaatatccatacacgtggctctgttacaatggtgaaatctacaaccataagaaggtgcaacactattttgaatttgaataccagaccaaagtggatggtgagataatccttcrtctttatgacaaaggaggaattgagcaaacaatttgtgtgttggatggtgtgtttgcatttgttttactggattctgccaataagaaagtgttcctgggcagagatacatraggagtcagaccttcgtttaaagcagtgacagaagatggatttttggctgtrtgttcagaagctaaaggt

SEQ ID NO: 2055 - DNA, 300 bp, Homo sapiens
atggtggagagtgtcagaattggggagtatcctaatcaaaccttcttactctgcatgcagtggcagacagtccctttgctgttcctttgggacatgcagactaataaagcgccaccatcattttatctctcagtgcaacactattttgaatttgaataccagaccaaagtggatggtgagataatccttcrtctttatgacaaaggaggaattgagcaaacaatttgtgtgttggatggtgtgtttgcatttgttttactggattctgccaataagaaagtgttcctgggcagagataca

SEQ ID NO: 2056 - DNA, 291 bp, Homo sapiens
gtgaatgcacaaggagtctataacgttttggttttgctattgcttcctaaggtgcaacactattttgaatttgaataccagaccaaagtggatggtgagataatccttcrtctttatgacaaaggaggaattgagcaaacaatttgtgtgttggatggtgtgtttgcatttgttttactggattctgccaataagaaagtgttcctgggcagagatacatraggagtcagaccttcgtttaaagcagtgacagaagatggatttttggctgtrtgttcagaagctaaaggt

SEQ ID NO: 2057 - DNA, 1707 bp, Homo sapiens
attccgagggtgagcccgctaatgcacaaagctgggactaacttgagggacagacaccagacggcagaggccgggctggcaccgtgcctgctccccattggtagtctcctggtgctcagtcctctccagcaggagccttccaaccccgcatttgtgactcttcctcatcctactgaagtaacaaccccgtcaccgcagatccctcctgaggcacacgctgctgacagccagrcgctggcccttctgctgggagtgrtgcccatgcagcggaacggtcacaagcaggccaggacgatctgccagaagcccgcctcaccgcaggcctgtgacggcgtcaggctgagtctgcaccgagcccagccccactaccttctccaaagctggtctgtctcagagccaaggacaaagcctcaccccacggttcacaagcagcaccccttgacaggaaagttggccgggtgtggtggctcatgccttgaacagtcctttggaggctgcagtgggaggactgcttgaggtcagcagttcgtgaccagcctgggcaacatggtgagacggtctccacacaaaaaactttagaatattaaaaataaataaaaacagaggagaaagttgcacagcaaacctcacttcctgtgcacagatggacaggagtgcttctggccacaacaacaaaaggttaattccaacccggagggttccaagccgtaaccaacacaagagagacgcgcccagaccaacagcctcaagcaaaatggcaccttcgaccctgggctctgcccggtgcccgagagcacctgccagcctgtttgattcctgatatccacagacatgcaccaaacacaggtctgagtggccaggaccacagcacaagtgggtgcccctcacggcagagacctccagtcgagactcacctgccttctgctccaagggcccggcaccctgagatcctgatgccagggtaagctggggggctgctcatggtcgaggacacgggtgggtgctcctgaacagcagagtggccccaggggtggatgcgtgggggctcaggcgcaggcagccgtgggggacatcaccacctcagacccacagcagtcccctagggcagctcaggagctccggccacctgaactggcccttccatgggcaggaccactcctgtgggcagcacagtgggtgcagagccgggkggctggggtgagacccttggctggcagaagctgcctgccaaatgtcagcagaggcacagcagctaggaggcccttgragycyccaccgtactgagggaacagcactcactgccgtcctcagaggccaaggccacaggcataagaggatcacccagctgggggcttgtgtatgcctgatattaatagcgctggctttgcctggtgtggccctgacaatcctcgggccagccctcggtgtgaactgccccctcctgtgtgtgggctggcacattcggccagcctaggaccgcaggcctgcggaggaccactgtgcgccgtgtgcctgcacccctcctggatcccctggaaaaagctacagtaccccggcctgcctggggctacagagtgaaccccccgcagcaggacaaggatatctgaggcgcctcttggccaggtgtcctgaacgtcagtgctgagctgggcaccccatccctagccccagagtgcttccgacaggcataaacaaatctgaaactcc

SEQ ID NO: 2058 - DNA, 301 bp, Homo sapiens
aggtgcttgtgacccaccttccggaaggaagcggttaactatggcgacctccacggagcagtgggttctggtggggatggtacaggygctttaggaggctcctgcttaccatcttattttggaagggattctgttactctggataatcagacttcttttctctaagacttacaaattacaggaacgatcygatcttacagtcaaggaaaaagaagaactgattgaagagtggcaaccacaacctcttgttcctcctgtcccaaaagaccatcctgctgtcaactayaacatcgtttcagga

SEQ ID NO: 2059 - DNA, 296 bp, Homo sapiens
ttaacccctagccttccsgaaggaagyggctaactatggcgaccgccatggagcagtgggttctggtggagatggtacagttgctttacgaggctcctgcttaccrtcttattttggaagggattctgatactmtggataatcagacttcttttctctaagactyacaaattacaagaacgatctgatcttacagtcaargaaaaagaagaactgattgaagagwggcaaccagaacctcttgttcctcctgtcccaaaagaccatcctgctctcaaccacaacatcgtttcagga

SEQ ID NO: 2060 - DNA, 232 bp, Homo sapiens
gacagacaggaggcgaccgcatgagaccatggctgagacacctagtcctccaggcactgaggaactccagggcattctgtgggtcttgtgggcagccagcacctctacctgttcctcagaagatcgtggccacctgggaagccatcagcctgggaaggcagccggtgcctgaatacttcaactttgcccatgatgtgctggatgtgtggagtcggctggaagagatgaagmc

SEQ ID NO: 2061 - DNA, 2281 bp, Homo sapiens
gacagacaggaggcgaccgcatgagaccatggctgagacacctagtcctccaggcactgaggaactccagggcattctgtgggtcttgtgggcagccagcacctctacctgttcctcagaagatcgtggccacctgggaagccatcagcctgggaaggcagccggtgcctgaatacttcaactttgcccatgatgtgctggatgtgtggagtcggctggaagagcagggactgtgatgattccaggtgtcactcagctgacgcagarggacctcaagtaccggctgcaggcgtccagggccaagtccattatcaccagtgactccctagctccaagggtggacrccatcagcgccgaatgcccctccctcaagaccaagctgctggtgtcagacagcagtcggccaggctggttgaacttcagggaactcctccgggaggcatctacagagcacaactgcgtgaggacaaagtgtcaagacccactggcyatctacttyaccagcggaaccaccggggaccccgagatggtcgagcactcccagagcagctacggactgggttttgtggccagcggaagatggtggttggccttgaccgaatcggacgtcttctggaacacgacagacactggctgggtgaaggcagcctggactstcttctytgcctggcctaatggatcttgcatttttgtgcatgagctgtcccgagttgatgccaaatttatcctgaatggttgtcatctgtgccaatccaaaaggcatgaaaatcaagtctggatccatggggaaggygtccccaccctacaatgtgcagattgtggatgatgagggcaatgtcctgcctcctggagaagaggggaatgttgccgtcgtatcagaaccacccggcccttctgtttcttcaattgctatttggaggtggtaaaggcatttatagtccttactccagcctactcctctcatgacccagaggcactaacgcgggaactccaggagcatgtgaaaagggtgactgctccatacaaataccccaggaaggtggcctttgtttcagaactgccaaagacggtttctggaaagatccaaaggagtaaattgcgaagtcaggagtgggggaaatgaggtgcaaccccaggaaggccccgtagacctcctaagagtccacgagaaactaatggatcactggtcagcccccatggggagcatcatctcttcaaccctaaagatgtcaaaggtgtgcagcttccaaatggcatccccaggatcactgggcaatgccggaaagagcaaaagaatatcactggccctgaccacatagatgctgcgcckcctagcaaatgcttggtggttcgacttctccctctgtctgggggcaggctcagcatctgcccactggtctcactaagagctttcagatttccctccacaggacaggttaccatagacttggggcacttgtgggtactcattctctgccagtgggaatgtaaagctttcatcctttgtatgcaaccatttggtaaaaatatgcaggaacgtaaaataaaatatcctttagctcagaaattctacctttgggagtcaccacaaaagaaaaaatcaaaatgcagaaaatgtgtggtgcactaagatgatcacacagcattaaaactaaaaaaaaaaaaaattaacaattaacatccaaacaacaaggaaatgattaacaaaattgtagtagattaactcaataacatatgatgtggccactaaaatatttragagcagtttagtatgtcttgggaaaagtgtaagctatattaattttaaaaatcagaataaaaatatttgcatactggagaatcccaactctgaaaaataaagggaaaactgtagttaattgtaattttcctggagattgaggagggagggagagaaaataatgsatggtagtttttcttcttcctttttcactacatttctgtattttccaagtttttgtactaagcacatataactattttaatgaaaaagttatgttaaagaaagcatactctgcttcatgtctagttcttcctccacatactcatacatcaaccccaaagactgctgtattatgtctgtattagtcagcattctccagagaaggagaagcaataggacatatatagacayaggagaggggatttatgatgggaattggctcactcgattttggaggctgagaagttccacaatctaccatctgcatgctggagayccaggaaaccccgtggtataattccatctgagtccaaaggcctg

SEQ ID NO: 2062 - DNA, 587 bp, Homo sapiens
gcatcagttgcccggcatgtgagtgccattccttgggggcatttctgccactgcagccctcaggcctgctgcttctggaagaacaagtttgacaaacatattgtggtctggttccggtcaagcaaaattctggtaccagttcctcataccatgcacctgatgtcacccassatgcgccctattttaagggtacagccgtggtcaatggagagttcaaagacctaagccttgatgactytgaggggaaatatttggtgcttttcttctgtgtgagccaccgcgcccagccctatcctttggatttcacctttgtgtgtcctacagaaattgttgcttctagtgacaaagctaaggaatttcacgatgtgaactttgaagttgttgcagtmtcagtggattcccactttagccgtcttgcctggataaatacaccaagaaagaatggtgctttgggccacataaacatcgcacccttgtcagatttaactaagcgaatttctcgagacttcggtgtgctgttagaaggtcctggtcttgcactaagaggtctcttcataattgaccccaatggagtcatcaagtacttg

SEQ ID NO: 2063 - DNA, 1806 bp, Homo sapiens
gagagtgcgaccgagatgttccactcgctggcgtccgggccgctggtgatctccggtagcactcgggccggcggacagtgagggcgcgacaacaagggaggtgtcacagttttccatttagatcaacaacttcaagttcttaccatggaaaattccgagaagactgmagtggttctccttgcttgtggttcattcaatcccatcaccaacatgcacctcaggttgtttgagctggccaaggactacatgaatggaacaggaaggtacacagttgtcaaaggcatcatctctcctgttggtgatgcctacaagaagaaaggactcattcctgcctatcaccgggtcatcatggcagaacttgctaccaagaattctaaatgggtggaagttgatacatgggaaagtcttcagaaggagtggaaagagactctgaaggtgctaagacaccatcaagagaaattggaggctagtgactgtgatcaccagcagaactcacctactctagaaaggcctggaaggaagaggaagtggactgaaacacaagattctagtcaaaagaaatccctagagccaaaaacaaaagctgtgccaaaggtcaagctgctgtgtggggcagatttattggagtcctttgctgttcccaatttgtggaagagtgaagacatcacccaaatcgtggccaactatgggctcatatgtgttactcgggctggaaatgatgctcagaagtttatctatgaatcggatgtgctgtggaaacaccggagcaacattcacgtggtgaatgaatggatcgctaatgacatctcatccacaaaaatccggagagccctcagaaggggccagagcattcgctacttggtaccagatcttgtccaagaatacattgaaaagcataatttgtacagctctgagagtgaagacaggaatgctggggtcatcctggcccctttgcagagaaacactgcagaagctaagacataggaattctacagcatgatatttcagacttcccatttggggatctgaaacaatctgggagttaataactggggaaagaagttgtgatctgttgcctaaactaaagcttaaaagtttagtaaaaatcgtctgggcacagtggctcacgccttcccagctacttgggaggctgaggcaggagaatcacttgaccccaggtggtggaggttgcagtgagccaagattgcaccattgcactccagcctggcaacagagcaagactctgtctcaaaaaaaaaaaaaaatttagtaaaaatcaatggtaagctaaaataagtttttgtttgtttatttgtttttgagatggagtctctactaaaaatacaaaaaattagccaggcatggtgccgcataactataatcccagctacttgggaggctgaggcaggagaatcgcttgaacccgggaggcacaggttccagtgagccaaggttgtgccactgcactccagcctgggcaaaaaagcaaaactccatctcaaaaagaaaaaaaaaaaagaccgggtgtggtggctcacacctgtaatcccagcactttgggaggcctaagtgggtggatcacgtgaggtcaagagttcaagaccagcctggccaatatggtgaaaccccatctctactaagaatacaaaaaattagctgagcatggtggtgggctcctgtagtcccagctacttgggaggctgaggcaggagaatcgcttgaacctgggaggcagaggttgcagtaagccaagatcgtgccattgcactccagcctgggtgacagagcgagactccatctcaaaaa

SEQ ID NO: 2064 - DNA, 769 bp, Homo sapiens
ggctggagctgcggcaccgcaggcctgagccaccccttctctgctgtctccttctcttcctcagggctcccgtgtctgctcgccctccgacgctgctcagaatattaaaggagacaggaagaagtccagatgaagtgactcatggaaccatttgtttatctgaacctgagctaaatcttaggagagaaggactatggaaatgatgttagacaaraagcaaattcaagtgattttcttattcaagttcaaaatgggtcataaagcagcagagacaactcgcagcatcaacaatgcatttggcccagaaattgctaacaaaggtacagtgcagtggtggttcaagaacttttgcaaaggagacgagagccgtgaagatgaggagtgttgtgcccggccatcaaaagttggcaacgaccaattgagagcaatcatcgaagctgatcctcttacaacactagaagttgccgagaactcaacatcaaccatcctacggtcattcagcatttgaagcaaattagaaggttgtaaaagctcgataagtgggtgcctcatgagctgactgaaaataaaaacaatcgtcattttgaagtgttgtcttctcttactttgtgtaacaacaatgaaccatttcttgatcagattgtgacgtgcgttggtaagtggattttatatgacaaccgctgatgaccagcttggtggttggactgagaagaagctccagagcacttcccaaagccaaacttctaccaaaatgttaatggtcactgtt

SEQ ID NO: 2065 - DNA, 2006 bp, Homo sapiens
cccgggcggtgggagccgaggcgccgagcaagatggcggcgcgagtgctgcgcgcccgcggagcggcctgggccggcggcctcctgcagcgggcggccccctgcagcctcctgcccaggctccggacatggacatcttccagcaacagatctcgagaagacagctggctaaaatccttatttgtccggaaagttgatccaagaaaagatgcccactccaatctcctagccaaaaaggaaacaagcaatctatacaaattacagtttcacaatgttaaaccggaatgcctagaagcatacaacaaaatttgtcaagaggtgttgccaaagattcacgaagataaacactacccttgtactttggtggggacttggaacacgtggtatggcgagcaggaccaagctgtccacctctggaggtatgaaggaggctatccagccctcacagaagtcatgaataaactcagagaaaataaggaatttttggaatttcgtaaggcaagaagtgacatgcttctctccaggaagaatcagctcctgttggagttcagtttctggaatgagcctgtgccaagatccggacctaatatatatgaactcaggtcttaccaactccgaccaggaaccatgattgaatggggcaattactgggctcgtgcaatccgcttcagacaggatggtaacgaagccgtcggaggattcttctctcagattgggcagctgtacatggtgcaccatctttgggcttacagggatcttcagaccagggaagacatacggaatgcagcatggcacaaacatggctgggaggaattggtatattacacagttccacttattcaggaaatggaatccagaatcatgatcccactgaagacctcgcccctccagtaaagctgtagagtttctatgtgcctacatacatttctgtgacaagtatttgtcgtaaattaattttaattgtgtatcaagtgaaaaagaaacactgaggttttaagctgctgtatatagcttgtgagaaacctcttttctttaaaatttacataatcacaagaaaggaaagaattacagttggactgattgtgacagtgccttgtcgtcctctttgaaacaccccgtgttgtccagtataccttataacactkagccacttctccccaccctccagaaggggtccacgttgaattctgaatcatcttgaaaataagattccaaccacaaaaaaaatttagccatttctttactaaaaaaamccaaaaaacaaatctgttttataatcacagatttttagacaaatttcttgtatcaggaagaaatacaaattttgtcatgtttctcaagcagtttttctgagtagtttctgaggaggaacaaattacaagtgtacccaataactgaaaatgttttaactcactctcatttgtaagcagtccacatagtagacaatgggttttccaagctgggcaaggtacatttaatcagtaaatcagtttcacatcatgtattgtgatgtttcaatgtgagacacaaaaacaatggcttgaaacttgtgtatcatatgtgattttgaaatgaacaccttgaatagcactaatttttatttgtggtatttttctataacaaaacaagtagctctaggaaaagaggttttattttgtaaacgatcatttgtgacctcagacactctctggctaatattttaataagctcacagcagataattctgagatcatgggtgaggggtggtgcatgttgagatttaaattggcrtaaagctgcatactttttgtctagctgtttgatttcattttttaatatagtatgccaattttgtgactgttaccatgtgaaagtcctgttraaatgaacaattgtctgccccacaatcaagaatgtatgtgtaaagtgtgaataaatctcatatcaaatgtcaaacttttacatgtgaatgattttctcaaagaacatagaaaagtcaataaaatcctcttaatttccacatatcac

SEQ ID NO: 2066 - DNA, 2054 bp, Homo sapiens
cccgcccctgtgcgcgctggttggtcctcgcaggcatgatgaaacttcccgcacgcgttacaggagccaggtcggtataagcgccagcggcctcgccgcccgtcaagctgtccacatccctggcctcagcccgccacatcaccctgacctgcttacgcccagattttcttcaatcacatctgaataaatcacttgaagaaagcttatagcttcattgcaccatgtgtggcatttgggcgctgtttggcagtgatgattgcctttctgttcagtgtctgagtgctatgaagattgcacacagaggtccagatgcattccgttttgagaatgtcaatggatacaccaactgctgctttggatttcaccggttggcggtagttgacccgctgtttggaatgcagccaattcgagtgaagaaatatccgtatttgtggctctgttacaatggtgaaatctacaaccataagaagatgcaacagcattttgaatttgaataccagaccaaagtggatggtgagataatccttcatctttatgacaaaggaggaattgagcaaacaatttgtatgttggatggtgtgtttgcatttgttttactggatactgccaataagaaagtgttcctgggtagagatacatatggagtcagacctttgtttaaagcaatgacagaagatggatttttggctgtatgttcagaagctaaaggtcttgttacattgaagcactccgcgactccctttttaaaagtggagccttttcttcctggacactatgaagttttggatttaaagccaaatggcaaagttgcatccgtggaaatggttaaatatcatcactgtcgggatgwacccctgcacgccctctatgacaatgtggagaaactctttccaggttttgagatagaaactgtgaagaacaacctcaggatcctttttaataatgctgtaaagaaacgtttgatgacagacagaaggattggctgccttttatcagggggcttggactccagcttggttgctgccactctgttgaagcagctgaaagaarcccaagtacagtatcctctccagacatttgcaattggcatggaagacagccccgatttactggctgctagaaaggtggcagatcatattggaagtgaacattatgaagtcctttttaactctgaggaaggcattcaggctctggatgaagtcatattttccttggaaacttatgacattacaacagttcgtgcttcagtaggtatgtatttaatttccaagtatattcggaagaacacagatagcgtggtgatcttctctggagaaggatcagatgaacttacgcagggttacatatattttcacaaggctccttctcctgaaaaagccgaggaggagagtgagaggcttctgagggaactctatttgtttgatgttctscgcgcagatygaactactgctgcccatggtcttgaactgagagtcccatttctagatcatcgattttcttcctattacttgtctctgccaccagaaatgagaattccaaagaatgggatasaaaaacatctcctgagagagacgtttgaggattycaatctgatacccaaagagattctctggcgaccaaaagaagccttcagtgatggaataacttcagttaagaattcctggtttaagattttacaggaatacgttgaacatcaggttgatgatgcaatgatggcaaatgcagcccagaaatttcccttcaatactcctaaaaccaaagaaggatattactaccgtcaagtctttgaacgccattacccaggccgggctgactggctgagccattactggatgcccaagtggatcaatgccactgaccmttctgcccgcacgctgacccactacaagtcagctgtcaaagcttaggtggtctttatgctgtaatgtgaaagcaaatatttcttcgtgttggatggggactgtgggtagataggggaacaatgagmgtcaactcaggctaacttgggtgtgaaaaaaataaaagtcctaaatctaaaccattgctgtagtcat

SEQ ID NO: 2067 - DNA, 1925 bp, Homo sapiens
gatttcctgtactctgcaccaagccaggagatgattttcttcaatcacatctgaataaatcacttgaagaaagcttatagcttcattgcaccatgtgtggcatttgggcgctgtttggcagtgatgattgcctttctgttcagtgtctgagtgctatgaagattgcacacagaggtccagatgcattccgttttgagaatgtcaatggatacaccaactgctgctttggatttcaccggttggcggtagttgacccgctgtttggaatgcagccaattcgagtgaagaaatatccgtatttgtggctctgttacaatggtgaaatctacaaccataagaagatgcaacagcattttgaatttgaataccagaccaaagtggatggtgagataatccttcatctttatgacaaaggaggaattgagcaaacaatttgtatgttggatggtgtgtttgcatttgttttactggatactgccaataagaaagtgttcctgggtagagatacatatggagtcagacctttgtttaaagcaatgacagaagatggatttttggctgtatgttcagaagctaaaggtcttgttacattgaagcactccgcgactccctttttaaaagtggagccttttcttcctggacactatgaagttttggatttaaagccaaatggcaaagttgcatccgtggaaatggttaaatatcatcactgtcgggatgwacccctgcacgccctctatgacaatgtggagaaactctttccaggttttgagatagaaactgtgaagaacaacctcaggatcctttttaataatgctgtaaagaaacgtttgatgacagacagaaggattggctgccttttatcagggggcttggactccagcttggttgctgccactctgttgaagcagctgaaagaarcccaagtacagtatcctctccagacatttgcaattggcatggaagacagccccgatttactggctgctagaaaggtggcagatcatattggaagtgaacattatgaagtcctttttaactctgaggaaggcattcaggctctggatgaagtcatattttccttggaaacttatgacattacaacagttcgtgcttcagtaggtatgtatttaatttccaagtatattcggaagaacacagatagcgtggtgatcttctctggagaaggatcagatgaacttacgcagggttacatatattttcacaaggctccttctcctgaaaaagccgaggaggagagtgagaggcttctgagggaactctatttgtttgatgttctscgcgcagatygaactactgctgcccatggtcttgaactgagagtcccatttctagatcatcgattttcttcctattacttgtctctgccaccagaaatgagaattccaaagaatgggatasaaaaacatctcctgagagagacgtttgaggattycaatctgatacccaaagagattctctggcgaccaaaagaagccttcagtgatggaataacttcagttaagaattcctggtttaagattttacaggaatacgttgaacatcaggttgatgatgcaatgatggcaaatgcagcccagaaatttcccttcaatactcctaaaaccaaagaaggatattactaccgtcaagtctttgaacgccattacccaggccgggctgactggctgagccattactggatgcccaagtggatcaatgccactgaccmttctgcccgcacgctgacccactacaagtcagctgtcaaagcttaggtggtctttatgctgtaatgtgaaagcaaatatttcttcgtgttggatggggactgtgggtagataggggaacaatgagmgtcaactcaggctaacttgggtgtgaaaaaaataaaagtcctaaatctaaaccattgctgtagtcat

SEQ ID NO: 2068 - DNA, 1951 bp, Homo sapiens
caggtcggtataagcgccagcggcctcgccgcccgtcaagctgtccacatccctggcctcagcccgccacatcaccctgacctgcttacgcccagaaagcttatagcttcattgcaccatgtgtggcatttgggcgctgtttggcagtgatgattgcctttctgttcagtgtctgagtgctatgaagattgcacacagaggtccagatgcattccgttttgagaatgtcaatggatacaccaactgctgctttggatttcaccggttggcggtagttgacccgctgtttggaatgcagccaattcgagtgaagaaatatccgtatttgtggctctgttacaatggtgaaatctacaaccataagaagatgcaacagcattttgaatttgaataccagaccaaagtggatggtgagataatccttcatctttatgacaaaggaggaattgagcaaacaatttgtatgttggatggtgtgtttgcatttgttttactggatactgccaataagaaagtgttcctgggtagagatacatatggagtcagacctttgtttaaagcaatgacagaagatggatttttggctgtatgttcagaagctaaaggtcttgttacattgaagcactccgcgactccctttttaaaagtggagccttttcttcctggacactatgaagttttggatttaaagccaaatggcaaagttgcatccgtggaaatggttaaatatcatcactgtcgggatgwacccctgcacgccctctatgacaatgtggagaaactctttccaggttttgagatagaaactgtgaagaacaacctcaggatcctttttaataatgctgtaaagaaacgtttgatgacagacagaaggattggctgccttttatcagggggcttggactccagcttggttgctgccactctgttgaagcagctgaaagaarcccaagtacagtatcctctccagacatttgcaattggcatggaagacagccccgatttactggctgctagaaaggtggcagatcatattggaagtgaacattatgaagtcctttttaactctgaggaaggcattcaggctctggatgaagtcatattttccttggaaacttatgacattacaacagttcgtgcttcagtaggtatgtatttaatttccaagtatattcggaagaacacagatagcgtggtgatcttctctggagaaggatcagatgaacttacgcagggttacatatattttcacaaggctccttctcctgaaaaagccgaggaggagagtgagaggcttctgagggaactctatttgtttgatgttctscgcgcagatygaactactgctgcccatggtcttgaactgagagtcccatttctagatcatcgattttcttcctattacttgtctctgccaccagaaatgagaattccaaagaatgggatasaaaaacatctcctgagagagacgtttgaggattycaatctgatacccaaagagattctctggcgaccaaaagaagccttcagtgatggaataacttcagttaagaattcctggtttaagattttacaggaatacgttgaacatcaggttgatgatgcaatgatggcaaatgcagcccagaaatttcccttcaatactcctaaaaccaaagaaggatattactaccgtcaagtctttgaacgccattacccaggccgggctgactggctgagccattactggatgcccaagtggatcaatgccactgaccmttctgcccgcacgctgacccactacaagtcagctgtcaaagcttaggtggtctttatgctgtaatgtgaaagcaaatatttcttcgtgttggatggggactgtgggtagataggggaacaatgagmgtcaactcaggctaacttgggtgtgaaaaaaataaaagtcctaaatctaaaccattgctgtagtcat

SEQ ID NO: 2069 - DNA, 2307 bp, Homo sapiens
cctttctgtcctggttccctgaagcatcgagagggaaccgcggccggcaggccggaccgctccggagaggaggcagcggcagtttgagcccctgtaaatgttatatgtgtacttttttttactatgtggcgtcgaagcctgtggacattttcgcggtccgggtccctgcggcggacgggtcggatcgtgctcgtggccagggcgcagtcaggtgtcgcgtggtcctgatctaggaagagactgcggccttatcaccgtctcggtgtctgctttcaccttcaactgmccccctcctcacctggaccgctcaccctcctcctcccctctcaccccgccatccccaccagtccccacctgtctctgtagactgcaagactcatcaagtgacttgctgagcaaaccctgccgagaagagattttcttcaatcacatctgaataaatcacttgaagaaagcttatagcttcattgcaccatgtgtggcatttgggcgctgtttggcagtgatgattgcctttctgttcagtgtctgagtgctatgaagattgcacacagaggtccagatgcattccgttttgagaatgtcaatggatacaccaactgctgctttggatttcaccggttggcggtagttgacccgctgtttggaatgcagccaattcgagtgaagaaatatccgtatttgtggctctgttacaatggtgaaatctacaaccataagaagatgcaacagcattttgaatttgaataccagaccaaagtggatggtgagataatccttcatctttatgacaaaggaggaattgagcaaacaatttgtatgttggatggtgtgtttgcatttgttttactggatactgccaataagaaagtgttcctgggtagagatacatatggagtcagacctttgtttaaagcaatgacagaagatggatttttggctgtatgttcagaagctaaaggtcttgttacattgaagcactccgcgactccctttttaaaagtggagccttttcttcctggacactatgaagttttggatttaaagccaaatggcaaagttgcatccgtggaaatggttaaatatcatcactgtcgggatgwacccctgcacgccctctatgacaatgtggagaaactctttccaggttttgagatagaaactgtgaagaacaacctcaggatcctttttaataatgctgtaaagaaacgtttgatgacagacagaaggattggctgccttttatcagggggcttggactccagcttggttgctgccactctgttgaagcagctgaaagaarcccaagtacagtatcctctccagacatttgcaattggcatggaagacagccccgatttactggctgctagaaaggtggcagatcatattggaagtgaacattatgaagtcctttttaactctgaggaaggcattcaggctctggatgaagtcatattttccttggaaacttatgacattacaacagttcgtgcttcagtaggtatgtatttaatttccaagtatattcggaagaacacagatagcgtggtgatcttctctggagaaggatcagatgaacttacgcagggttacatatattttcacaaggctccttctcctgaaaaagccgaggaggagagtgagaggcttctgagggaactctatttgtttgatgttctscgcgcagatygaactactgctgcccatggtcttgaactgagagtcccatttctagatcatcgattttcttcctattacttgtctctgccaccagaaatgagaattccaaagaatgggatasaaaaacatctcctgagagagacgtttgaggattycaatctgatacccaaagagattctctggcgaccaaaagaagccttcagtgatggaataacttcagttaagaattcctggtttaagattttacaggaatacgttgaacatcaggttgatgatgcaatgatggcaaatgcagcccagaaatttcccttcaatactcctaaaaccaaagaaggatattactaccgtcaagtctttgaacgccattacccaggccgggctgactggctgagccattactggatgcccaagtggatcaatgccactgaccmttctgcccgcacgctgacccactacaagtcagctgtcaaagcttaggtggtctttatgctgtaatgtgaaagcaaatatttcttcgtgttggatggggactgtgggtagataggggaacaatgagmgtcaactcaggctaacttgggtgtgaaaaaaataaaagtcctaaatctaaaccattgctgtagtcat

SEQ ID NO: 2070 - DNA, 4260 bp, Homo sapiens
gagctgagccggagacaggtaaccgtgcgctgtcgccgcgcccgtcccagtgccgggtgtcgcggcgcttggcggcccggggttggagatcgcggcagttgtgaaaaacttcaggacaaaaatgtttcatttaaggacttgtgctgctaagttgaggccmttgacggcttcccagactgttaagacattttcacaaaacagaccagcagcagctaggacatttcaacagattcggtgctattctgcacctgttgctgctgagccctttctcagtgggactagttygaactatgtggaggagatgtactgtgcttggctggaaaaccccaaaagtgtacataagtcatgggacattttttttcgcaacacgaatgccggagccccaccgggcactgcctaccagagtccccttcccctgagccgaggctccctggctgctgtggcccatgcacagtccctggtagargcacagcccaacgtggacaagctcgtggaggaccacctggcagtgcagtcrctcatcagggcatatcagatacgagggcaccatgtagcacagctggaccccctggggattttggatgctgatctggactcctccgtgcccgctgacattatctcatccacagacaaacttgggttctatggcctggatgagtctgacctcgacaaggtcttccacttgcccaccaccactttcatcgggggacaggaatcagcacttcctctgcgggagatcatccgtcggctggagatggcctactgccagcatattggggtggagttcatgttcatcaatgacctggagcagtgccagtggatccggcagaagtttgagacccctgggatcatgcagttcacaaatgaggagaaacggaccctgctggccaggcttgtgcggtccaccaggtttgaggagttcctacagcggaagtggtcctctgagaagcgctttggtctagaaggctgcgaggtactgatccctgccctcaagaccatcattgacaagtctagtgagaatggcgtggactacgtgatcatgggcatgccacacagagggcggctgaacgtgcttgcaaatgtcatcaggaaggagctggaacagatcttctgtcaattcgattcaaagctggaggcagctgatgagggctccggagatgtgaagtaccacctgggcatgtatcaccgcaggatcaatcgtgtcaccgacaggaacattaccttgtccttggtggccaacccttcccaccttgaggccgctgaccccgtggtgatgggcaagaccaaagccgaacagttttactgtggcgacactgaagggaaaaaggtcatgtccatcctgttgcatggggatgctgcatttgctggccagggcattgtgtacgagaccttccacctcagcgacctgccatcctacacaactcatggcaccgtgcacgtggtcgtcaacaaccagatcggcttcaccaccgaccctcggatggcccgctcctccccctaccccactgacgtggcccgagtggtgaatgcccccattttccacgtgaactcagatgaccccgaggctgtcatgtacgtgtgcaaagtggcggccgagtggaggagcaccttccacaaggacgtggttgtcgatttggtgtgttaccggcgcaacggccacaacgagatggatgagcccatgttcacgcagccgctcatgtacaagcagatccgcaagcagaagcctgtgttacagaagtacgmtgagctgctggtgtcgcagggtgtggtcaaccagcctgagtatgaggaggaaatttccaagtatgataagatctgtgaggaagcttttgccagatctaaagatgagaagatcttgcacattaagcactggctggactctccctggcctggcttcttcaccctggacgggcagcccaggagcatgtcctgcccctccacgggtctgacggaggatattctgacacacatcgggaatgtggctagttctgtgcctgtggaaaactttactattcatggagggctgagccggatcttgaagactcgtggggaaatggtgaagaaccggactgtggactgggctctagcggagtacatggcgtttggctcgctcctgaaggagggcatccacattcggctgagcggccaggacgtggagcggggcacattcagccmccgccaccatgtgctccatgaccagaatgtggacaagagaacctgcatccccatgaaccatctctggcccaatcaggccccctatactgtgtgcaacagctcactgtctgagtacggcgtgctgggctttgagctgggcttcgccatggccagtcctaatgccctggtcctctgggaagcccaatttggtgacttccacaacacggcccagtgtatcatcgaccagttcatctgcccgggacaagccaagtgggtgcggcagaatggcatcgtgttgctgctgccccatggcatggagggcatgggtccagaacattcctccgcccgcccagagcggttcttgcagatgtgcaacgatgacccagatgtcctgccagaccttaaagaagccaacttcgacatcaatcagctatatgactgcaattgggttgttgtcaactgctccactcctggcaacttcttccacgtgctacgacgccagatcctgctgccattccggaagccgttaattatcttcacccccaaatccctgttgcgccaccccgaggccagatccagctttgatgagatgcttccaggaacccacttccagcgggtgatcccagaagatggccctgcagctcagaacccagaaaatgtcaaaaggcttctcttctgcaccggcaaagtgtattatgacctcacccgggagcgcaaagcacgcgacatggtggggcaggtggccatcacaaggattgagcagctgtcgccattcccctttgacctcctgctgaaggaggtgcagaagtaccccaatgctgagctggcctggtgccaggaggagcacaagaaccaaggctactatgactacgtgaagccaagacttcggaccaccatcagccgcgccaagcccgtctggtatgccggccgggacccagcrgctgctccagccaccggcaacaagaagacccacctgacggagctgcagcgcctcctggacacggccttcgacctggacrtcttcaagaacttctcgtagatgctgcctagggttgcttgggccactgccctctccacacccatgactgccccttgcttctcaactaaagaatagtgcctcagcgctgcccacaccaccgycctcctcgctgtgccaccacccctccctctgctctcataggagttaggctgtcgtccccctccagtgcttggctgccccacaggccacacgctgcccaggctctgctgacttctgagcagttttccaggaggccggggggagcaggaggaggaaaggtagcccccgagggatgtccttggggaggggtcagctctggccacaaycctccccaccagtctcacccactaggataggaactgggccttgtgtgctggcttccgctgtcacccagcaaggcacaggctcctgtatttgagactaggatagcttcatcttgagcctgagccttagaatctgtagaggagcctggagtcggatctagccatggctggcagaggtttctagggtgggccccagccgtggcgtgaactgaggatgacccggggcagctggcaggagagagccttggcctgacctggcacagaaagggcagcttcagtctctgcagtgtccattatctgctgttccttcgagggttccaggctgtgtgtggggcccaagcatgccccacccacccctcctgggcccaggcagcacctggagcccacagagtctgtgtgtagccaggaagccccgctcaggtagccaccrccggggcactggctgctctgtcttggtcctgttaaccctccacctcctctcttggamtccctccccaccccaaccactctttctttctcctttaacccaatggagactttctgatgcatcrttttctttgctgtgccaaagcaggtcagaagagggagaggaggggctgggggtgaggggccaggccatggccaaggggccagctgcccctcatttrtcactctgaccttcacagggacagatctgatttatttattttggttaaaaaaaaaaaaaaggaacagaaacaactttgcattgcattggcttgacccataaactaagttatatccgtg

SEQ ID NO: 2071 - DNA, 1773 bp, Homo sapiens
gagctgagccggagacaggtaaccgtgcgctgtcgccgcgcccgtcccagtgccgggtgtcgcggcgcttggcggcccggggttggagatcgcggcagttgtgaaaaacttcaggacaaaaatgtttcatttaaggacttgtgctgctaagttgaggccmttgacggcttcccagactgttaagacattttcacaaaacagaccagcagcagctaggacatttcaacagattcggtgctattctgcacctgttgctgctgagccctttctcagtgggactagttygaactatgtggaggagatgtactgtgcttggctggaaaaccccaaaagtgtacataagtcatgggacattttttttcgcaacacgaatgccggagccccaccgggcactgcctaccagagtccccttcccctgagccgaggctccctggctgctgtggcccatgcacagtccctggtagargcacagcccaacgtggacaagctcgtggaggaccacctggcagtgcagtcrctcatcagggcatatcagatacgagggcaccatgtagcacagctggaccccctggggattttggatgctgatctggactcctccgtgcccgctgacattatctcatccacagacaaacttgggttctatggcctggatgagtctgacctcgacaaggtcttccacttgcccaccaccactttcatcgggggacaggaatcagcacttcctctgcgggagatcatccgtcggctggagatggcctactgccagcatattggggtggagttcatgttcatcaatgacctggagcagtgccagtggatccggcagaagtttgagacccctgggatcatgcagttcacaaatgaggagaaacggaccctgctggccaggcttgtgcggtccaccaggtttgaggagttcctacagcggaagtggtcctctgagaagcgctttggtctagaaggctgcgaggtactgatccctgccctcaagaccatcattgacaagtctagtgagaatggcgtggactacgtgatcatgggcatgccacacagagggcggctgaacgtgcttgcaaatgtcatcaggaaggagctggaacagatcttctgtcaattcgattcaaagctggaggcagctgatgagggctccggagatgtgaagtaccacctgggcatgtatcaccgcaggatcaatcgtgtcaccgacaggaacattaccttgtccttggtggccaacccttcccaccttgaggccgctgaccccgtggtgatgggcaagaccaaagccgaacagttttactgtggcgacactgaagggaaaaaggtaaggcccagagagaggcgtgcaaggcagatcgtcaaggccccatgttccagcatggagttccgctcaccaacataacccagagccctgggtgcatctagactttaaaaaaatatttaaagtcggccgggcgcagtgtctcacgcctgtaatcccagcactttgggaggccgaggtgggcagatcacctgagttcgggagttggagaccagcctgaccaacatggagaaactccatctctactaaaaatacaaaattagctgggcgtggtggcgcgcgcctgtaatcccagctactcaggaggctgaggcaggagaatcgcttgaacccgggaggtggaggttgcagtgagccgagattacgccattgcactccagcctgggccaacaagagcgaaactctgtctcaaagaaaaaaataaataaataaaaaatatatgtatatgt

SEQ ID NO: 2072 - DNA, 1082 bp, Homo sapiens
ctttccgcttggatcctgactctgctgttagtagcctatgaccttggatgaaatgtaagggaatagaaactgaagctatctgtaaagtgaaagagctggtgcctgccttattgggagcctctgggtttatgtatgagtcagatgcgtagagttgctcaccatggagggcccagggcagttgtgaaaaacttcaggacaaaaatgtttcatttaaggacttgtgctgctaagttgaggccmttgacggcttcccagactgttaagacattttcacaaaacagaccagcagcagctaggacatttcaacagattcggtgctattctgcacctgttgctgctgagccctttctcagtgggactagttygaactatgtggaggagatgtactgtgcttggctggaaaaccccaaaagtgtacataaggtaaggctcgcagggctgtgggtctgcctcatgttggtgtgttggcctgttcctgactggtcaccaggtaagtgtgtgcgtcctgaggagtcagcgggcagacaggcagctggagcgccataccaaccaccgtatctgtatcggacccagcatagccccagcagaagccatggtccctggattggcgtccagcagtagacactgtgcttaactctgcgaggatgtgaagaagcatgtgtgtgaccctccagcatctccgcaagggctgcttcaggatgaagccgctgaagaaagaagaaagaaagaaagtgtgtggaaaagagcaggacctcaggaagctcctccattctaactgtctggagaggatactttcatttgtaacatgccgtagtcacctcatgtaatttctgtatgaatggccttttagctcattatgttcgtatttttttcctgtttgtttctaacttctctgtattacatataagggcattttctaaacttttcaccacatgattacygatgtaagtcatgtcttgttttttttggtttgtttttgtttttgtttgttttgttttgtttcagacagagtcccatccatcctgggcaacagagggagaccctgtctctaaaatttaaaagaaggtggggggygggtatat

SEQ ID NO: 2073 - DNA, 4253 bp, Homo sapiens
acgccatacgccggggcggggccgagagtttggagccccggagtggggtgtcggcgcctcattcgggtggagctgagccggagacaggcagttgtgaaaaacttcaggacaaaaatgtttcatttaaggacttgtgctgctaagttgaggccmttgacggcttcccagactgttaagacattttcacaaaacagaccagcagcagctaggacatttcaacagattcggtgctattctgcacctgttgctgctgagccctttctcagtgggactagttygaactatgtggaggagatgtactgtgcttggctggaaaaccccaaaagtgtacataagtcatgggacattttttttcgcaacacgaatgccggagccccaccgggcactgcctaccagagtccccttcccctgagccgaggctccctggctgctgtggcccatgcacagtccctggtagargcacagcccaacgtggacaagctcgtggaggaccacctggcagtgcagtcrctcatcagggcatatcagatacgagggcaccatgtagcacagctggaccccctggggattttggatgctgatctggactcctccgtgcccgctgacattatctcatccacagacaaacttgggttctatggcctggatgagtctgacctcgacaaggtcttccacttgcccaccaccactttcatcgggggacaggaatcagcacttcctctgcgggagatcatccgtcggctggagatggcctactgccagcatattggggtggagttcatgttcatcaatgacctggagcagtgccagtggatccggcagaagtttgagacccctgggatcatgcagttcacaaatgaggagaaacggaccctgctggccaggcttgtgcggtccaccaggtttgaggagttcctacagcggaagtggtcctctgagaagcgctttggtctagaaggctgcgaggtactgatccctgccctcaagaccatcattgacaagtctagtgagaatggcgtggactacgtgatcatgggcatgccacacagagggcggctgaacgtgcttgcaaatgtcatcaggaaggagctggaacagatcttctgtcaattcgattcaaagctggaggcagctgatgagggctccggagatgtgaagtaccacctgggcatgtatcaccgcaggatcaatcgtgtcaccgacaggaacattaccttgtccttggtggccaacccttcccaccttgaggccgctgaccccgtggtgatgggcaagaccaaagccgaacagttttactgtggcgacactgaagggaaaaaggtcatgtccatcctgttgcatggggatgctgcatttgctggccagggcattgtgtacgagaccttccacctcagcgacctgccatcctacacaactcatggcaccgtgcacgtggtcgtcaacaaccagatcggcttcaccaccgaccctcggatggcccgctcctccccctaccccactgacgtggcccgagtggtgaatgcccccattttccacgtgaactcagatgaccccgaggctgtcatgtacgtgtgcaaagtggcggccgagtggaggagcaccttccacaaggacgtggttgtcgatttggtgtgttaccggcgcaacggccacaacgagatggatgagcccatgttcacgcagccgctcatgtacaagcagatccgcaagcagaagcctgtgttacagaagtacgmtgagctgctggtgtcgcagggtgtggtcaaccagcctgagtatgaggaggaaatttccaagtatgataagatctgtgaggaagcttttgccagatctaaagatgagaagatcttgcacattaagcactggctggactctccctggcctggcttcttcaccctggacgggcagcccaggagcatgtcctgcccctccacgggtctgacggaggatattctgacacacatcgggaatgtggctagttctgtgcctgtggaaaactttactattcatggagggctgagccggatcttgaagactcgtggggaaatggtgaagaaccggactgtggactgggctctagcggagtacatggcgtttggctcgctcctgaaggagggcatccacattcggctgagcggccaggacgtggagcggggcacattcagccmccgccaccatgtgctccatgaccagaatgtggacaagagaacctgcatccccatgaaccatctctggcccaatcaggccccctatactgtgtgcaacagctcactgtctgagtacggcgtgctgggctttgagctgggcttcgccatggccagtcctaatgccctggtcctctgggaagcccaatttggtgacttccacaacacggcccagtgtatcatcgaccagttcatctgcccgggacaagccaagtgggtgcggcagaatggcatcgtgttgctgctgccccatggcatggagggcatgggtccagaacattcctccgcccgcccagagcggttcttgcagatgtgcaacgatgacccagatgtcctgccagaccttaaagaagccaacttcgacatcaatcagctatatgactgcaattgggttgttgtcaactgctccactcctggcaacttcttccacgtgctacgacgccagatcctgctgccattccggaagccgttaattatcttcacccccaaatccctgttgcgccaccccgaggccagatccagctttgatgagatgcttccaggaacccacttccagcgggtgatcccagaagatggccctgcagctcagaacccagaaaatgtcaaaaggcttctcttctgcaccggcaaagtgtattatgacctcacccgggagcgcaaagcacgcgacatggtggggcaggtggccatcacaaggattgagcagctgtcgccattcccctttgacctcctgctgaaggaggtgcagaagtaccccaatgctgagctggcctggtgccaggaggagcacaagaaccaaggctactatgactacgtgaagccaagacttcggaccaccatcagccgcgccaagcccgtctggtatgccggccgggacccagcrgctgctccagccaccggcaacaagaagacccacctgacggagctgcagcgcctcctggacacggccttcgacctggacrtcttcaagaacttctcgtagatgctgcctagggttgcttgggccactgccctctccacacccatgactgccccttgcttctcaactaaagaatagtgcctcagcgctgcccacaccaccgycctcctcgctgtgccaccacccctccctctgctctcataggagttaggctgtcgtccccctccagtgcttggctgccccacaggccacacgctgcccaggctctgctgacttctgagcagttttccaggaggccggggggagcaggaggaggaaaggtagcccccgagggatgtccttggggaggggtcagctctggccacaaycctccccaccagtctcacccactaggataggaactgggccttgtgtgctggcttccgctgtcacccagcaaggcacaggctcctgtatttgagactaggatagcttcatcttgagcctgagccttagaatctgtagaggagcctggagtcggatctagccatggctggcagaggtttctagggtgggccccagccgtggcgtgaactgaggatgacccggggcagctggcaggagagagccttggcctgacctggcacagaaagggcagcttcagtctctgcagtgtccattatctgctgttccttcgagggttccaggctgtgtgtggggcccaagcatgccccacccacccctcctgggcccaggcagcacctggagcccacagagtctgtgtgtagccaggaagccccgctcaggtagccaccrccggggcactggctgctctgtcttggtcctgttaaccctccacctcctctcttggamtccctccccaccccaaccactctttctttctcctttaacccaatggagactttctgatgcatcrttttctttgctgtgccaaagcaggtcagaagagggagaggaggggctgggggtgaggggccaggccatggccaaggggccagctgcccctcatttrtcactctgaccttcacagggacagatctgatttatttattttggttaaaaaaaaaaaaaaggaacagaaacaactttgcattgcattggcttgacccataaactaagttatatccgtg

SEQ ID NO: 2074 - DNA, 3373 bp, Homo sapiens
gagctgagccggagacaggtaaccgtgcgctgtcgccgcgcccgtcccagtgccgggtgtcgcggcgcttggcggcccggggttggagatcgcggcagttgtgaaaaacttcaggacaaaaatgtttcatttaaggacttgtgctgctaagttgaggccmttgacggcttcccagactgttaagacattttcacaaaacagaccagcagcagctaggacatttcaacagattcggtgctattctgcacctgttgctgctgagccctttctcagtgggactagttygaactatgtggaggagatgtactgtgcttggctggaaaaccccaaaagtgtacataagtcatgggacattttttttcgcaacacgaatgccggagccccaccgggcactgcctaccagagtccccttcccctgagccgaggctccctggctgctgtggcccatgcacagtccctggtagargcacagcccaacgtggacaagctcgtggaggaccacctggcagtgcagtcrctcatcagggcatatcagatacgagggcaccatgtagcacagctggaccccctggggattttggatgctgatctggactcctccgtgcccgctgacattatctcatccacagacaaacttgggttctatggcctggatgagtctgacctcgacaaggtcttccacttgcccaccaccactttcatcgggggacaggaatcagcacttcctctgcgggagatcatccgtcggctggagatggcctactgccagcatattggggtggagttcatgttcatcaatgacctggagcagtgccagtggatccggcagaagtttgagacccctgggatcatgcagttcacaaatgaggagaaacggaccctgctggccaggcttgtgcggtccaccaggtttgaggagttcctacagcggaagtggtcctctgagaagcgctttggtctagaaggctgcgaggtactgatccctgccctcaagaccatcattgacaagtctagtgagaatggcgtggactacgtgatcatgggcatgccacacagagggcggctgaacgtgcttgcaaatgtcatcaggaaggagctggaacagatcttctgtcaattcgattcaaagctggaggcagctgatgagggctccggagatgtgaagtaccacctgggcatgtatcaccgcaggatcaatcgtgtcaccgacaggaacattaccttgtccttggtggccaacccttcccaccttgaggccgctgaccccgtggtgatgggcaagaccaaagccgaacagttttactgtggcgacactgaagggaaaaaggtcatgtccatcctgttgcatggggatgctgcatttgctggccagggcattgtgtacgagaccttccacctcagcgacctgccatcctacacaactcatggcaccgtgcacgtggtcgtcaacaaccagatcggcttcaccaccgaccctcggatggcccgctcctccccctaccccactgacgtggcccgagtggtgaatgcccccattttccacgtgaactcagatgaccccgaggctgtcatgtacgtgtgcaaagtggcggccgagtggaggagcaccttccacaaggacgtggttgtcgatttggtgtgttaccggcgcaacggccacaacgagatggatgagcccatgttcacgcagccgctcatgtacaagcagatccgcaagcagaagcctgtgttacagaagtacgmtgagctgctggtgtcgcagggtgtggtcaaccagcctgagtatgaggaggaaatttccaagtatgataagatctgtgaggaagcttttgccagatctaaagatgagaagatcttgcacattaagcactggctggactctccctggcctggcttcttcaccctggacgggcagcccaggagcatgtcctgcccctccacgggtctgacggaggatattctgacacacatcgggaatgtggctagttctgtgcctgtggaaaactttactattcatggagggctgagccggatcttgaagactcgtggggaaatggtgaagaaccggactgtggactgggctctagcggagtacatggcgtttggctcgctcctgaaggagggcatccacattcggctgagcggccaggacgtggagcggggcacattcagccmccgccaccatgtgctccatgaccagaatgtggacaagagaacctgcatccccatgaaccatctctggcccaatcaggccccctatactgtgtgcaacagctcactgtctgagtacggcgtgctgggctttgagctgggcttcgccatggccagtcctaatgccctggtcctctgggaagcccaatttggtgacttccacaacacggcccagtgtatcatcgaccagttcatctgcccgggacaagccaagtgggtgcggcagaatggcatcgtgttgctgctgccccatggcatggagggcatgggtccagaacattcctccgcccgcccagagcggttcttgcagatgtgcaacgatgacccagatgtcctgccagaccttaaagaagccaacttcgacatcaatcagctatatgactgcaattgggttgttgtcaactgctccactcctggcaacttcttccacgtgctacgacgccagatcctgctgccattccggaagccgttaattatcttcacccccaaatccctgttgcgccaccccgaggccagatccagctttgatgagatgcttccaggaacccacttccagcgggtgatcccagaagatggccctgcagctcagaacccagaaaatgtcaaaaggcttctcttctgcaccggcaaagtgtattatgacctcacccgggagcgcaaagcacgcgacatggtggggcaggtggccatcacaaggattgagcagctgtcgccattcccctttgacctcctgctgaaggaggtgcagaagtaccccaatgctgagctggcctggtgccaggaggagcacaagaaccaaggctactatgactacgtgaagccaagacttcggaccaccatcagccgcgccaagcccgtctggtatgccggccgggacccagcrgctgctccagccaccggcaacaagaagacccacctgacggagctgcagcgcctcctggacacggccttcgacctggacrtcttcaagaacttctcgtagatgctgcctagggttgcttgggccactgccctctccacacccatctgcccctcatttrtcactctgaccttcacagggacagatctgatttatttattttggttaaaaaaaaaaaaaaggaacagaaacaactttgcattgcattggcttgacccataaactaagttatatccgtgggca

SEQ ID NO: 2075 - DNA, 4166 bp, Homo sapiens
gcagttgtgaaaaacttcaggacaaaaatgtttcatttaaggacttgtgctgctaagttgaggccmttgacggcttcccagactgttaagacattttcacaaaacagaccagcagcagctaggacatttcaacagattcggtgctattctgcacctgttgctgctgagccctttctcagtgggactagttygaactatgtggaggagatgtactgtgcttggctggaaaaccccaaaagtgtacataagtcatgggacattttttttcgcaacacgaatgccggagccccaccgggcactgcctaccagagtccccttcccctgagccgaggctccctggctgctgtggcccatgcacagtccctggtagargcacagcccaacgtggacaagctcgtggaggaccacctggcagtgcagtcrctcatcagggcatatcagatacgagggcaccatgtagcacagctggaccccctggggattttggatgctgatctggactcctccgtgcccgctgacattatctcatccacagacaaacttgggttctatggcctggatgagtctgacctcgacaaggtcttccacttgcccaccaccactttcatcgggggacaggaatcagcacttcctctgcgggagatcatccgtcggctggagatggcctactgccagcatattggggtggagttcatgttcatcaatgacctggagcagtgccagtggatccggcagaagtttgagacccctgggatcatgcagttcacaaatgaggagaaacggaccctgctggccaggcttgtgcggtccaccaggtttgaggagttcctacagcggaagtggtcctctgagaagcgctttggtctagaaggctgcgaggtactgatccctgccctcaagaccatcattgacaagtctagtgagaatggcgtggactacgtgatcatgggcatgccacacagagggcggctgaacgtgcttgcaaatgtcatcaggaaggagctggaacagatcttctgtcaattcgattcaaagctggaggcagctgatgagggctccggagatgtgaagtaccacctgggcatgtatcaccgcaggatcaatcgtgtcaccgacaggaacattaccttgtccttggtggccaacccttcccaccttgaggccgctgaccccgtggtgatgggcaagaccaaagccgaacagttttactgtggcgacactgaagggaaaaaggtcatgtccatcctgttgcatggggatgctgcatttgctggccagggcattgtgtacgagaccttccacctcagcgacctgccatcctacacaactcatggcaccgtgcacgtggtcgtcaacaaccagatcggcttcaccaccgaccctcggatggcccgctcctccccctaccccactgacgtggcccgagtggtgaatgcccccattttccacgtgaactcagatgaccccgaggctgtcatgtacgtgtgcaaagtggcggccgagtggaggagcaccttccacaaggacgtggttgtcgatttggtgtgttaccggcgcaacggccacaacgagatggatgagcccatgttcacgcagccgctcatgtacaagcagatccgcaagcagaagcctgtgttacagaagtacgmtgagctgctggtgtcgcagggtgtggtcaaccagcctgagtatgaggaggaaatttccaagtatgataagatctgtgaggaagcttttgccagatctaaagatgagaagatcttgcacattaagcactggctggactctccctggcctggcttcttcaccctggacgggcagcccaggagcatgtcctgcccctccacgggtctgacggaggatattctgacacacatcgggaatgtggctagttctgtgcctgtggaaaactttactattcatggagggctgagccggatcttgaagactcgtggggaaatggtgaagaaccggactgtggactgggctctagcggagtacatggcgtttggctcgctcctgaaggagggcatccacattcggctgagcggccaggacgtggagcggggcacattcagccmccgccaccatgtgctccatgaccagaatgtggacaagagaacctgcatccccatgaaccatctctggcccaatcaggccccctatactgtgtgcaacagctcactgtctgagtacggcgtgctgggctttgagctgggcttcgccatggccagtcctaatgccctggtcctctgggaagcccaatttggtgacttccacaacacggcccagtgtatcatcgaccagttcatctgcccgggacaagccaagtgggtgcggcagaatggcatcgtgttgctgctgccccatggcatggagggcatgggtccagaacattcctccgcccgcccagagcggttcttgcagatgtgcaacgatgacccagatgtcctgccagaccttaaagaagccaacttcgacatcaatcagctatatgactgcaattgggttgttgtcaactgctccactcctggcaacttcttccacgtgctacgacgccagatcctgctgccattccggaagccgttaattatcttcacccccaaatccctgttgcgccaccccgaggccagatccagctttgatgagatgcttccaggaacccacttccagcgggtgatcccagaagatggccctgcagctcagaacccagaaaatgtcaaaaggcttctcttctgcaccggcaaagtgtattatgacctcacccgggagcgcaaagcacgcgacatggtggggcaggtggccatcacaaggattgagcagctgtcgccattcccctttgacctcctgctgaaggaggtgcagaagtaccccaatgctgagctggcctggtgccaggaggagcacaagaaccaaggctactatgactacgtgaagccaagacttcggaccaccatcagccgcgccaagcccgtctggtatgccggccgggacccagcrgctgctccagccaccggcaacaagaagacccacctgacggagctgcagcgcctcctggacacggccttcgacctggacrtcttcaagaacttctcgtagatgctgcctagggttgcttgggccactgccctctccacacccatgactgccccttgcttctcaactaaagaatagtgcctcagcgctgcccacaccaccgycctcctcgctgtgccaccacccctccctctgctctcataggagttaggctgtcgtccccctccagtgcttggctgccccacaggccacacgctgcccaggctctgctgacttctgagcagttttccaggaggccggggggagcaggaggaggaaaggtagcccccgagggatgtccttggggaggggtcagctctggccacaaycctccccaccagtctcacccactaggataggaactgggccttgtgtgctggcttccgctgtcacccagcaaggcacaggctcctgtatttgagactaggatagcttcatcttgagcctgagccttagaatctgtagaggagcctggagtcggatctagccatggctggcagaggtttctagggtgggccccagccgtggcgtgaactgaggatgacccggggcagctggcaggagagagccttggcctgacctggcacagaaagggcagcttcagtctctgcagtgtccattatctgctgttccttcgagggttccaggctgtgtgtggggcccaagcatgccccacccacccctcctgggcccaggcagcacctggagcccacagagtctgtgtgtagccaggaagccccgctcaggtagccaccrccggggcactggctgctctgtcttggtcctgttaaccctccacctcctctcttggamtccctccccaccccaaccactctttctttctcctttaacccaatggagactttctgatgcatcrttttctttgctgtgccaaagcaggtcagaagagggagaggaggggctgggggtgaggggccaggccatggccaaggggccagctgcccctcatttrtcactctgaccttcacagggacagatctgatttatttattttggttaaaaaaaaaaaaaaggaacagaaacaactttgcattgcattggcttgacccataaactaagttatatccgtg

SEQ ID NO: 2076 - DNA, 2877 bp, Homo sapiens
taccacaaatttactggcttaaaacgacgcaagtctgtaggtcagaagtctgacacgggtcttaactggtgacccgagtcagatttgggacacaaagaacagaaaccaagctgtgcaggtttctgacaggcagtccggttagggagccctacagcaacccgccggtcctctctctcaggcagttgctgccatggctcattattccaaccggttctcctcagcccagtctatctcagtggctccattcatagggtgatgtgcccggcgggacactaaccctaaccaagcagagagacggtcatgcccgtcacgacctcggccctcgccccggccgaggcttctcctgcaggtcgcgagaatcaggtgcgtcagcggcgtccgggaacgccggaagagccagtggagcggctctgtagtccaaagtaccccgtcgaccccagcacggccgctccaccgcctcctactagacccagtcctagggactgcgcagtcgcagagctccgtccgagtaccggaagcctaggcgccagcacttccgggaagtgacttcgtctccgaagccgattggttgttgctttgctcccgctcgcgtcggtggcgtttttcctgcagcgcgtgcgtgctgcgctactgagcagcgccatggaggactctgaagcactgggcttcgaacacatgggcctcgatccccggctccttcaggctgtcaccgatctgggctggtcgcgacctacgctgatccaggagaaggccatcccactggccctagaagggaaggacctcctggctcgggcccgcacgggctccgggaagacggccgcttatgctattccgatgctgcagctgttgctccataggaaggcggtgggtccggtggtagaacaggcagtgagaggccttgttcttgttcctaccaaggagctggcacggcaagcacagtccatgattcagcagctggctacctactgtgctcgggatgtccgagtggccaatgtctcagctgctgaagactcagtctctcagagagctgtgctgatggagaagccagatgtggtagtagggaccccatctcgcatattaagccacttgcagcaagacagcctgaaacttcgtgactccctggagcttttggtggtggaygaagcygaccttcttttttcctttggctttgaagaagagctcaagagtctcctctgtcacttgccccggatttaccaggcttttctcatgtcagctacttttaacgaggacgtacaagcactcaaggagctgatattacataacccggttacccttaagttacaggagtcccagctgcctgggccagaccagttacagcagtttcaggtggtctgtgagactgaggaagacaaattcctcctgctgtatgccctgctcaagctgtcattgattcggggcaagtctctgctctttgtcaacactctagaacggagttaccggctacgcctgttcttggaacagttcagcatccccacctgtgtgctcaatggagagcttccactgcgctccaggtgccacatcatctcacagttcaaccaaggcttctacgactgtgtcatagcaactgatgctgaagtcctgggggccccagtcaagggcaagcgtcggggccgagggcccaaaggggacaaggcctctgatccggaagcaggtgtggcccggggcatagacttccaccatgtgtctgctgtgctcaactttgatcttcccccaacccctgaggcctacatccatcgagctggcaggacagcacgcgctaacaacccaggcatagtcttaacctttgtgcttcccacggagcagttccacttaggcaagattgaggagcttctcagtggagagaacaggggccccattctgctcccctaccagttccggatggaggagatcgagggcttccgctatcgctgcagggatgccatgcgctcagtgactaagcaggccattcgggaggcaagattgaaggagatcaaggaagagcttctgcattctgagaagcttaagacatactttgaagacaaccctagggacctccagctgctgcggcatgacctacctttgcaccccgcagtggtgaagccccacctgggccatgttcctgactacctggttcctcctgctctccgtggcctggtrcgccctcacaagaagcggaagaagctgtcttcctcttgtaggaaggccaagagagcaaagtcccagaacccactgcgcagcttcaagcacaaaggaaagaaattcagacccacagccaagccctcctgaggttgttgggcctctctggagctgagcacattgtggagcacaggcttacacccttcgtggacaggcgaggctytggtgcttactgcacagcctgaacagacagttctggggccggcagtgctgggccctttagctccttggcacttccaagctggcatcttgccccttgacaacagaataaaaattttagctgccccagtttgtgcctccagcatatgaaaaggactatttgaatccccaaaacatcaggagtcgggaaacttcggaagacagctgtgcctggctctgtggctgcatgcagtgcttcacttggccagcagaggtcagctgtgccgagctgccccagccatgagaagagaagcctgcccttgctggcaggtggctatggccggcccagagccttcctgcccagytcctgcagccctgctgcctgggatcaggctgggagatgggccttcctgaccgccagccttcctctccccgagcacacgcacatgtagattcggggggaagctgcctgctcttccttagaggagccggggcagctatctgctggtccctttctgaacaactgttgatgtgtgagctgtg

SEQ ID NO: 2077 - DNA, 2877 bp, Homo sapiens
taccacaaatttactggcttaaaacgacgcaagtctgtaggtcagaagtctgacacgggtcttaactggtgacccgagtcagatttgggacacaaagaacagaaaccaagctgtgcaggtttctgacaggcagtccggttagggagccctacagcaacccgccggtcctctctctcaggcagttgctgccatggctcattattccaaccggttctcctcagcccagtctatctcagtggctccattcatagggtgatgtgcccggcgggacactaaccctaaccaagcagagagacggtcatgcccgtcacgacctcggccctcgccccggccgaggcttctcctgcaggtcgcgagaatcaggtgcgtcagcggcgtccgggaacgccggaagagccagtggagcggctctgtagtccaaagtaccccgtcgaccccagcacggccgctccaccgcctcctactagacccagtcctagggactgcgcagtcgcagagctccgtccgagtaccggaagcctaggcgccagcacttccgggaagtgacttcgtctccgaagccgattggttgttgctttgctcccgctcgcgtcggtggcgtttttcctgcagcgcgtgcgtgctgcgctactgagcagcgccatggaggactctgaagcactgggcttcgaacacatgggcctcgatccccggctccttcaggctgtcaccgatctgggctggtcgcgacctacgctgatccaggagaaggccatcccactggccctagaagggaaggacctcctggctcgggcccgcacgggctccgggaagacggccgcttatgctattccgatgctgcagctgttgctccataggaaggcgacaggtccggtggtagaacaggcagtgagaggccttgttcttgttcctaccaaggagctggcacggcaagcacagtccatgattcagcagctggctacctactgtgctcgggatgtccgagtggccaatgtctcagctgctgaagactcagtctctcagagagctgtgctgatggagaagccagatgtggtagtagggaccccatctcgcatattaagccacttgcagcaagacagcctgaaacttcgtgactccctggagcttttggtggtggaygaagcygaccttcttttttcctttggctttgaagaagagctcaagagtctcctctgtcacttgccccggatttaccaggcttttctcatgtcagctacttttaacgaggacgtacaagcactcaaggagctgatattacataacccggttacccttaagttacaggagtcccagctgcctgggccagaccagttacagcagtttcaggtggtctgtgagactgaggaagacaaattcctcctgctgtatgccctgctcaagctgtcattgattcggggcaagtctctgctctttgtcaacactctagaacggagttaccggctacgcctgttcttggaacagttcagcatccccacctgtgtgctcaatggagagcttccactgcgctccaggtgccacatcatctcacagttcaaccaaggcttctacgactgtgtcatagcaactgatgctgaagtcctgggggccccagtcaagggcaagcgtcggggccgagggcccaaaggggacaaggcctctgatccggaagcaggtgtggcccggggcatagacttccaccatgtgtctgctgtgctcaactttgatcttcccccaacccctgaggcctacatccatcgagctggcaggacagcacgcgctaacaacccaggcatagtcttaacctttgtgcttcccacggagcagttccacttaggcaagattgaggagcttctcagtggagagaacaggggccccattctgctcccctaccagttccggatggaggagatcgagggcttccgctatcgctgcagggatgccatgcgctcagtgactaagcaggccattcgggaggcaagattgaaggagatcaaggaagagcttctgcattctgagaagcttaagacatactttgaagacaaccctagggacctccagctgctgcggcatgacctacctttgcaccccgcagtggtgaagccccacctgggccatgttcctgactacctggttcctcctgctctccgtggcctggtrcgccctcacaagaagcggaagaagctgtcttcctcttgtaggaaggccaagagagcaaagtcccagaacccactgcgcagcttcaagcacaaaggaaagaaattcagacccacagccaagccctcctgaggttgttgggcctctctggagctgagcacattgtggagcacaggcttacacccttcgtggacaggcgaggctytggtgcttactgcacagcctgaacagacagttctggggccggcagtgctgggccctttagctccttggcacttccaagctggcatcttgccccttgacaacagaataaaaattttagctgccccagtttgtgcctccagcatatgaaaaggactatttgaatccccaaaacatcaggagtcgggaaacttcggaagacagctgtgcctggctctgtggctgcatgcagtgcttcacttggccagcagaggtcagctgtgccgagctgccccagccatgagaagagaagcctgcccttgctggcaggtggctatggccggcccagagccttcctgcccagytcctgcagccctgctgcctgggatcaggctgggagatgggccttcctgaccgccagccttcctctccccgagcacacgcacatgtagattcggggggaagctgcctgctcttccttagaggagccggggcagctatctgctggtccctttctgaacaactgttgatgtgtgagctgtg

SEQ ID NO: 2078 - DNA, 3426 bp, Homo sapiens
cgcggccccgcggcggcggttgctgggtcccggccgggctgactccgcttctgggcggccgggcctccgcgagtaccgggtcgacttcggagtctgcgagcccagccaggggtgcccgcttcccacccctctccccgagcggcgtccccgtcggggtcgaacctcccccgcgacaggcgcccagccgcctgttcccccaggccttgcctgcggaccgccctgggaacggcgtctgggagccccgaggggctggcgggactcggggcccgggccatgcggcagccgcccccgcccctccgcgaccatccccggcccaagcgggagccgcagcggcgtttctgctcctcgctgcgccggcgaccccggacccggcacccgtgacccctcgcgctgcctgcggcctcgcgccgaggcctgccccgggagagaccgtccatgccgtccaaggcggagaatctgcggccctccgagccggccccgcagccgccggaagggaggacgctccaaggacagcttcccggcgctccgccggcccagcgcgcggggtccccacccgatgctccgggctccgagagccccgcgcttgcctgcagcactccggccacgcccagcggcgaggacccgccagcccgagcagcacccatcgccccgcggccccccgccaggcctcgactggagcgagccctgtccctggacgacaagggctggaggaggaggcgttttcgaggcagccaggaggacctggaagcccggaatgggaccagtccctccaggggctcagtgcagagcgagggccccggggcccccgcccacagctgctccccgccctgcctgagcacctccttgcaggaaatccccaagtcccgcggggtcctgagcagtgagagagggagcccgtcctcggggggtaaccctctctctggggtggccagcagctccccgaacctcccgcacagagacgccgccgtggcggggagctcgcccaggctgcccagcctgctgccccsgcgcccaccgcctgccctgagcctggacatsgcctccgactccctgaggacagcaaacaaggtmgactcggatcttgcagactacaagctccgcgcgcagccgctcctggtgcgggcccacagcagcctgggccccggccggccgcggagccccctggcctgcgacgactgttcccttcgctcggccaaatcctccttcagcctcctggcgcccatccgcagcaaggacgtccgcagcaggagttacctggagggcagcctcctggccagcggggccctgttgggggcggatgagctggcccgctacttcccagaccggaacgtggcactcttcgtggccacctggaacatgcagggccagaaggagctcccgcccagcctggacgagttcctgctcccrgccgaggcygactatgcccaggacctgtatgtcatcggggtccaggagggctgttctgacaggcgggagtgggagactcgtctgcaggagacgctgggcccgcactatgtgctgctgtcctcggcggcccacggcgtgctctacatgtcgctcttcatccgcagggacctcatctggttctgctcagaggtggagtgctccacggtgaccacacgcatcgtgtctcagatcaagaccaagggggccttgggcatcagcttcaccttttttggcacytccttcctcttcatcacgtcccacttcacctcaggygacgggaaggtggcggagcggctgctggactacaccaggactgtacaagccctggtcctgcccagaaatgtgccygacaccaacccctatcgctccagcgcagcggacgtcaccacccgcttcgatgaggtgttctggtttggagacttcaacttccgcctgagtggcgggcgcacagtcgtggacgccctcctgtgccagggcctggtggtggacgtgccggcgctgctgcagcatgaccagctcatccgggagatgcggaaagggtccatcttcaagggcttccaggagccggacatccacttcctcccatcatacaagtttgacatcgggaaggacacgtacgacagcacctccaagcagaggacgccctcatacacggaccgcgtcttgtacagaagccgccacaagggtgacatctgtcctgtgagctactcttcctgccccgggatcaagacgtccgaccaccgccctgtgtatggcctcttccgggtgaaagtgaggccrggkcgagacaacattccgttggcagctggcaaatttgatagagaactgtacttactaggaattaaaagacggatttcgaaggagattcagaggcagcaagcactacagagtcagaactccagcaccatctgctccgtttcttgaagtttgctgaacgaggactcacagctgcaacgtggggtgattgtattgatcaaaacccactgggaaggacaaagagtttgccgcctttcggggatccragggactgtggcgaccgtgcctctgtgccagcgtcccaggaaggaagccaaccctgagcgagcctgtcctctgtggcaggtccacacggtgtgggtgggcagggcttggacccccgtctccatggcaggtccatacagcatgggtggcagggtttggacccgcccagcagcaccacggaccccagccactctcgggggcagacgtcagaatccgttcctgagcagctccygtgccctgggggcagtcacagagccccccaacacccccgtgctctgcaccagcctctccctccacacccgaagcaggcgtccatctgtgtcctcctggcagcccctcaaacacacaccaccccatgtcacacgggtatccagagcaaggctggatctgggctaggtgacccctggggcctcagacctctgagtgggccccagagcccagctgaggaagccacacagcctccaggacgtggcacggttcccctccacttggctgcaagtcgcctgccatggggcgaggaggcctgcaccccagtataagggcctccccagctgagtaagaagctgcttcccctcctctcataggccaagcctattgtgtgaaaccrtctcatggtcttggtgacgtagaccatttttgaaaccgtctcatggtcttggtgacgtagaccgtttgcttctttaactccagccgcggaatgacattagtggaaccgggctrgggaactgctggaagttcaggatgccaccaccttgaacacctaggccagggatccccaccatgtcccgggtttctttcttcgagagtatagaaccgttcattcttgcttygtgtcccattccatctcttgaaaaaatgtagtctttgaatgtgtgaaaatctagggacattcaatctagtcttttaaattatttttccatatttatatttttaaataaatgcatatattgagtcttaaaa

SEQ ID NO: 2079 - DNA, 3403 bp, Homo sapiens
cgcggccccgcggcggcggttgctgggtcccggccgggctgactccgcttctgggcggccgggcctccgcgagtaccgggtcgacttcggagtctgcgagcccagccaggggtgcccgcttcccacccctctccccgagcggcgtccccgtcggggtcgaacctcccccgcgacaggcgcccagccgcctgttcccccaggccttgcctgcggaccgccctgggaacggcgtctgggagccccgaggggctggcgggactcggggcccgggccatgcggcagccgcccccgcccctccgcgaccatccccggcccaagcgggagccgcagcggcgtttctgctcctcgctgcgccggcgaccccggacccggcacccgtgacccctcgcgctgcctgcggcctcgcgccgaggcctgccccgggagagaccgtccatgccgtccaaggcggagaatctgcggccctccgagccggccccgcagccgccggaagggaggacgctccaaggacagcttcccggcgctccgccggcccagcgcgcggggtccccacccgatgctccgggctccgagagccccgcgcttgcctgcagcactccggccacgcccagcggcgaggacccgccagcccgagcagcacccatcgccccgcggccccccgccaggcctcgactggagcgagccctgtccctggacgacaagggctggaggaggaggcgttttcgaggcagccaggaggacctggaagcccggaatgggaccagtccctccaggggctcagtgcagagcgagggccccggggcccccgcccacagctgctccccgccctgcctgagcacctccttgcaggaaatccccaagtcccgcggggtcctgagcagtgagagagggagcccgtcctcggggggtaaccctctctctggggtggccagcagctccccgaacctcccgcacagagacgccgccgtggcggggagctcgcccaggctgcccagcctgctgccccsgcgcccaccgcctgccctgagcctggacatsgcctccgactccctgaggacagcaaacaaggtmgactcggatcttgcagactacaagctccgcgcgcagccgctcctggtgcgggcccacagcagcctgggccccggccggccgcggagccccctggcctgcgacgactgttcccttcgctcggccaaatcctccttcagcctcctggcgcccatccgcagcaaggacgtccgcagcaggagttacctggagggcagcctcctggccagcggggccctgttgggggcggatgagctggcccgctacttcccagaccggaacgtggcactcttcgtggccacctggaacatgcagggccagaaggagctcccgcccagcctggacgagttcctgctcccrgccgaggcygactatgcccaggacctgtatgtcatcggggtccaggagggctgttctgacagggacctcatctggttctgctcaggtgggcgcggctggaggggtgggcgcggcwggaaggtggcagcgtcccacaggtgagctgagggctgcccctcccacagaggtggagtgctccacggtgaccacacgcatcgtgtctcagatcaagaccaagggggccttgggcatcagcttcaccttttttggcacytccttcctcttcatcacgtcccacttcacctcaggygacgggaaggtggcggagcggctgctggactacaccaggactgtacaagccctggtcctgcccagaaatgtgccygacaccaacccctatcgctccagcgcagcggacgtcaccacccgcttcgatgaggtgttctggtttggagacttcaacttccgcctgagtggcgggcgcacagtcgtggacgccctcctgtgccagggcctggtggtggacgtgccggcgctgctgcagcatgaccagctcatccgggagatgcggaaagggtccatcttcaagggcttccaggagccggacatccacttcctcccatcatacaagtttgacatcgggaaggacacgtacgacagcacctccaagcagaggacgccctcatacacggaccgcgtcttgtacagaagccgccacaagggtgacatctgtcctgtgagctactcttcctgccccgggatcaagacgtccgaccaccgccctgtgtatggcctcttccgggtgaaagtgaggccrggkcgagacaacattccgttggcagctggcaaatttgatagagaactgtacttactaggaattaaaagacggatttcgaaggagattcagaggcagcaagcactacagagtcagaactccagcaccatctgctccgtttcttgaagtttgctgaacgaggactcacagctgcaacgtggggtgattgtattgatcaaaacccactgggaaggacaaagagtttgccgcctttcggggatccragggactgtggcgaccgtgcctctgtgccagcgtcccaggaaggaagccaaccctgagcgagcctgtcctctgtggcaggtccacacggtgtgggtgggcagggcttggacccccgtctccatggcaggtccatacagcatgggtggcagggtttggacccgcccagcagcaccacggaccccagccactctcgggggcagacgtcagaatccgttcctgagcagctccygtgccctgggggcagtcacagagccccccaacacccccgtgctctgcaccagcctctccctccacacccgaagcaggcgtccatctgtgtcctcctggcagcccctcaaacacacaccaccccatgtcacacgggtatccagagcaaggctggatctgggctaggtgacccctggggcctcagacctctgagtgggccccagagcccagctgaggaagccacacagcctccaggacgtggcacggttcccctccacttggctgcaagtcgcctgccatggggcgaggaggcctgcaccccagtataagggcctccccagctgagtaagaagctgcttcccctcctctcataggccaagcctattgtgtgaaaccrtctcatggtcttggtgacgtagaccatttttgaaaccgtctcatggtcttggtgacgtagaccgtttgcttctttaactccagccgcggaatgacattagtggaaccgggctrgggaactgctggaagttcaggatgccaccaccttgaacacctaggccagggatccccaccatgtcccgggtttctttcttcgagagtatagaaccgttcattcttgcttygtgtcccattccatctcttgaaaaaatgtagtctttgaatgtgtgaaaatctagggacattcaatctagtcttttaaattatttttccatatttatatttttaaataaatgcatatattgagtcttaaaa

SEQ ID NO: 2080 - DNA, 1953 bp, Homo sapiens
gagctccaggactgagatatttttactataccttctctatcatcttgcacccccaaaatagcttccagggcacttctatttgtttttgtggaaagactggcaattagaggtagaaaagtgaaataaatggaaatagtactactcagggctgtcacatctacatctgtgtttttgcagtgccaatttgcattttctgagtgagttacttctactcaccttcacarcagccagtaccgcagtgccttgcatatattatatcctcaatgagtacttgtcaattgattttgtacatgcgtgtgacagtataaatatattatgaaaaatgaggaggccaggcaataaaagagtcaggatttcttccaaaaaaaatacacagcggtggagcttggcataaagttcaaatgctcctacaccctgccctgcagtatctctaaccaggggactttgataaggaagctgaagggtgatattacctttgctccctcactgcaactgaacacatttcttagtttttaggtggcccccgctggctaacttgctgtggagttttcaagggcatagaatcgtcctttacacaattaaaagaagatrctgtttaatctgaggatcctgttaaacaatgcagcttttagaaatggtcacaacttcatggttcgaaattttcggtgtggacaaccactacaaaataaagtgcagctgaagggcyrtgaccttytcaytsyaaraawctytaccdgagaadawaktaaakataygctatggctatcagcagatctgaaatttaggataaaayagaaaggagagtatttgccttyattkcaagrgaagtccttaggcatgatttttgagaaaagaagtactcgaacaagattgtctacagaaacaggcttwgcacttctgggaggacatccttgttttcytaccacacaagatattcatttgggtgtgaatgaaagtctcacggacacggcccgtgtattgtctagcatggcagatgcagtattggctcgagtgtatwaacaatsagattksgacaccctggytaaakaakcatccatcccaaytakcrrtrggctgtsakatttgtascatcctatccagatcctgsctgdtyrcctcaygctccasgracwckrtagctctctgaaasgtcttaccctcagctggatcrgrkwtrrgaamartatcctgymctscatcrygaksagmrcagcgaaattcggaatgcaccttsaggcagctactscaaagggttatgagccggatgctagtgtaaccaagttggcagagcartatgccaaagagaatggtaycaagcwgttgctgacaaatgatccaytggaagcagcgcmtggaggcaatgtattaattamarrcryttkgatamgcayggrayragaagaggagaagaaaaagcggctccaggctttccaaggttaccaggttacaatgaakactgctaaagttgctgcctctgactggacatttttacasbrcttkcmcagaaagccagaakaagtggatgatgaagdctyttattytcctykatmactagtgttcccagaggcagaaaacagaaagtggacaatcatggctgtcatggtgtccctgctgacagattactcacctcagctccagaagcctaaatkttgatgttgtgttacttgtcaagaaagaagcaatgttcttcagtaacagaatgagttggtttatggggaaaagagaagagaatctaaaaaataaacaaatccctaacacgtggtatgggtgaaccgtatgatatgctttgccattgtgaaactttccttaagcctttaatttaagtgctgatgcactgtaatacgtgcttaactttgyttaaactctctaattcccaatttctgagttacatttagatatcatattaattatcatatacatttacttcaacataaaatactgtgttcataatgt

SEQ ID NO: 2081 - DNA, 1502 bp, Homo sapiens
atatgagaagtttatcctcaagaagacagcagtgggtatttkcrttaagaagtggcagtttttaggtggcccccgctggctaacttgctgtggagttttcaagggcatagaatcgtcctttacacaattaaaagaagatrctgtttaatctgaggatcctgttaaacaatgcagcttttagaaatggtcacaacttcatggttcgaaattttcggtgtggacaaccactacaaaataaagtgcagctgaagggcyrtgaccttytcaytsyaaraawctytaccdgagaadawaktaaakataygctatggctatcagcagatctgaaatttaggataaaayagaaaggagagtatttgccttyattkcaagrgaagtccttaggcatgatttttgagaaaagaagtactcgaacaagattgtctacagaaacaggcttwgcacttctgggaggacatccttgttttcytaccacacaagatattcatttgggtgtgaatgaaagtctcacggacacggcccgtgtattgtctagcatggcagatgcagtattggctcgagtgtatwaacaatsagattksgacaccctggytaaakaakcatccatcccaaytakcrrtrggctgtsakatttgtascatcctatccagatcctgsctgdtyrcctcaygctccasgracwckrtagctctctgaaasgtcttaccctcagctggatcrgrkwtrrgaamartatcctgymctscatcrygaksagmrcagcgaaattcggaatgcaccttsaggcagctactscaaagggttatgagccggatgctagtgtaaccaagttggcagagcartatgccaaagagaatggtaycaagcwgttgctgacaaatgatccaytggaagcagcgcmtggaggcaatgtattaattamarrcryttkgatamgcayggrayragaagaggagaagaaaaagcggctccaggctttccaaggttaccaggttacaatgaakactgctaaagttgctgcctctgactggacatttttacasbrcttkcmcagaaagccagaakaagtggatgatgaagdctyttattytcctykatmactagtgttcccagaggcagaaaacagaaagtggacaatcatggctgtcatggtgtccctgctgacagattactcacctcagctccagaagcctaaatkttgatgttgtgttacttgtcaagaaagaagcaatgttcttcagtaacagaatgagttggtttatggggaaaagagaagagaatctaaaaaataaacaaatccctaacacgtggtatgggtgaaccgtatgatatgctttgccattgtgaaactttccttaagcctttaatttaagtgctgatgcactgtaatacgtgcttaactttgyttaaactctctaattcccaatttctgagttacatttagatatcatattaattatcatatacatttacttcaacataaaatactgtgttcataatgt

SEQ ID NO: 2082 - DNA, 4405 bp, Homo sapiens
aaagagggcacccagcccttccccctccctcatcctcccatcccagtaaacyctgccaaattggaatcctggacttaatttaggagaaaggccctgtaaccaagatactgactgaacatggctggcggactcaggctggggtctgcagtgcagcattaatgggccgctgacatgaatatggagtagttttctctagcaaagagtaatgtgggccatggagtcaggccacctcctctgggctctgctgttcatgcagtccttgtggcctcaactgactgatggagccactcgagtctactacctgggcatccgggatgtgcagtggaactatgctcccaagggaagaaatgtcatcacgaaccagcctctggacagtgacatagtggcttccagcttcttaaagtctgacaagaaccggatagggggaacctacaagaagaccatctataaagaatacaaggatgactcatacacagatgaagtggcccagcctgcctggttgggcttcctggggccagtgttgcaggctgaagtgggggatgtcattcttattcacctgaagaattttgccactcgtccctataccatccaccctcatggtgtcttctacgagaaggactctgaaggttccctatacccagatggctcctctgggccactgaaagctgatgactctgttcccccggggggcagccatatctacaactggaccattccagaaggccatgcacccaccgatgctgacccagcgtgcctcacctggatctaccattctcatgtagatgctccacgagacattgcaactggcctaattgggcctctcatcacctgtaaaagaggagccctggatgggaactcccctcctcaacgccaggatgtagaccatgatttcttcctcctcttcagtgtggtagatgagaacctcagctggcatctcaatgagaacattgccacttactgctcagatcctgcttcagtggacaaagaagatgagacatttcaggagagcaataggatgcatgcaatcaatggctttgtttttgggaatttacctgagctgaacatgtgtgcacagaaacgtgtggcctggcacttgtttggcatgggcaatgaaattgatgtccacacagcatttttccatggacagatgctgactacccgtggacaccacactgatgtggctaacatctttccagccacctttgtgactgctgagatggtgccctgggaacctggtacctggttaattagctgccaagtgaacagtcactttcgagatggcatgcaggcactctacaaggtcaagtcttgctccatggcccctcctgtggacctgctcacaggcaaagttcgacagtacttcattgaggcccatgagattcaatgggactatggcccgatggggcatgatgggagtactgggaagaatttgagagagccaggcagtatctcagataagtttttccagaagagctccagccgaattgggggcacttactggaaagtgcgatatgaagcctttcaagatgagacattccaagagaagatgcatttggaggaagataggcatcttggaatcctggggccagtgatccgggctgaggtgggtgacaccattcaggtggtcttctacaaccgtgcctcccagccattcagcatgcagccccatggggtcttttatgagaaagactatgaaggcactgtgtacaatgatggctcatcttaccctggcttggttgccaagccctttgagaaagtaacataccgctggacagtcccccctcatgccggtcccactgctcaggatcctgcttgtctcacttggatgtacttctctgctgcagatcccataagagacacaaattctggcctggtgggcccgctgctggtgtgcagggctggtgccttgrgtgcasatggcaagcagaaaggggtggataaagaattctttcttctcttcactgtgttggatgagaacaagagctggtacagcaatrccaatcaagcagctgctatgttggatttccgactgctttcagaggatattgagggcttccaagactccaatcggatgcatgccattaatgggtttctgttctctaacctgcccaggctggacatgtgcaagggtgacacagtggcctggcacctgctcggcctgggcacagagactgatgtgcatggagtcatgttccagggcaacactgtgcagcttcagggcatgaggaagggtgcagctatgctctttcctcatacctttgtcatggccatcatgcagcctgacaaccttgggacatttgagmtttattgccaggcaggcagccatcgagaagcagggatgagggcaatctataatgtctcccagtgtcctggccaccaagccacccctcgccaacgctaccaagctgcaagaatctactatatcatggcagaagaagtagagtgggactattgccctgaccggagctgggaacgggaatggcacaaccagtctgagaaggacagttayrgttacattttcctgagcaacaaggatgggctcctgggttccagatacaagaaagctgtattcagggaatacactgatggtacrttcaggatccctcggccaaggactggaccagaagaacacttgggaatcttgggtccacttatcaaaggtgaagttggtgatatcctgactgtggtattcaagaataatgccagccgcccctactctgtgcatgctcatggagtgctagaatctactactgtctggccactggctgctgagcctggtgaggtggtcacttatcagtggaacatcccagagwggtctggccctgggcccartgactctgcttgtgtttcctggatctattattctgcagtggatcccatcaaggacatgtatagtggcctggtggggcccttggctatctgccaaaagggcatcctggagccccatggaggacggagtgacatggatcgggaatttgcattgttgttcttgatttttgatgaaaataagtcttggtatttggaggaaaatgtggcaacccatgggtcccaggatccaggcagtattaacctacaggatgaaactttcttggagagcaataaaatgcatgcaatcaatgggaaactctatgccaaccttaggggtcttaccatgtaccaaggagaacgagtggcctggtacatgctggccatgggccaagatgtggatctacacaccatccactttcatgcagagagcttcctctatcggaatggcgagaactaccgggcagatgtggtggatctgttcccagggacttttgaggttgtggagatggtggccagcaaccctgggacatggctgatgcactgccatgtgactgaccatgtccatgctggcatggagaccctcttcactgttttttctcgaacagaacacttaagccctctcaccgtcatcaccaaagagactgaaaaagcaktgccccccagagacattgaagaaggcaatgtgaagatgctgggcatgcagatccccataaagaatgttgagatgctggcctctgttttggttgccattagtgtcacccttctgctcgttgttctggctcttggtggagtggtttggtaccaacatcgacagagaaagctacgacgcaataggaggtccatcctggatgacagcttcaagcttctgtctttcaaacagtaacatctggagcctggagatatcctcaggaagcacatctgtagtgcactcccagcaggccatggactagtcactaaccccacactcaaaggggcatgggtggtggagaagcagaaggagcaatcaagcttatctggatatttctttctttatttattttacatggaaataatatgatttcactttttctttagtttctttgctctacgtgggcacctggcactaagggagtaccttattatcctacatcgcaaatttcaacagctacattatatttccttctgacacttggaaggtattgaaatttctagaaatgtatccttctcacaaagtagagaccaagagaaaaactcattgattgggtttctacttctttcaaggactcaggaaatttcactttgaactgaggccaagtgagctgttaagataacccacacttaaactaaaggctaagaatataggcttgatgggaaattgaaggtaggctgagtattgggaatccaaattgaattttgattctccttggcagtgaactactttgaagaagtggtcaatgggttgttgctgccatgagcatgtacaacctctggagctagaagctcctcaggaaagccagttytccaagttyttaacctgtggcactgaaaggaatgttgagttacctcttcatgttttagacagcaaaccctatccattaaagtacttgttagaacactg

SEQ ID NO: 2083 - DNA, 4192 bp, Homo sapiens
ggaaaagagggcacccagcccttccccctccctcatcctcccatcccagtaaacyctgccaaattggaatcctggacttaatttaggagaaaggccctgtaaccaagatactgactgaacatggctggcggactcaggctggggtctgcagtgcagcattaatgggccgctgacatgaatatggagtagttttctctagcaaagagtggcttccagcttcttaaagtctgacaagaaccggatagggggaacctacaagaagaccatctataaagaatacaaggatgactcatacacagatgaagtggcccagcctgcctggttgggcttcctggggccagtgttgcaggctgaagtgggggatgtcattcttattcacctgaagaattttgccactcgtccctataccatccaccctcatggtgtcttctacgagaaggactctgaaggttccctatacccagatggctcctctgggccactgaaagctgatgactctgttcccccggggggcagccatatctacaactggaccattccagaaggccatgcacccaccgatgctgacccagcgtgcctcacctggatctaccattctcatgtagatgctccacgagacattgcaactggcctaattgggcctctcatcacctgtaaaagaggtacagaccatgatttcttcctcctcttcagtgtggtagatgagaacctcagctggcatctcaatgagaacattgccacttactgctcagatcctgcttcagtggacaaagaagatgagacatttcaggagagcaataggatgcatgcaatcaatggctttgtttttgggaatttacctgagctgaacatgtgtgcacagaaacgtgtggcctggcacttgtttggcatgggcaatgaaattgatgtccacacagcatttttccatggacagatgctgactacccgtggacaccacactgatgtggctaacatctttccagccacctttgtgactgctgagatggtgccctgggaacctggtacctggttaattagctgccaagtgaacagtcactttcgagatggcatgcaggcactctacaaggtcaagtcttgctccatggcccctcctgtggacctgctcacaggcaaagttcgacagtacttcattgaggcccatgagattcaatgggactatggcccgatggggcatgatgggagtactgggaagaatttgagagagccaggcagtatctcagataagtttttccagaagagctccagccgaattgggggcacttactggaaagtgcgatatgaagcctttcaagatgagacattccaagagaagatgcatttggaggaagataggcatcttggaatcctggggccagtgatccgggctgaggtgggtgacaccattcaggtggtcttctacaaccgtgcctcccagccattcagcatgcagccccatggggtcttttatgagaaagactatgaaggcactgtgtacaatgatggctcatcttaccctggcttggttgccaagccctttgagaaagtaacataccgctggacagtcccccctcatgccggtcccactgctcaggatcctgcttgtctcacttggatgtacttctctgctgcagatcccataagagacacaaattctggcctggtgggcccgctgctggtgtgcagggctggtgccttgrgtgcasatggcaagcagaaaggggtggataaagaattctttcttctcttcactgtgttggatgagaacaagagctggtacagcaatrccaatcaagcagctgctatgttggatttccgactgctttcagaggatattgagggcttccaagactccaatcggatgcatgccattaatgggtttctgttctctaacctgcccaggctggacatgtgcaagggtgacacagtggcctggcacctgctcggcctgggcacagagactgatgtgcatggagtcatgttccagggcaacactgtgcagcttcagggcatgaggaagggtgcagctatgctctttcctcatacctttgtcatggccatcatgcagcctgacaaccttgggacatttgagmtttattgccaggcaggcagccatcgagaagcagggatgagggcaatctataatgtctcccagtgtcctggccaccaagccacccctcgccaacgctaccaagctgcaagaatctactatatcatggcagaagaagtagagtgggactattgccctgaccggagctgggaacgggaatggcacaaccagtctgagaaggacagttayrgttacattttcctgagcaacaaggatgggctcctgggttccagatacaagaaagctgtattcagggaatacactgatggtacrttcaggatccctcggccaaggactggaccagaagaacacttgggaatcttgggtccacttatcaaaggtgaagttggtgatatcctgactgtggtattcaagaataatgccagccgcccctactctgtgcatgctcatggagtgctagaatctactactgtctggccactggctgctgagcctggtgaggtggtcacttatcagtggaacatcccagagwggtctggccctgggcccartgactctgcttgtgtttcctggatctattattctgcagtggatcccatcaaggacatgtatagtggcctggtggggcccttggctatctgccaaaagggcatcctggagccccatggaggacggagtgacatggatcgggaatttgcattgttgttcttgatttttgatgaaaataagtcttggtatttggaggaaaatgtggcaacccatgggtcccaggatccaggcagtattaacctacaggatgaaactttcttggagagcaataaaatgcatgcaatcaatgggaaactctatgccaaccttaggggtcttaccatgtaccaaggagaacgagtggcctggtacatgctggccatgggccaagatgtggatctacacaccatccactttcatgcagagagcttcctctatcggaatggcgagaactaccgggcagatgtggtggatctgttcccagggacttttgaggttgtggagatggtggccagcaaccctgggacatggctgatgcactgccatgtgactgaccatgtccatgctggcatggagaccctcttcactgttttttctcgaacagaacacttaagccctctcaccgtcatcaccaaagagactgaaaaagcaktgccccccagagacattgaagaaggcaatgtgaagatgctgggcatgcagatccccataaagaatgttgagatgctggcctctgttttggttgccattagtgtcacccttctgctcgttgttctggctcttggtggagtggtttggtaccaacatcgacagagaaagctacgacgcaataggaggtccatcctggatgacagcttcaagcttctgtctttcaaacagtaacatctggagcctggagatatcctcaggaagcacatctgtagtgcactcccagcaggccatggactagtcactaaccccacactcaaaggggcatgggtggtggagaagcagaaggagcaatcaagcttatctggatatttctttctttatttattttacatggaaataatatgatttcactttttctttagtttctttgctctacgtgggcacctggcactaagggagtaccttattatcctacatcgcaaatttcaacagctacattatatttccttctgacacttggaaggtattgaaatttctagaaatgtatccttctcacaaagtagagaccaagagaaaaactcattgattgggtttctacttctttcaaggactcaggaaatttcactttgaactgaggccaagtgagctgttaagataacccacacttaaactaaaggctaagaatataggcttgatgggaaattgaaggtaggctgagtattgggaatccaaattgaattttgattctccttggcagtgaactactttgaagaagtggtcaatgggttgttgctgccatgagcatgtacaacctctggagctagaagctcctcaggaaagccagttytccaagttyttaacctgtggcactgaaaggaatgttgagttacctcttcatgttttagacagcaaaccctatccattaaagtacttgttagaacactg

SEQ ID NO: 2084 - DNA, 4228 bp, Homo sapiens
ggaaaagagggcacccagcccttccccctccctcatcctcccatcccagtaaacyctgccaaattggaatcctggacttaatttaggagaaaggccctgtaaccaagatactgactgaacatggctggcggactcaggctggggtctgcagtgcagcattaatgggccgctgacatgaatatggagtagttttctctagcaaagagtggcttccagcttcttaaagtctgacaagaaccggatagggggaacctacaagaagaccatctataaagaatacaaggatgactcatacacagatgaagtggcccagcctgcctggttgggcttcctggggccagtgttgcaggctgaagtgggggatgtcattcttattcacctgaagaattttgccactcgtccctataccatccaccctcatggtgtcttctacgagaaggactctgaaggttccctatacccagatggctcctctgggccactgaaagctgatgactctgttcccccggggggcagccatatctacaactggaccattccagaaggccatgcacccaccgatgctgacccagcgtgcctcacctggatctaccattctcatgtagatgctccacgagacattgcaactggcctaattgggcctctcatcacctgtaaaagaggagccctggatgggaactcccctcctcaacgccaggatgtagaccatgatttcttcctcctcttcagtgtggtagatgagaacctcagctggcatctcaatgagaacattgccacttactgctcagatcctgcttcagtggacaaagaagatgagacatttcaggagagcaataggatgcatgcaatcaatggctttgtttttgggaatttacctgagctgaacatgtgtgcacagaaacgtgtggcctggcacttgtttggcatgggcaatgaaattgatgtccacacagcatttttccatggacagatgctgactacccgtggacaccacactgatgtggctaacatctttccagccacctttgtgactgctgagatggtgccctgggaacctggtacctggttaattagctgccaagtgaacagtcactttcgagatggcatgcaggcactctacaaggtcaagtcttgctccatggcccctcctgtggacctgctcacaggcaaagttcgacagtacttcattgaggcccatgagattcaatgggactatggcccgatggggcatgatgggagtactgggaagaatttgagagagccaggcagtatctcagataagtttttccagaagagctccagccgaattgggggcacttactggaaagtgcgatatgaagcctttcaagatgagacattccaagagaagatgcatttggaggaagataggcatcttggaatcctggggccagtgatccgggctgaggtgggtgacaccattcaggtggtcttctacaaccgtgcctcccagccattcagcatgcagccccatggggtcttttatgagaaagactatgaaggcactgtgtacaatgatggctcatcttaccctggcttggttgccaagccctttgagaaagtaacataccgctggacagtcccccctcatgccggtcccactgctcaggatcctgcttgtctcacttggatgtacttctctgctgcagatcccataagagacacaaattctggcctggtgggcccgctgctggtgtgcagggctggtgccttgrgtgcasatggcaagcagaaaggggtggataaagaattctttcttctcttcactgtgttggatgagaacaagagctggtacagcaatrccaatcaagcagctgctatgttggatttccgactgctttcagaggatattgagggcttccaagactccaatcggatgcatgccattaatgggtttctgttctctaacctgcccaggctggacatgtgcaagggtgacacagtggcctggcacctgctcggcctgggcacagagactgatgtgcatggagtcatgttccagggcaacactgtgcagcttcagggcatgaggaagggtgcagctatgctctttcctcatacctttgtcatggccatcatgcagcctgacaaccttgggacatttgagmtttattgccaggcaggcagccatcgagaagcagggatgagggcaatctataatgtctcccagtgtcctggccaccaagccacccctcgccaacgctaccaagctgcaagaatctactatatcatggcagaagaagtagagtgggactattgccctgaccggagctgggaacgggaatggcacaaccagtctgagaaggacagttayrgttacattttcctgagcaacaaggatgggctcctgggttccagatacaagaaagctgtattcagggaatacactgatggtacrttcaggatccctcggccaaggactggaccagaagaacacttgggaatcttgggtccacttatcaaaggtgaagttggtgatatcctgactgtggtattcaagaataatgccagccgcccctactctgtgcatgctcatggagtgctagaatctactactgtctggccactggctgctgagcctggtgaggtggtcacttatcagtggaacatcccagagwggtctggccctgggcccartgactctgcttgtgtttcctggatctattattctgcagtggatcccatcaaggacatgtatagtggcctggtggggcccttggctatctgccaaaagggcatcctggagccccatggaggacggagtgacatggatcgggaatttgcattgttgttcttgatttttgatgaaaataagtcttggtatttggaggaaaatgtggcaacccatgggtcccaggatccaggcagtattaacctacaggatgaaactttcttggagagcaataaaatgcatgcaatcaatgggaaactctatgccaaccttaggggtcttaccatgtaccaaggagaacgagtggcctggtacatgctggccatgggccaagatgtggatctacacaccatccactttcatgcagagagcttcctctatcggaatggcgagaactaccgggcagatgtggtggatctgttcccagggacttttgaggttgtggagatggtggccagcaaccctgggacatggctgatgcactgccatgtgactgaccatgtccatgctggcatggagaccctcttcactgttttttctcgaacagaacacttaagccctctcaccgtcatcaccaaagagactgaaaaagcaktgccccccagagacattgaagaaggcaatgtgaagatgctgggcatgcagatccccataaagaatgttgagatgctggcctctgttttggttgccattagtgtcacccttctgctcgttgttctggctcttggtggagtggtttggtaccaacatcgacagagaaagctacgacgcaataggaggtccatcctggatgacagcttcaagcttctgtctttcaaacagtaacatctggagcctggagatatcctcaggaagcacatctgtagtgcactcccagcaggccatggactagtcactaaccccacactcaaaggggcatgggtggtggagaagcagaaggagcaatcaagcttatctggatatttctttctttatttattttacatggaaataatatgatttcactttttctttagtttctttgctctacgtgggcacctggcactaagggagtaccttattatcctacatcgcaaatttcaacagctacattatatttccttctgacacttggaaggtattgaaatttctagaaatgtatccttctcacaaagtagagaccaagagaaaaactcattgattgggtttctacttctttcaaggactcaggaaatttcactttgaactgaggccaagtgagctgttaagataacccacacttaaactaaaggctaagaatataggcttgatgggaaattgaaggtaggctgagtattgggaatccaaattgaattttgattctccttggcagtgaactactttgaagaagtggtcaatgggttgttgctgccatgagcatgtacaacctctggagctagaagctcctcaggaaagccagttytccaagttyttaacctgtggcactgaaaggaatgttgagttacctcttcatgttttagacagcaaaccctatccattaaagtacttgttagaacactg

SEQ ID NO: 2085 - DNA, 527 bp, Homo sapiens
attgtgggccgtccgcgcgcccgtcccgtcgccgccgccgccgccgcagacccctcggtcttgctatgtcgagctcacccgtgaagcgtcagaggatggagtccgcgctggaccagctcaagcagttcaccaccgtggtggccgacacgggcgacttccacgccatcgacgagtacaagccccaggatgctaccaccaacccgtccctgatcctggccgcagcacagatgccygcttaccaggagctggtggaggaggcgattgcctatggccggaagctgggcgggtcacaagaggaccagattaaaaatgctattgataaactttttgtgttgtttggagcagaaatactaaagaagattccgggccgagtatccacagaagtagacgcaaggctctcctttgataaagatgcgatggtggccagagccaggcggctcatcgagctctacaaggaagctgggatcagcaaggaccgaattcttataaagctgtcatcaacctgggaaggaattcaggctggaaag

SEQ ID NO: 2086 - DNA, 3128 bp, Homo sapiens
gggaaagagggtccgccatgttccccggcggcgccgccgcttggctctggtagccgccgcccccgcccccaaccccgcccggcccagagcctagccgagccccgggcccagcatggccgccccggagccggcccgggctgcaccgcccccacccccgcccccgccgccccctcccggggctgaccgcgtcgtcaaagctgtccctttccccccaacacatcgcttgacatctgaagaagtatttgatttggatgggatacccagggttgatgttctgaagaaccacttggtgaaagaaggtcgagtagatgaagaaattgcgcttagaattatcaatgagggtgctgccatccttcggagagagaaaaccatgatagaagtagaagctccaatcacagtgtgtggtgacatccatggccaattttttgatctgatgaaactttttgaagtaggaggatcacctgctaatacacgatacctttttcttggcgattatgtggacagaggttattttagtatagagtgtgtcttatatttatgggttctgaagattctatacccaagcacattatttcttctgagaggcaaccatgaatgcagacaccttactgaatattttacctttaagcaggaatgtaaaattaagtattcggaaagagtctatgaagcttgtatggaagcttttgatagtttgcctcttgctgcacttttaaaccaacagtttctttgtgttcatggtggactttcaccagaaatacacacactggatgatattaggagattagatagattcaaagagccacctgcatttggaccaatgtgtgacttgttatggtccgatccttctgaagattttggaaatgaaaaatcacaggaacattttagtcacaatacagttcgaggatgttcttatttttataactatccagcagtgtgtgaatttttgcaaaacaataatttgttatcgattattagagctcatgaagctcaagatgcaggctatagaatgtacagaaaaagtcaaactacagggttcccttcattaataacaattttttcggcacctaattacttagatgtctacaataataaagctgctgtattaaagtatgaaaataatgtgatgaatattcgacagtttaactgttctccacatccttactggttgcctaattttatggatgtcttcacgtggtctttaccgtttgttggagaaaaagtgacagaaatgttggtaaatgttctgagtatttgctctgatgatgaactaatgactgaaggtgaagaccagtttgatgtaggttcagctgcagcccggaaagaaatcataagaaacaaaattcgagcaattggcaagatggcaagagtcttctctgttctcagggaggagagtgaaagtgtgctgacactcaagggcctgactcccacagggatgttgcctagtggagtgttagctggaggacggcagaccctgcaaagtgccacagttgaggctattgaggctgaaaaagcaatacgaggattctctccaccacatagaatctgcagttttgaagaggcaaagggtttggataggatcaatgagagaatgccacctcggaaagatgctgtacagcaagatggtttcaattctctgaacaccgcacatgccactgagaaccacgggacgggcaaccatactgcccagtgacccactacttcccagggactctcacatctcgggccccaaatggacagatcacccgaggagctggaggggtcggccaagctgactgtaaatttcacagtctctctgaagaaaccattgtgcttctgagaccctagcccccttcctggatggaggcttgagggccctgggacatgtgctatctgataagattgggtcrtcgctgccaaggtggagagcagtgagcaaggggcttggggcaatttccagtggagggcatccacacctccattttatgcttgtggttcacacatttaagtttacaaatcagatttcttttccccttcagtagaattagattttgtttttcaatcatgatttcaaatgcaatcctaagagctaatgtggacttttctttttccatgaaatgtctttaaaggatgaattagcatggtcttaaaatacatttctgaggttactagctgtattttgaattgtgagcaaaatgccgagaaacccagttggcatttatacaaaatgttgacctcaggtctatagttcttaaatgtggctaattctgtaacatagtcttggtattttttaattatgaatgcatatcctatttccaggcaggctctcttacttgaacacaaatccaaaaactaatttagagtcttttttgcccagatcttttaagacttacaccccagagatttaagaagaaaacctctaaatttcaaaattatgaagaattacagaattactcatttaaggtactttaaaagaagtttgtacattgtcaaagtaaattttaattcaaatcatgtctgtaaaacttgacgtattttgtgtatgcatgttttcattttgcaaatatttaatatatagacctatgatgtacaggtacgacatgtataggttacctagatgttatgagaaattttagtttattgtgagtactcaagttgcttaragagccaccagggtgatttgctgctggctttctatcatttttatgttttaatgcaaaggaaattttaaaatgttctggaagtgtttttgattaagcaatgcagcctagaagcaatggttctgttcaatcattcagatgttagtggaagcataaaagtcaagactgcatgttgaaacctttcttttgatagttactgaactgcttggttaaactaaatggaaccatgtgctaatttttcacaattattgacctgtattgattgccactgtagtttggtatttccctttactttggtggcctgcttccctcatgccctggaatacaactcagagctccaggcagcggaaccatctattgttttgtttgccagaaagtgcaccctgtatggtctcctgtctaagttggaaatattatgcatgtgcaggactattcgagtattttataaacagtagcacacaataaattccatgcatgggccgctgctcctat

SEQ ID NO: 2087 - DNA, 3125 bp, Homo sapiens
gggaaagagggtccgccatgttccccggcggcgccgccgcttggctctggtagccgccgcccccgcccccaaccccgcccggcccagagcctagccgagccccgggcccagcatggccgccccggagccggcccgggctgcaccgcccccacccccgcccccgccgccccctcccggggctgaccgcgtcgtcaaagctgtccctttccccccaacacatcgcttgacatctgaagaagtatttgatttggatgggatacccagggttgatgttctgaagaaccacttggtgaaagaaggtcgagtagatgaagaaattgcgcttagaattatcaatgagggtgctgccatccttcggagagagaaaaccatgatagaagtagaagctccaatcacagtgtgtggtgacatccatggccaattttttgatctgatgaaactttttgaagtaggaggatcacctgctaatacacgatacctttttcttggcgattatgtggacagaggttattttagtatagagtgtgtcttatatttatgggttctgaagattctatacccaagcacattatttcttctgagaggcaaccatgaatgcagacaccttactgaatattttacctttaagcaggaatgtaaaattaagtattcggaaagagtctatgaagcttgtatggaagcttttgatagtttgcctcttgctgcacttttaaaccaacagtttctttgtgttcatggtggactttcaccagaaatacacacactggatgatattaggagattagatagattcaaagagccacctgcatttggaccaatgtgtgacttgttatggtccgatccttctgaagattttggaaatgaaaaatcacaggaacattttagtcacaatacagttcgaggatgttcttatttttataactatccagcagtgtgtgaatttttgcaaaacaataatttgttatcgattattagagctcatgaagctcaagatgcaggctatagaatgtacagaaaaagtcaaactacagggttcccttcattaataacaattttttcggcacctaattacttagatgtctacaataataaagctgctgtattaaagtatgaaaataatgtgatgaatattcgacagtttaactgttctccacatccttactggttgcctaattttatggatgtcttcacgtggtctttaccgtttgttggagaaaaagtgacagaaatgttggtaaatgttctgagtatttgctctgatgatgaactaatgactgaaggtgaagaccagtttgatggttcagctgcagcccggaaagaaatcataagaaacaaaattcgagcaattggcaagatggcaagagtcttctctgttctcagggaggagagtgaaagtgtgctgacactcaagggcctgactcccacagggatgttgcctagtggagtgttagctggaggacggcagaccctgcaaagtgccacagttgaggctattgaggctgaaaaagcaatacgaggattctctccaccacatagaatctgcagttttgaagaggcaaagggtttggataggatcaatgagagaatgccacctcggaaagatgctgtacagcaagatggtttcaattctctgaacaccgcacatgccactgagaaccacgggacgggcaaccatactgcccagtgacccactacttcccagggactctcacatctcgggccccaaatggacagatcacccgaggagctggaggggtcggccaagctgactgtaaatttcacagtctctctgaagaaaccattgtgcttctgagaccctagcccccttcctggatggaggcttgagggccctgggacatgtgctatctgataagattgggtcrtcgctgccaaggtggagagcagtgagcaaggggcttggggcaatttccagtggagggcatccacacctccattttatgcttgtggttcacacatttaagtttacaaatcagatttcttttccccttcagtagaattagattttgtttttcaatcatgatttcaaatgcaatcctaagagctaatgtggacttttctttttccatgaaatgtctttaaaggatgaattagcatggtcttaaaatacatttctgaggttactagctgtattttgaattgtgagcaaaatgccgagaaacccagttggcatttatacaaaatgttgacctcaggtctatagttcttaaatgtggctaattctgtaacatagtcttggtattttttaattatgaatgcatatcctatttccaggcaggctctcttacttgaacacaaatccaaaaactaatttagagtcttttttgcccagatcttttaagacttacaccccagagatttaagaagaaaacctctaaatttcaaaattatgaagaattacagaattactcatttaaggtactttaaaagaagtttgtacattgtcaaagtaaattttaattcaaatcatgtctgtaaaacttgacgtattttgtgtatgcatgttttcattttgcaaatatttaatatatagacctatgatgtacaggtacgacatgtataggttacctagatgttatgagaaattttagtttattgtgagtactcaagttgcttaragagccaccagggtgatttgctgctggctttctatcatttttatgttttaatgcaaaggaaattttaaaatgttctggaagtgtttttgattaagcaatgcagcctagaagcaatggttctgttcaatcattcagatgttagtggaagcataaaagtcaagactgcatgttgaaacctttcttttgatagttactgaactgcttggttaaactaaatggaaccatgtgctaatttttcacaattattgacctgtattgattgccactgtagtttggtatttccctttactttggtggcctgcttccctcatgccctggaatacaactcagagctccaggcagcggaaccatctattgttttgtttgccagaaagtgcaccctgtatggtctcctgtctaagttggaaatattatgcatgtgcaggactattcgagtattttataaacagtagcacacaataaattccatgcatgggccgctgctcctat

SEQ ID NO: 2088 - DNA, 2609 bp, Homo sapiens
cgcgaaaggccggcctggctgcgacagcctgggttgccggcgcccgcccgcccgctggcctcgcggtgtgagagggaagcacccgtgcctgtggctggtggctggcgcctggagggtccgcacacccgcccggccgcgccgcttgcccgcggcagccgcgtccctgaaccgcggagtcgtgtttgtgtttgacccgcgggcgccggtggcgcgcggccgaggccggtgtcggcggggcggggcggtcgcggcggaggcagaggaagagggagcgggagctctgcgaggccgggcgccgccatggaactgggcccggagcccccgcaccgccgccgcctgctcttcgcctgcagcccccctcccgcgtcgcagcccgtcgtgaaggcgctatttggcgcttcagccgccgggggactgtcgcctgtcaccaacctgaccgtcactatggaccagctgcagggtctgggcagtgattatgagcaaccactggaggtgaagaacaacagtaatctgcagagaatgggctcytccgagtcaacagattcaggtttctgtctagattctcctgggccattggacagtaaagaaaaccttgaaaatcctatgagaagaatacattccctacctcagaagctgttgggatgtagtccagctctgaagaggagccattctgattctcttgaccatgacatctttcagctcatcgacccagatgagaacaaggaaaatctttcctcaaatgaaagagatagcagtgaaccagggaatttcattcctctttttacaccccagtcacctgtgacagccactttgtctgatgaggatgatggcttcgtggaccttctcgatggagagaatctgaagaatgaggaggagaccccctcgtgcatggcaagcctctggacagctcctctcgtcatgagaactacaaaccttgacaaccgatgcaagctgtttgactccccttccctgtgtagctccagcactcggtcagtgttgaagagaccagaacgatctcaagaggagtctccacctggaagtacaaagaggaggaagagcatgtctggggccagccccaaagagtcaactaatccagagaaggcccatgagactcttcatcagtctttatccctggcatcttcccccaaaggaaccattgagaacattttggacaatgacccaagggaccttataggagacttctccaagggttatctctttcatacagttgctgggaaacatcaggatttaaaatacatctctccagaaattatggcatctgttttgaatggcaagtttgccaacctcattaaagagtttgttatcatcgactgtcgatacccatatgaatacgagggaggccacatcaagggtgcagtgaacttgcacatggaagaagaggttgaagacttcttattgaagaagcccattgtacctactgatggcaagcgtgtcattgttgtgtttcactgcgagttttcttctgagagaggtccccgcatgtgccggtatgtgagagagagagatcgcctgggtaatgaataccccaaactccactaccctgagctgtatgtcctgaaggggggatacaaggagttctttatgaaatgccagtcttactgtgagccccctagctaccggcccatgcaccacgaggactttaaagaagacctgaagaagttccgcaccaagagccggacctgggcaggggagaagagcaagagggagatgtacagtcgtctgaagaagctctgagggcggcaggaccagccagcagcagcccaagcttccctccatccccctttaccctctttsctgcagagaaacttaagcaaaggggacagctgtgtgacatttggagagggggcctgggacttccatgccttaaacctactccagccatctcatgaggggagaggagacggaggggagtagagaagttacacagaaatgctgctggccaaatagcaaagacaacctgggaaggaaaggtctttgtgggataatccatatgtttaatttattcaacttcatcaatcactttattttatttttttttctaactcctggagacttattttactgcttcattaggttgaaatactgccattctaggtagggttttattatcccagggactacctcggcttttaatttaaaaaaaaaaaagaagtgggtaagaaaatgcaaacctgttataagttatcggacagaaagctaggtgctctgtcacccccaggaggcgctgtggtactggggctgctgctatttaagccaagaactgaggtcctggtgagagcgttggacccaggcttggctgcctgacataagctaaatctcccagacccaccactggctaccgatatctatttggtgggaggtgtggccctgttcttcctcaccccagttccatgacattggctggtataggagccacagtcaggaaagcacttgaggcagcatctgttgggccacccccggctcagtgctggaatgttgcagtgtaggtttcccagggaaggggggtgggggtaggtgggctccacaggatgggggaggagcatgtccactgagtatcttccttatgttgctgtgatattgatagcttt

SEQ ID NO: 2089 - DNA, 2729 bp, Homo sapiens
cgcgaaaggccggcctggctgcgacagcctgggttgccggcgcccgcccgcccgctggcctcgcggtgtgagagggaagcacccgtgcctgtggctggtggctggcgcctggagggtccgcacacccgcccggccgcgccgcttgcccgcggcagccgcgtccctgaaccgcggagtcgtgtttgtgtttgacccgcgggcgccggtggcgcgcggccgaggccggtgtcggcggggcggggcggtcgcggcggaggcagaggaagagggagcgggagctctgcgaggccgggcgccgccatggaactgggcccggagcccccgcaccgccgccgcctgctcttcgcctgcagcccccctcccgcgtcgcagcccgtcgtgaaggcgctatttggcgcttcagccgccgggggactgtcgcctgtcaccaacctgaccgtcactatggaccagctgcagggtctgggcagtgattatgagcaaccactggaggtgaagaacaacagtaatctgcagagaatgggctcytccgagtcaacagattcaggtttctgtctagattctcctgggccattggacagtaaagaaaaccttgaaaatcctatgagaagaatacattccctacctcagaagctgttgggatgtagtccagctctgaagaggagccattctgattctcttgaccatgacatctttcagctcatcgacccagatgagaacaaggaaaatgaagcctttgagtttaagaagccagtaagacctgtatctcgtggctgcctgcactctcatggactccaggagggtaaagatctcttcacacagaggcagaactctgccccagctcggatgctttcctcaaatgaaagagatagcagtgaaccagggaatttcattcctctttttacaccccagtcacctgtgacagccactttgtctgatgaggatgatggcttcgtggaccttctcgatggagagaatctgaagaatgaggaggagaccccctcgtgcatggcaagcctctggacagctcctctcgtcatgagaactacaaaccttgacaaccgatgcaagctgtttgactccccttccctgtgtagctccagcactcggtcagtgttgaagagaccagaacgatctcaagaggagtctccacctggaagtacaaagaggaggaagagcatgtctggggccagccccaaagagtcaactaatccagagaaggcccatgagactcttcatcagtctttatccctggcatcttcccccaaaggaaccattgagaacattttggacaatgacccaagggaccttataggagacttctccaagggttatctctttcatacagttgctgggaaacatcaggatttaaaatacatctctccagaaattatggcatctgttttgaatggcaagtttgccaacctcattaaagagtttgttatcatcgactgtcgatacccatatgaatacgagggaggccacatcaagggtgcagtgaacttgcacatggaagaagaggttgaagacttcttattgaagaagcccattgtacctactgatggcaagcgtgtcattgttgtgtttcactgcgagttttcttctgagagaggtccccgcatgtgccggtatgtgagagagagagatcgcctgggtaatgaataccccaaactccactaccctgagctgtatgtcctgaaggggggatacaaggagttctttatgaaatgccagtcttactgtgagccccctagctaccggcccatgcaccacgaggactttaaagaagacctgaagaagttccgcaccaagagccggacctgggcaggggagaagagcaagagggagatgtacagtcgtctgaagaagctctgagggcggcaggaccagccagcagcagcccaagcttccctccatccccctttaccctctttsctgcagagaaacttaagcaaaggggacagctgtgtgacatttggagagggggcctgggacttccatgccttaaacctactccagccatctcatgaggggagaggagacggaggggagtagagaagttacacagaaatgctgctggccaaatagcaaagacaacctgggaaggaaaggtctttgtgggataatccatatgtttaatttattcaacttcatcaatcactttattttatttttttttctaactcctggagacttattttactgcttcattaggttgaaatactgccattctaggtagggttttattatcccagggactacctcggcttttaatttaaaaaaaaaaaagaagtgggtaagaaaatgcaaacctgttataagttatcggacagaaagctaggtgctctgtcacccccaggaggcgctgtggtactggggctgctgctatttaagccaagaactgaggtcctggtgagagcgttggacccaggcttggctgcctgacataagctaaatctcccagacccaccactggctaccgatatctatttggtgggaggtgtggccctgttcttcctcaccccagttccatgacattggctggtataggagccacagtcaggaaagcacttgaggcagcatctgttgggccacccccggctcagtgctggaatgttgcagtgtaggtttcccagggaaggggggtgggggtaggtgggctccacaggatgggggaggagcatgtccactgagtatcttccttatgttgctgtgatattgatagcttt

SEQ ID NO: 2090 - DNA, 3794 bp, Homo sapiens
cgaaaggccggcctggctgcgacagcctgggtaagaggtgtaggtcggcttggttttctgctacccggagctgggcaagcgggtgggagaacagcgaagacagcgtgagcctgggccgttgcctcgaggctctcgcccggcttctcttgccgacccgccacgtttgtttggatttaatcttcaggttgccggcgcccgcccgcccgctggcctcgcggtgtgagagggaagcacccgtgcctgtggctggtggctggcgcctggagggtccgcacacccgcccggccgcgccgcttgcccgcggcagccgcgtccctgaaccgcggagtcgtgtttgtgtttgacccgcgggcgccggtggcgcgcggccgaggccggtgtcggcggggcggggcggtcgcggcggaggcagaggaagagggagcgggagctctgcgaggccgggcgccgccatggaactgggcccggagcccccgcaccgccgccgcctgctcttcgcctgcagcccccctcccgcgtcgcagcccgtcgtgaaggcgctatttggcgcttcagccgccgggggactgtcgcctgtcaccaacctgaccgtcactatggaccagctgcagggtctgggcagtgattatgagcaaccactggaggtgaagaacaacagtaatctgcagagaatgggctcytccgagtcaacagattcaggtttctgtctagattctcctgggccattggacagtaaagaaaaccttgaaaatcctatgagaagaatacattccctacctcagaagctgttgggatgtagtccagctctgaagaggagccattctgattctcttgaccatgacatctttcagctcatcgacccagatgagaacaaggaaaatgaagcctttgagtttaagaagccagtaagacctgtatctcgtggctgcctgcactctcatggactccaggagggtaaagatctcttcacacagaggcagaactctgccccagctcggatgctttcctcaaatgaaagagatagcagtgaaccagggaatttcattcctctttttacaccccagtcacctgtgacagccactttgtctgatgaggatgatggcttcgtggaccttctcgatggagagaatctgaagaatgaggaggagaccccctcgtgcatggcaagcctctggacagctcctctcgtcatgagaactacaaaccttgacaaccgatgcaagctgtttgactccccttccctgtgtagctccagcactcggtcagtgttgaagagaccagaacgatctcaagaggagtctccacctggaagtacaaagaggaggaagagcatgtctggggccagccccaaagagtcaactaatccagagaaggcccatgagactcttcatcagtctttatccctggcatcttcccccaaaggaaccattgagaacattttggacaatgacccaagggaccttataggagacttctccaagggttatctctttcatacagttgctgggaaacatcaggatttaaaatacatctctccagaaattatggcatctgttttgaatggcaagtttgccaacctcattaaagagtttgttatcatcgactgtcgatacccatatgaatacgagggaggccacatcaagggtgcagtgaacttgcacatggaagaagaggttgaagacttcttattgaagaagcccattgtacctactgatggcaagcgtgtcattgttgtgtttcactgcgagttttcttctgagagaggtccccgcatgtgccggtatgtgagagagagagatcgcctgggtaatgaataccccaaactccactaccctgagctgtatgtcctgaaggggggatacaaggagttctttatgaaatgccagtcttactgtgagccccctagctaccggcccatgcaccacgaggactttaaagaagacctgaagaagttccgcaccaagagccggacctgggcaggggagaagagcaagagggagatgtacagtcgtctgaagaagctctgagggcggcaggaccagccagcagcagcccaagcttccctccatccccctttaccctctttsctgcagagaaacttaagcaaaggggacagctgtgtgacatttggagagggggcctgggacttccatgccttaaacctacctcccacactcccaaggttggagcccagggcatcttgctggctacgcctcttctgtccctgttagacgtcctccgtccatatcagaactgtgccacaatgcagttctgagcaccgtgtcaagctgcyctgagccacagtgggatgaaccagccggggccttatcgggctccagccatctcatgaggggagaggagacggaggggagtagagaagttacacagaaatgctgctggccaaatagcaaagacaacctgggaaggaaaggtctttgtgggataatccatatgtttaatttattcaacttcatcaatcactttattttatttttttttctaactcctggagacttattttactgcttcattaggttgaaatactgccattctaggtagggttttattatcccagggactacctcggcttttaatttaaaaaaaaaaaagaagtgggtaagaaaatgcaaacctgttataagttatcggacagaaagctaggtgctctgtcacccccaggaggcgctgtggtactggggctgctgctatttaagccaagaactgaggtcctggtgagagcgttggacccaggcttggctgcctgacataagctaaatctcccagacccaccactggctaccgatatctatttggtgggaggtgtggccctgttcttcctcaccccagttccatgacattggctggtataggagccacagtcaggaaagcacttgaggcagcatctgttgggccacccccggctcagtgctggaatgttgcagtgtaggtttcccagggaaggggggtgggggtaggtgggctccacaggatgggggaggagcatgtccactgagtatcttccttatgttgctgtgatattgatagcttttattttctaatttttaaaaaatggtcatattatgagtcaaagagtatcaaatcagtgttggatggaccacccaagggtgaggagaggggctggaagccctgggcattaggagaagggagtgggtgctggcatggacatgactggatagaattttctcaggagggagcttggtggattttgaaggtaaaactttctgggtttatcatgttttaattttagagacagggagtgatgaatcatcaccggttgtccccttatctaactccataaaagtgggaatttcaaaagaacacctcatccaaggagctggggcagacttcattgattctagagagacctgtttcagtgcctactcatccctgccctctggtgccagcctccttaccatcacggcttcactgaggtgtaggtgggtttttcttaaacaggagacagtctctcccctcttacctcaacttcttggggtgggaatcagtgatactggagatggctagttgctgtgttacgggtttgagttacatttggctataaaacaatcttgttgggaaaaatgtgggggagaggacttcttcctacacgcgcattgagacagattccaactggttaatgatattgtttgtaagaaagagattctgttggttgactgcctaaagagaaaggtgggatggccttcagattataccagcttagctagcattactaaccaactgttggaagctctgaaaataaaagatcttgaacccat

SEQ ID NO: 2091 - DNA, 4895 bp, Homo sapiens
atttttcttcatccctttactttgagtctgtggatgtcattgcatgtgatatgggtctcctgaagacagcataccattggattttgcttctttatccaagttatcattctgtcttttaattggggtgtgcattcaagataagtttataccatggatagcacaaaggagaagtgtgacagttacaaagatgatcttctgcttaggatgggayttaatgataataaagcaggaatggaaggattagataaagagaaaattaacaaaattataatggaagccacgaaggggtccagattttatggaaatgagctcaagaaagaaaagcaagtcaaccaacgaattgaaaatatgatgcaacaaaaagctcaaatcaccagccaacagctaagaaaagcacaattacaggttgacagatttgcaatggaattagaacaaagccgaaatttgagcaataccatagtgcacattgacatggatgctttctatgcagctgtagaaatgagggacaatccagaattgaaggataaacccattgcygtaggatcaatgagtatgctgtctacttcaaattaccatgcaaggagatttggtgttcgtgcagccatgccaggatttattgctaagaggctgtgcccacaacttataatagtgccccccaactttgacaaataccgagctgtgagtaaagaggttaaggaaatacttgctgattatgatcccaattttatggccatgagtcttgatgaagcctacttgaatataacaaagcacttagaagaaagacaaaattggcctgaggataaaagaaggtatttcatcaaaatgggaagctctgtagaaaatgataatccaggaaaggaagttaataaactgagtgagcatgaacgatccatctctccactactttttgaagagagtccttctgatgtgcagcccccaggagatcctttycaagtgaactttgaagaacaaaacaatcctcaaatactccaaaactcagttgtttttggaacatcagcccaggaagtggtaaaggaaattcgtttcagaattgagcagaaaacaacactgacagcyagtgcaggcattgccccaaatacaatgttagcaaaagtatgcagtgataagaataaaccaaatggacaataccaaattcttcccaatagacaagctgtgatggacttcatcaaggatttacccattagaaaggtttctggaataggaaaagttacagagaaaatgttaaaggcccttggaattattacatgtacagaactttaccaacagagggcattgctttctctccttttctctgaaacatcttggcattatttccttcatatctccttgggtctaggttcaacacacctgacgagggatggagagaggaaaagtatgagcgttgagaggacattcmgtgagataaataaagcggaagagcaatacagcctatgtcaagaactttgcagtgagcttgctcaggatctacagaaagaaagacttaagggtagaactgttaccattaagttgaagaatgtgaattttgaagtaaaaactcgtgcatctacagtttcatctgttgtttctactgcagaagaaatatttgccattgctaaggaattgctaaaaacagaaattgatgctgattttccacatcccttgagattaaggcttatgggtgttcggatatctagttttcccaatgaagaggacaggaaacaccaacaaaggagcattattggctttttacaggctggaaaccaagccctgtcagccactgagtgtacattagagaaaactgacaaagataagtttgtaaaacctctagaaatgtctcataagaagagtttctttgataaaaaacgatcagaaaggaaatggagtcaccaagatacatttaaatgtgaagccgtgaataaacaaagtttccagacatcacaaccattccaagttttaaagaagaagatgaatgagaatttggaartatcagagaattcagatgactgtcagatacttacctgtcctgtttgctttagggctcaagggtgcatcartctggaagccttgaataaacatgtagatgaatgtcttgatggaccttcaatcagtgaaaactttaaaatgttctcgtgttcacatgtttctgctaccaaagttaacaagaaagaaaatgttcctgcttcttcactttgtgagaagcaagattatgaagcccatccaaaaattaaagaaatatcttcagtagattgtatagctttagtagatactatagataactcatctaaagcagaaagcatagatgctttaagtaataagcatagcaaggaagaatgttctagtctcccaagcaagtcttttaatattgaacactgtcatcagaattcttcttctactgtttcattggaaaacgaagatgttggatcatttagacaagaataccgccagccttacttatgtgaagtgaaaacaggccaagctctagtttgtcctgtttgtaacgtagaacaaaagacttcagatctaaccctgttcaatgtgcatgtggatgtttgcttaaataaaagttttatccaagaattaagaaaggataaatttaacccagttaatcaacccaaagaaagctccagaagtactggtagctcaagtggagtacagaaggctgtaacaagaacaaaaaggccaggattgatgacaaagtactcaacatcaaagaaaataaaaccaaacaatcccaaacatacccttgatatattttttaagtaaacattgaacattttatcattaatttttaattgaaactagttattttataatcaatgaatttgttctttctgattttaagtttgcagatttatttagtgaaggcaagtgcaataatccttcctcagatgatgtttgcttttctaagatacatatactgattctgtgtatcttttttataaccatgagaattttacttccattatacatcaattggaaatcaatcctgttaagagataattcttaaaagggaaattaggaatgggataagaaggtgatttttttattatttttatactgaatataaaaacatttgtaagggctctcaaagattcacacatgcctatattatcataagaatttttcagcacttaactactttgttggcattgatcctagtgtctttaaatacttcatgagcattcataattaaaatttatcttaagttctatgaagagtattaatgtaactagcataagtggttttcttcaggaaaataaatatcacagtattatctgtgttaaaatggtttttgcctaaaatataatttttaatttggcttttcttatttaaaattccattatcttaygaataagcacttgaatcagtttttaaaatatttagtctaagatgattcaaagtagttttattttaatacaggacttttaaatggcagtatttcatttcttgtcaattatgttggtactttccacaaatctataaagaaggataaattgtaccatcattttattataatcctcaagagaaaatgtgtaattcaaaagattaatgtgtattaaaacacattatgtatcttagttacatttctatcagtacttttattaatatttgtgaaagaagacagcttaatagtagttagcttaagtagtttctccaagtacttttgtgctatcaatgagttcttctcaaaaaataattagttaggccaggcacaatggctcacacctgtaatgccagccctttgggaggccgaatgggcagatcacttgaggtcaggagtttgagaccagcctcgccaacatggtgagaccctgtctctactaaaacgataaaaaaaaaaaaaaaattagccaggcttggtggcacacgcctgtaatcccagctactcagatggctgaggcaggagaactacttgaacctgggaggtcaaagctgcagtcagccaagatcttgccactgtactccagcctgaagagcgagactctgtctcaataatataataatagttattatttaattgcaacatgaagttggaagccattttctgttacttctttaaggagctaaatcttttatatttttgttttctctccccttgcgtttcatattttagcttatgatctaaatatatattttgtatattataatattttaggaatagcttaattaagaactcacagactttgacaaagtggtaactagacttttaattactagattcttcaaattaggcttaatgcctgctagcatgccaatccaatcccatgactgatgttattatacactatggcaaatacaaagttgtagtattatggttcttgatggtgtgatttacttatgtaaattatgtacaaatttaagttcaatgaaacactgatttaatgtactgaaasgtaaatagtaccatagtgaattattttctgtcttgccttaggtttatttttattatcttcaatattagaataaatgctaaattattttcatttaaggatttatgtagttgaatattatcatttagtaatatttaatcatttgaaataaaatttaaagctttaattgatctaatagagatggttttctacttttccactcttcctccctcttatgccttcacttttgttttctgtgcccagaattttcttcacattctttactacctgttttgtctattatatccaacccattttctttttattataattttgatttggggcatttgaagaaaatacagcaaaactacaagaactggtaataagcatgcataatctcacctacttagtgaacctaatataaacctaatataaagaaccaccgtatttgcaatatatataactggtgaaaaactagtgtccagaatatataaatgatccctatgaatcagtaagaaaaagaca

SEQ ID NO: 2092 - DNA, 4440 bp, Homo sapiens
tacctccggctctcccgggtgacgacgggtagaaaagcaggaggagcggagaaaggagagggcggggtagggatgcagctgtgctgcattctgggaagggcgttggtccgtcgctcgcgcagcctcctgggagttgtagtcgcgatcctgaggtaacggataagtttataccatggatagcacaaaggagaagtgtgacagttacaaagatgatcttctgcttaggatgggayttaatgataataaagcaggaatggaaggattagataaagagaaaattaacaaaattataatggaagccacgaaggggtccagattttatggaaatgagctcaagaaagaaaagcaagtcaaccaacgaattgaaaatatgatgcaacaaaaagctcaaatcaccagccaacagctaagaaaagcacaattacaggttgacagatttgcaatggaattagaacaaagccgaaatttgagcaataccatagtgcacattgacatggatgctttctatgcagctgtagaaatgagggacaatccagaattgaaggataaacccattgcygtaggatcaatgagtatgctgtctacttcaaattaccatgcaaggagatttggtgttcgtgcagccatgccaggatttattgctaagaggctgtgcccacaacttataatagtgccccccaactttgacaaataccgagctgtgagtaaagaggttaaggaaatacttgctgattatgatcccaattttatggccatgagtcttgatgaagcctacttgaatataacaaagcacttagaagaaagacaaaattggcctgaggataaaagaaggtatttcatcaaaatgggaagctctgtagaaaatgataatccaggaaaggaagttaataaactgagtgagcatgaacgatccatctctccactactttttgaagagagtccttctgatgtgcagcccccaggagatcctttycaagtgaactttgaagaacaaaacaatcctcaaatactccaaaactcagttgtttttggaacatcagcccaggaagtggtaaaggaaattcgtttcagaattgagcagaaaacaacactgacagcyagtgcaggcattgccccaaatacaatgttagcaaaagtatgcagtgataagaataaaccaaatggacaataccaaattcttcccaatagacaagctgtgatggacttcatcaaggatttacccattagaaaggtttctggaataggaaaagttacagagaaaatgttaaaggcccttggaattattacatgtacagaactttaccaacagagggcattgctttctctccttttctctgaaacatcttggcattatttccttcatatctccttgggtctaggttcaacacacctgacgagggatggagagaggaaaagtatgagcgttgagaggacattcmgtgagataaataaagcggaagagcaatacagcctatgtcaagaactttgcagtgagcttgctcaggatctacagaaagaaagacttaagggtagaactgttaccattaagttgaagaatgtgaattttgaagtaaaaactcgtgcatctacagtttcatctgttgtttctactgcagaagaaatatttgccattgctaaggaattgctaaaaacagaaattgatgctgattttccacatcccttgagattaaggcttatgggtgttcggatatctagttttcccaatgaagaggacaggaaacaccaacaaaggagcattattggctttttacaggctggaaaccaagccctgtcagccactgagtgtacattagagaaaactgacaaagataagtttgtaaaacctctagaaatgtctcataagaagagtttctttgataaaaaacgatcagaaaggaaatggagtcaccaagatacatttaaatgtgaagccgtgaataaacaaagtttccagacatcacaaccattccaagttttaaagaagaagatgaatgagaatttggaartatcagagaattcagatgactgtcagatacttacctgtcctgtttgctttagggctcaagggtgcatcartctggaagccttgaataaacatgtagatgaatgtcttgatggaccttcaatcagtgaaaactttaaaatgttctcgtgttcacatgtttctgctaccaaagttaacaagaaagaaaatgttcctgcttcttcactttgtgagaagcaagattatgaagcccatccaaaaattaaagaaatatcttcagtagattgtatagctttagtagatactatagataactcatctaaagcagaaagcatagatgctttaagtaataagcatagcaaggaagaatgttctagtctcccaagcaagtcttttaatattgaacactgtcatcagaattcttcttctactgtttcattggaaaacgaagatgttggatcatttagacaagaataccgccagccttacttatgtgaagtgaaaacaggccaagctctagtttgtcctgtttgtaacgtagaacaaaagacttcagatctaaccctgttcaatgtgcatgtggatgtttgcttaaataaaagttttatccaagaattaagaaaggataaatttaacccagttaatcaacccaaagaaagctccagaagtactggtagctcaagtggagtacagaaggctgtaacaagaacaaaaaggccaggattgatgacaaagtactcaacatcaaagaaaataaaaccaaacaatcccaaacatacccttgatatattttttaagtaaacattgaacattttatcattaatttttaattgaaactagttattttataatcaatgaatttgttctttctgattttaagtttgcagatttatttagtgaaggcaagtgcaataatccttcctcagatgatgtttgcttttctaagatacatatactgattctgtgtatcttttttataaccatgagaattttacttccattatacatcaattggaaatcaatcctgttaagagataattcttaaaagggaaattaggaatgggataagaaggtgatttttttattatttttatactgaatataaaaacatttgtaagggctctcaaagattcacacatgcctatattatcataagaatttttcagcacttaactactttgttggcattgatcctagtgtctttaaatacttcatgagcattcataattaaaatttatcttaagttctatgaagagtattaatgtaactagcataagtggttttcttcaggaaaataaatatcacagtattatctgtgttaaaatggtttttgcctaaaatataatttttaatttggcttttcttatttaaaattccattatcttaygaataagcacttgaatcagtttttaaaatatttagtctaagatgattcaaagtagttttattttaatacaggacttttaaatggcagtatttcatttcttgtcaattatgttggtactttccacaaatctataaagaaggataaattgtaccatcattttattataatcctcaagagaaaatgtgtaattcaaaagattaatgtgtattaaaacacattatgtatcttagttacatttctatcagtacttttattaatatttgtgaaagaagacagcttaatagtagttagcttaagtagtttctccaagtacttttgtgctatcaatgagttcttctcaaaaaataattagttaggccaggcacaatggctcacacctgtaatgccagccctttgggaggccgaatgggcagatcacttgaggtcaggagtttgagaccagcctcgccaacatggtgagaccctgtctctactaaaacgataaaaaaaaaaaaaaaattagccaggcttggtggcacacgcctgtaatcccagctactcagatggctgaggcaggagaactacttgaacctgggaggtcaaagctgcagtcagccaagatcttgccactgtactccagcctgaagagcgagactctgtctcaataatataataatagttattatttaattgcaacatgaagttggaagccattttctgttacttctttaaggagctaaatcttttatatttttgttttctctccccttgcgtttcatattttagcttatgatctaaatatatattttgtatattataatattttaggaatagcttaattaagaactcacagactttgacaaagtggtaactagacttttaattactagattcttcaaattaggcttaatgcctgctagcatgccaatccaatcccatgactgatgttattatacactatggcaaatacaaagttgtagtattatggttcttgatggtgtgatttacttatgtaaattatgtacaaatttaagtttttattatcttcaatattagaataaatgctaaattattttcatttaaggattta

SEQ ID NO: 2093 - DNA, 4917 bp, Homo sapiens
tacctccggctctcccgggtgacgacgggtagaaaagcaggaggagcggagaaaggagagggcggggtagggatgcagctgtgctgcattctgggaagggcgttggtccgtcgctcgcgcagcctcctgggagttgtagtcgcgatcctgaggtaacggataagtttataccatggatagcacaaaggagaagtgtgacagttacaaagatgatcttctgcttaggatgggayttaatgataataaagcaggaatggaaggattagataaagagaaaattaacaaaattataatggaagccacgaaggggtccagattttatggaaatgagctcaagaaagaaaagcaagtcaaccaacgaattgaaaatatgatgcaacaaaaagctcaaatcaccagccaacagctaagaaaagcacaattacaggttgacagatttgcaatggaattagaacaaagccgaaatttgagcaataccatagtgcacattgacatggatgctttctatgcagctgtagaaatgagggacaatccagaattgaaggataaacccattgcygtaggatcaatgagtatgctgtctacttcaaattaccatgcaaggagatttggtgttcgtgcagccatgccaggatttattgctaagaggctgtgcccacaacttataatagtgccccccaactttgacaaataccgagctgtgagtaaagaggttaaggaaatacttgctgattatgatcccaattttatggccatgagtcttgatgaagcctacttgaatataacaaagcacttagaagaaagacaaaattggcctgaggataaaagaaggtatttcatcaaaatgggaagctctgtagaaaatgataatccaggaaaggaagttaataaactgagtgagcatgaacgatccatctctccactactttttgaagagagtccttctgatgtgcagcccccaggagatcctttycaagtgaactttgaagaacaaaacaatcctcaaatactccaaaactcagttgtttttggaacatcagcccaggaagtggtaaaggaaattcgtttcagaattgagcagaaaacaacactgacagcyagtgcaggcattgccccaaatacaatgttagcaaaagtatgcagtgataagaataaaccaaatggacaataccaaattcttcccaatagacaagctgtgatggacttcatcaaggatttacccattagaaaggtttctggaataggaaaagttacagagaaaatgttaaaggcccttggaattattacatgtacagaactttaccaacagagggcattgctttctctccttttctctgaaacatcttggcattatttccttcatatctccttgggtctaggttcaacacacctgacgagggatggagagaggaaaagtatgagcgttgagaggacattcmgtgagataaataaagcggaagagcaatacagcctatgtcaagaactttgcagtgagcttgctcaggatctacagaaagaaagacttaagggtagaactgttaccattaagttgaagaatgtgaattttgaagtaaaaactcgtgcatctacagtttcatctgttgtttctactgcagaagaaatatttgccattgctaaggaattgctaaaaacagaaattgatgctgattttccacatcccttgagattaaggcttatgggtgttcggatatctagttttcccaatgaagaggacaggaaacaccaacaaaggagcattattggctttttacaggctggaaaccaagccctgtcagccactgagtgtacattagagaaaactgacaaagataagtttgtaaaacctctagaaatgtctcataagaagagtttctttgataaaaaacgatcagaaaggaaatggagtcaccaagatacatttaaatgtgaagccgtgaataaacaaagtttccagacatcacaaccattccaagttttaaagaagaagatgaatgagaatttggaartatcagagaattcagatgactgtcagatacttacctgtcctgtttgctttagggctcaagggtgcatcartctggaagccttgaataaacatgtagatgaatgtcttgatggaccttcaatcagtgaaaactttaaaatgttctcgtgttcacatgtttctgctaccaaagttaacaagaaagaaaatgttcctgcttcttcactttgtgagaagcaagattatgaagcccatccaaaaattaaagaaatatcttcagtagattgtatagctttagtagatactatagataactcatctaaagcagaaagcatagatgctttaagtaataagcatagcaaggaagaatgttctagtctcccaagcaagtcttttaatattgaacactgtcatcagaattcttcttctactgtttcattggaaaacgaagatgttggatcatttagacaagaataccgccagccttacttatgtgaagtgaaaacaggccaagctctagtttgtcctgtttgtaacgtagaacaaaagacttcagatctaaccctgttcaatgtgcatgtggatgtttgcttaaataaaagttttatccaagaattaagaaaggataaatttaacccagttaatcaacccaaagaaagctccagaagtactggtagctcaagtggagtacagaaggctgtaacaagaacaaaaaggccaggattgatgacaaagtactcaacatcaaagaaaataaaaccaaacaatcccaaacatacccttgatatattttttaagtaaacattgaacattttatcattaatttttaattgaaactagttattttataatcaatgaatttgttctttctgattttaagtttgcagatttatttagtgaaggcaagtgcaataatccttcctcagatgatgtttgcttttctaagatacatatactgattctgtgtatcttttttataaccatgagaattttacttccattatacatcaattggaaatcaatcctgttaagagataattcttaaaagggaaattaggaatgggataagaaggtgatttttttattatttttatactgaatataaaaacatttgtaagggctctcaaagattcacacatgcctatattatcataagaatttttcagcacttaactactttgttggcattgatcctagtgtctttaaatacttcatgagcattcataattaaaatttatcttaagttctatgaagagtattaatgtaactagcataagtggttttcttcaggaaaataaatatcacagtattatctgtgttaaaatggtttttgcctaaaatataatttttaatttggcttttcttatttaaaattccattatcttaygaataagcacttgaatcagtttttaaaatatttagtctaagatgattcaaagtagttttattttaatacaggacttttaaatggcagtatttcatttcttgtcaattatgttggtactttccacaaatctataaagaaggataaattgtaccatcattttattataatcctcaagagaaaatgtgtaattcaaaagattaatgtgtattaaaacacattatgtatcttagttacatttctatcagtacttttattaatatttgtgaaagaagacagcttaatagtagttagcttaagtagtttctccaagtacttttgtgctatcaatgagttcttctcaaaaaataattagttaggccaggcacaatggctcacacctgtaatgccagccctttgggaggccgaatgggcagatcacttgaggtcaggagtttgagaccagcctcgccaacatggtgagaccctgtctctactaaaacgataaaaaaaaaaaaaaaattagccaggcttggtggcacacgcctgtaatcccagctactcagatggctgaggcaggagaactacttgaacctgggaggtcaaagctgcagtcagccaagatcttgccactgtactccagcctgaagagcgagactctgtctcaataatataataatagttattatttaattgcaacatgaagttggaagccattttctgttacttctttaaggagctaaatcttttatatttttgttttctctccccttgcgtttcatattttagcttatgatctaaatatatattttgtatattataatattttaggaatagcttaattaagaactcacagactttgacaaagtggtaactagacttttaattactagattcttcaaattaggcttaatgcctgctagcatgccaatccaatcccatgactgatgttattatacactatggcaaatacaaagttgtagtattatggttcttgatggtgtgatttacttatgtaaattatgtacaaatttaagttcaatgaaacactgatttaatgtactgaaasgtaaatagtaccatagtgaattattttctgtcttgccttaggtttatttttattatcttcaatattagaataaatgctaaattattttcatttaaggatttatgtagttgaatattatcatttagtaatatttaatcatttgaaataaaatttaaagctttaattgatctaatagagatggttttctacttttccactcttcctccctcttatgccttcacttttgttttctgtgcccagaattttcttcacattctttactacctgttttgtctattatatccaacccattttctttttattataattttgatttggggcatttgaagaaaatacagcaaaactacaagaactggtaataagcatgcataatctcacctacttagtgaacctaatataaacctaatataaagaaccaccgtatttgcaatatatataactggtgaaaaactagtgtccagaatatataaatgatccctatgaatcagtaagaaaaagaca

SEQ ID NO: 2094 - DNA, 4021 bp, Homo sapiens
cagactcatttatcgtggagtgacttgcccagatcctacaagtaacagtccaagaaaaggggctgctgggtaggacctgcaggtatttgtcttttttactcttgagattggaacgggaaatcgactctctacccctccaccccgcctccgggcaagtgaggaaccccttgtcaaagtggggcgtagataagtgtggagtttcacgtaagttaagttgcagaataatttagcattgccaggaactcgaatcacgtcgaagactacatgaggaaataattgacttttataacttcatgtccccttgtcctgaagaagcagctatgagaagagaggtggtgaaacggatcgaaactgtggtgaaagacctttggccgacggctgatgtacagatatttggcagctttagtacaggtctttatcttccaactagcgacatagacctggtggtcttcgggaaatgggagcgtcctcctttacagctgctggagcaagccctgcggaagcacaacgtggctgagccgtgttccatcaaagtccttgacaaggctacggtaccaataataaagctcacagatcaggagactgaagtgaaagttgacatcagctttaacatggagacgggcgtccgggcagcggagttcatcaagaattacatgaagaaatattcattgctgccttacttgattttagtattgaaacagttccttctgcagagggacctgaatgaagtttttacaggtggaattagctcatacagcctaattttaatggccattagctttctacagttgcatccaagaattgatgcccggagagctgatgaaaaccttggaatgcttcttgtagaattttttgaactctatgggagaaattttaattacttgaaaaccggtattagaatcaaagaaggaggtgcctatatcgccaaagaggagatcatgaaagccatgaccagcgggtacagaccgtcgatgctgtgcattgaggaccccctgctgccagggaatgacgttggccggagctcctatggcgccatgcaggtgaagcaggtcttcgattatgcctacatagtgctcagccatgcygtgtcaccgctggccaggtcctatccaaacagagacgccgaaagtactttaggaagaatcatcaaagtaactcaggaggtgattgactaccggaggtggatcaaagagaagtggggcagcaaagcccacccgtcgccaggcatggacagcaggatcaagatcaaagagcgaatagccacatgcaatggggagcagacgcagaaccgagagcccgagtctccctatggccagcgcttgactttgtcgctgtccagcccccagctcctgtcttcaggctcctcggcctcttctgtgtcttcactttctgggagtgacgttgattcagacacaccgccctgcacaacgcccagtgtttaccagttcagtctgcaagcgccagctcctctcatggccggcttacccaccgccttgccaatgcccagtggcaaacctcagcccaccacttccagaacactgatcatgacaaccaacaatcagaccaggtttactatacctccaccgaccctaggggttgctcctgttccttgcagacaagctggtgtagaaggaactgcgtctttgaaagccgtccaccacatgtctyccccggccattccctcagcgtcccccaacccgctctcgagccctcatctgtatcataagcagcacaacggcatgaaactgtccatgaagggctctcacggccacacccaaggcggcggctacagctctgtgggtagcggaggtgtgcggccccctgtgggcaacaggggacaccaccagtataaccgcaccggctggaggaggaaaaaacacacacacacacgggacagtctgcccgtgagcctcagcagataatggctcctggctgcgtcagcctsccccacccctctgcagactgccccgcggcctcggccaccggcaggggaaccgagaccagcaccccgcacgtcagccgggctcgcggcacgcccgccgctgatcactctgcatgtttcttcgtgtggtggtcgcgtccatcttcaagaacagctcgttgtgctcatctgtgaagccttattaaacgtggacgttgttttctgccttcccaggattcttccttcagtgctgaggcaggtygggctcaggaactgcagggacgtgaacatgcgcttgcggtttgaggtagccgtgtctgttccttcgcggtttgctattttcatttcctgttcgtcaaagcagcagaggagatcaaaccccgttcgtgtgtctttcctccayggataagcttgggaggtcattgttttactgccctcacattttgtttgaaatttcagaactgtttttctatgtaaatattgaaaacttatgatttgtgcaataactcagatattttttatttaatttcctattttcacataagttatatttaagggaggagggaattttttttaaacaagcttaggtcctttcccgagctgcattttctaagttgggtcatcgtgtcggctggttgtctgacgagcatcgttacaaacaccatgatgaggggtttggggttttattttgatgtcttttcttttggtcggaagtgagtgaaggagccaggtcgccctgaaggttttccaaagggcttggctccagagccacctggcagactgcccgtggccctgctgtcgggccccaggccgttgtcctgctctgaccacagagttttaatgttttggttttcacttcttttaaactggacaacaaatccagcatttcaagtgccagaagtataactttctaaggagagaagggttgtcacattataaaatctttaggaaaatgtgaactggaaaacgcttcggtcagttttagtgacatagcctgtgatgatgggtctggtgactattattgcggaccgtggtacccagttttaggaatgtggagaaaggaattctgttgattccgttgaggaatctgtagcgtatgcattcgttctgttaagagcaaatctaggagaagtgcttcagctgcccagtgcgccgtggggagtgttttaacggatcgtgtcgcaggagagcacagcccagcgttggggccgggaccgctggcgcccgacgtcggaagcatacaggtatactatgcaagtgtattctgccacaacaaccactgtctttgttacctttttttgaacaagaatatatccatcctgcctaaccctgagtttttggagcaccacagttgtcctgggagttggttgcatcttgtaggccatctgacttcctgtttttaaaacgggggtctggtcttgctaaacactacaggtaggttggtctttgaagtccactagtggagaatgtcaagacaagatacttattaccatgacatctgatgcatgtgcagcagtggggagttctagattgatctctgaatgtgatcgacgcccagcaaggacaagctttaaaatgtctgcggtctgcccttttgaagcaggactggctcactctgtcattgggagctgtcagctgcgactgcaggttctctaggaggcattccagaatagagtagcacactgtgtctgcagttctcgatgaccgaaagttatcaaaaatatttaaaatatttaaattgtgaacctattgataaagaatatttataaaaactgatctgtaggcctgtactaatctctacgcattagcaatattgactgtaaacccacattaaggaaaccactacgggtctggcagtgcgtgtcccgtggggtgtgcattttaaaactcgattcatagacacaggtaccatgttccatttccgtcatggtgaagcaaatgaattggcctggctaccactgtggtcgcgtgctacaggtttgacaaaaagatatcatgtttcgatttttttgtgtgtggacaacaatatggaagctaaaattgacatatttttatgtaaagtttttctattctttgatttttaataaactttggaaacca

SEQ ID NO: 2095 - DNA, 3762 bp, Homo sapiens
actacatgaggaaataattgacttttataacttcatgtccccttgtcctgaagaagcagctatgagaagagaggtggtgaaacggatcgaaactgtggtgaaagacctttggccgacggctgatgtacagatatttggcagctttagtacaggtctttatcttccaactagcgacatagacctggtggtcttcgggaaatgggagcgtcctcctttacagctgctggagcaagccctgcggaagcacaacgtggctgagccgtgttccatcaaagtccttgacaaggctacggtaccaataataaagctcacagatcaggagactgaagtgaaagttgacatcagctttaacatggagacgggcgtccgggcagcggagttcatcaagaattacatgaagaaatattcattgctgccttacttgattttagtattgaaacagttccttctgcagagggacctgaatgaagtttttacaggtggaattagctcatacagcctaattttaatggccattagctttctacagttgcatccaagaattgatgcccggagagctgatgaaaaccttggaatgcttcttgtagaattttttgaactctatgggagaaattttaattacttgaaaaccggtattagaatcaaagaaggaggtgcctatatcgccaaagaggagatcatgaaagccatgaccagcgggtacagaccgtcgatgctgtgcattgaggaccccctgctgccagggaatgacgttggccggagctcctatggcgccatgcaggtgaagcaggtcttcgattatgcctacatagtgctcagccatgcygtgtcaccgctggccaggtcctatccaaacagagacgccgaaagtactttaggaagaatcatcaaagtaactcaggaggtgattgactaccggaggtggatcaaagagaagtggggcagcaaagcccacccgtcgccaggcatggacagcaggatcaagatcaaagagcgaatagccacatgcaatggggagcagacgcagaaccgagagcccgagtctccctatggccagcgcttgactttgtcgctgtccagcccccagctcctgtcttcaggctcctcggcctcttctgtgtcttcactttctgggagtgacgttgattcagacacaccgccctgcacaacgcccagtgtttaccagttcagtctgcaagcgccagctcctctcatggccggcttacccaccgccttgccaatgcccagtggcaaacctcagcccaccacttccagaacactgatcatgacaaccaacaatcagaccaggtttactatacctccaccgaccctaggggttgctcctgttccttgcagacaagctggtgtagaaggaactgcgtctttgaaagccgtccaccacatgtctyccccggccattccctcagcgtcccccaacccgctctcgagccctcatctgtatcataagcagcacaacggcatgaaactgtccatgaagggctctcacggccacacccaaggcggcggctacagctctgtgggtagcggaggtgtgcggccccctgtgggcaacaggggacaccaccagtataaccgcaccggctggaggaggaaaaaacacacacacacacgggacagtctgcccgtgagcctcagcagataatggctcctggctgcgtcagcctsccccacccctctgcagactgccccgcggcctcggccaccggcaggggaaccgagaccagcaccccgcacgtcagccgggctcgcggcacgcccgccgctgatcactctgcatgtttcttcgtgtggtggtcgcgtccatcttcaagaacagctcgttgtgctcatctgtgaagccttattaaacgtggacgttgttttctgccttcccaggattcttccttcagtgctgaggcaggtygggctcaggaactgcagggacgtgaacatgcgcttgcggtttgaggtagccgtgtctgttccttcgcggtttgctattttcatttcctgttcgtcaaagcagcagaggagatcaaaccccgttcgtgtgtctttcctccayggataagcttgggaggtcattgttttactgccctcacattttgtttgaaatttcagaactgtttttctatgtaaatattgaaaacttatgatttgtgcaataactcagatattttttatttaatttcctattttcacataagttatatttaagggaggagggaattttttttaaacaagcttaggtcctttcccgagctgcattttctaagttgggtcatcgtgtcggctggttgtctgacgagcatcgttacaaacaccatgatgaggggtttggggttttattttgatgtcttttcttttggtcggaagtgagtgaaggagccaggtcgccctgaaggttttccaaagggcttggctccagagccacctggcagactgcccgtggccctgctgtcgggccccaggccgttgtcctgctctgaccacagagttttaatgttttggttttcacttcttttaaactggacaacaaatccagcatttcaagtgccagaagtataactttctaaggagagaagggttgtcacattataaaatctttaggaaaatgtgaactggaaaacgcttcggtcagttttagtgacatagcctgtgatgatgggtctggtgactattattgcggaccgtggtacccagttttaggaatgtggagaaaggaattctgttgattccgttgaggaatctgtagcgtatgcattcgttctgttaagagcaaatctaggagaagtgcttcagctgcccagtgcgccgtggggagtgttttaacggatcgtgtcgcaggagagcacagcccagcgttggggccgggaccgctggcgcccgacgtcggaagcatacaggtatactatgcaagtgtattctgccacaacaaccactgtctttgttacctttttttgaacaagaatatatccatcctgcctaaccctgagtttttggagcaccacagttgtcctgggagttggttgcatcttgtaggccatctgacttcctgtttttaaaacgggggtctggtcttgctaaacactacaggtaggttggtctttgaagtccactagtggagaatgtcaagacaagatacttattaccatgacatctgatgcatgtgcagcagtggggagttctagattgatctctgaatgtgatcgacgcccagcaaggacaagctttaaaatgtctgcggtctgcccttttgaagcaggactggctcactctgtcattgggagctgtcagctgcgactgcaggttctctaggaggcattccagaatagagtagcacactgtgtctgcagttctcgatgaccgaaagttatcaaaaatatttaaaatatttaaattgtgaacctattgataaagaatatttataaaaactgatctgtaggcctgtactaatctctacgcattagcaatattgactgtaaacccacattaaggaaaccactacgggtctggcagtgcgtgtcccgtggggtgtgcattttaaaactcgattcatagacacaggtaccatgttccatttccgtcatggtgaagcaaatgaattggcctggctaccactgtggtcgcgtgctacaggtttgacaaaaagatatcatgtttcgatttttttgtgtgtggacaacaatatggaagctaaaattgacatatttttatgtaaagtttttctattctttgatttttaataaactttggaaacca

SEQ ID NO: 2096 - DNA, 1994 bp, Homo sapiens
  misc_feature (1)...(1994): n = A,T,C or G
nngggcgcgggcgacgccagcccgggacccggcaaggtgaaagggcaagcgcgcggcggagctggccccgcgcgacaaggcgccggcggctgcggcggcggcggcggcggcggcggcggcgggggccgggggcccccgcgagagggcttctggcgccagggcggggccgggcccggcggtggcggcggcggcgggcggcagcctggtccccgcggcgcgccagcaacactgcacgcaggtgcgcagccggcggctcatgaaggagctgcaggacatcgcgcgccttagcgaccgcttcatctccgtggagctggtggacgagagcctgttcgactggaacgtgaagctgcaccaggtggacaaggactcggtgctgtggcaggacatgaaggagaccaacaccgagttcatcctgctcaacctcaccttccccgacaacttccccttctcgccgcccttcatgcgggtgctcagcccgcgcctggagaacggctacgtgctggacggcggcgccatctgcatggagctgctcacgccgcgcggctggtccagcgcctacaccgtggaggccgtcatgcgccagttcgcagccagcctggtcaagggccagggacggatctgtagaaaagctggcaaatcaaaaaagtccttcagtcgcaaggaagctgaagctacctttaagagtttggtgaagacgcatgaaaaatatggttgggtcaccccgcccgtgtccgacggctgatgtctgccacgtgcagtagacgctcgagcgcctgyccacacacacaccagtaccctgacatctcctcaaygctgtgcatcctccacccgtttttactccagccagaactgcatcctgaatgcccaggagacgtttaagttatttatgaaaagatgtgtgtacagagaggaagagggagcaaatgccgttcggattatgtttcgattataaatgaatgatcacctcgaagtcactttagaacacatgttgagatggtgacatttcccagcctgcctgcccctctgcccaccccggycacattgccctgagcttctttccatgacagcagctccgacgagccggcaggaaactcaatgcccctgctggctccatttccatgtaaatggcgccgttcatatttcacagggacgccgtgcatctccgccgtgcgtccccggcacgtgtttgctgtgctctgtatctctgtttttcttcctggaaggtcaacataacttgaaaatgtgtctttctgtggcccatggtccgctgtgatgacatttagacctcatttgtgctatgacctttggctcatgaaaacacaaatttaacattgccaggttctagtgatttaaaaccacaactgcccacttggtgaaaacgtgctctcgatgctgatttgtggtgtgctgctgtccacagataaaccagtgccattagatggaaggcagaggatactgcgaccacccctgrcagacggtggcgtagacaccaggtgcgccctctggggctcagagcaacggatggtcagctgcgaacagtctcgtccgatgttaggaaatggtcctrcggccgcgcctttgtgttcctgtcttctctccaccaccaaaagcaaaagatgatttcccattcactgcagtcatctgactcattttaatatctgtgctagtgacaatgaatgtcagaactgccaaaggataccaagtgatcatacgatgatttgcatgatcgggtctatttcacccaatagtcacttgtgtgtcccccgaaattgggatgggtgagcacccttgctgtggtgtaaacttcctgttatttaatctcccccacggtttcatttttctcttctgttaatacttagaactttctaagaaactccatgaaatgaggaaatactgtttctaataatatgaggaaagaagtaaaaatgttcattccaagtggcaagtcttattggacacattttaaataaaatcatgcatacctgatacactgc

SEQ ID NO: 2097 - DNA, 1826 bp, Homo sapiens
gggcccggcggtggcggcggcggcgggcggcagcctggtccccgcggcgcgccagcaacactgcacgcaggtgcgcagccggcggctcatgaaggagctgcaggacatcgcgcgccttagcgaccgcttcatctccgtggagctggtggacgagagcctgttcgactggaacgtgaagctgcaccaggtggacaaggactcggtgctgtggcaggacatgaaggagaccaacaccgagttcatcctgctcaacctcaccttccccgacaacttccccttctcgccgcccttcatgcgggtgctcagcccgcgcctggagaacggctacgtgctggacggcggcgccatctgcatggagctgctcacgccgcgcggctggtccagcgcctacaccgtggaggccgtcatgcgccagttcgcagccagcctggtcaagggccagggacggatctgtagaaaagctggcaaatcaaaaaagtccttcagtcgcaaggaagctgaagctacctttaagagtttggtgaagacgcatgaaaaatatggttgggtcaccccgcccgtgtccgacggctgatgtctgccacgtgcagtagacgctcgagcgcctgyccacacacacaccagtaccctgacatctcctcaaygctgtgcatcctccacccgtttttactccagccagaactgcatcctgaatgcccaggagacgtttaagttatttatgaaaagatgtgtgtacagagaggaagagggagcaaatgccgttcggattatgtttcgattataaatgaatgatcacctcgaagtcactttagaacacatgttgagatggtgacatttcccagcctgcctgcccctctgcccaccccggycacattgccctgagcttctttccatgacagcagctccgacgagccggcaggaaactcaatgcccctgctggctccatttccatgtaaatggcgccgttcatatttcacagggacgccgtgcatctccgccgtgcgtccccggcacgtgtttgctgtgctctgtatctctgtttttcttcctggaaggtcaacataacttgaaaatgtgtctttctgtggcccatggtccgctgtgatgacatttagacctcatttgtgctatgacctttggctcatgaaaacacaaatttaacattgccaggttctagtgatttaaaaccacaactgcccacttggtgaaaacgtgctctcgatgctgatttgtggtgtgctgctgtccacagataaaccagtgccattagatggaaggcagaggatactgcgaccacccctgrcagacggtggcgtagacaccaggtgcgccctctggggctcagagcaacggatggtcagctgcgaacagtctcgtccgatgttaggaaatggtcctrcggccgcgcctttgtgttcctgtcttctctccaccaccaaaagcaaaagatgatttcccattcactgcagtcatctgactcattttaatatctgtgctagtgacaatgaatgtcagaactgccaaaggataccaagtgatcatacgatgatttgcatgatcgggtctatttcacccaatagtcacttgtgtgtcccccgaaattgggatgggtgagcacccttgctgtggtgtaaacttcctgttatttaatctcccccacggtttcatttttctcttctgttaatacttagaactttctaagaaactccatgaaatgaggaaatactgtttctaataatatgaggaaagaagtaaaaatgttcattccaagtggcaagtcttattggacacattttaaataaaatcatgcatacctgatacactgc

SEQ ID NO: 2098 - DNA, 1014 bp, Homo sapiens
atgactaccgtcttgacttacacttttaaaaagtgcacttctgatgcacttctcactgcatcagaatggtccctcagattttccataagacctctgagctattcctccyaagcaacacttacgggtttgttgcatcagcccagtgtccccaaggaagtagttgattatatcatctttggcacagtcattcaggaagtgaaaacaagccatgtggctggagaggctgcccttggaactgccttctctgacaagactcctgctcacactgtcaccatggcttgtatctctgccaaccaagccatgaccacaggtgttggtttgattgcttctggccagtgtgatgtgatcatggcaggtggtgtcgagttgatgttccatgtccctattcgtcagtcaaggaaaatgagaaaactgatgcttgatctaacacctgagctccctgaggtttctgagttctccaccagtgagaccacgggccactctgcagaccaattggctgtttctcgactggaacaggatgaatatgcactgcgctgtcccagtctggccaagaaggcacaggatgaaggactcctttctgrtgtcgtacccttcaaagtamcaggaaaagatacagtyaccaaacataatggcatccgtccttcctcactggagcagatggctaaactaaaacctgcattcatcaagccctacggcacagcgacagctgcaaattcttctttcttgactgatggcgcatctgaggcagaggaaaaggctctggcaatgggttataagccgaaggagtgtttgagggattttatgtactttgcacaaaattacatgggtagaaaaagcaaggttacattgcttccttcggagaagtttaataactggggtggatctctgtccctggaacacccatttggagctactggctgcaggttggtcgtggcagctgccaacagattacggaaggaaggaggccagtatgccttagcggctgcctgtgcagctggagggcaggrccatggt

SEQ ID NO: 2099 - DNA, 9366 bp, Homo sapiens
ccgggagcgaggagcgagctacttcaaagccaccaggcctggagcggggacagaggcggcgactaggggaaggtgaagccgtcgctgcaggaggaggagcaggaggaggtgacgcaggagaaacgcaccgcccggagcccgtctgagctcagcgagagccccaatgagcaaggtcaaggtgatgccccaccacagcttgaagatgaggaacctgcatttccacatactgacttggccaagttggatgacatgatcaacaggcctcgatgggtggttccagttttgccgaaaggggaattagaagtgcttttagaagctgctattgatcttagtaaaaagggccttgatgttaaaagtgaagcatgtcagcgatttttccgtgatgggctaacaatatcattcactaaaattcttacagatgaagcagtgagtggctggaagtttgaaattcataggtgtattattaacaatactcatcgtctggtggagctatgtgtggccaagttgtcccaagactggtttccacttttagaacttcttgccatggccttaaatcctcattgcaaattccatatctacaatggtacacgtccatgtgaatcagtttcctcaagtgttcagttgcctgaagatgaactctttgctcgttctccagatcctcgatcaccaaagggttggctagtggatcttctcaacaaatttggcactttaaatgggttccagattttgcatgatcgttttattaatggatcagcattaaacgttcaaataattgcagcccttattaaaccatttgggcaatgctatgagtttctcactcttcatacagtgaaaaagtactttcttccaataatagaaatggttccacagtttttagaaaacttaactgatgaagaactgaaaaaagaagcaaagaatgaagccaaaaatgatgctctttcaatgattattaaatctttgaagaatttagcttcaagggttccaggacaagaagaaactgttaaaaacttagaaatatttaggttaaaaatgatacttagattattgcaaatttcttctttcaatggaaagatgaatgcactgaatgaagttaataaggtgatatctagtgtatcatactatactcatcgacatggtaatcctgaggaggaagagtggctcacagctgaacgaatggcagaatggatacagcagaacaatatcttatccatagtgttgcgagatagtcttcatcagccacagtatgtagaaaagttagagaagattcttcgttttgtcatcaaagaaaaagctctgaccttacaggatcttgataatatctgggcagcacaggcagggaaacatgaagccattgtgaagaatgtacatgatctcctggcaaaattggcatgggatttttctcctgaacaacttgatcatctttttgattgttttaaggccagttggacaaatgcgagtaaaaagcaacgtgaaaagctacttgagctgatacgtcgtcttgcagaagatgataaagatggtgtgatggcacacaragtgttgaaccttctgtggaatctggctcacagtgatgatgtgcctgtagatatcatggacctggctctcagtgcccacataaaaatactagattacagttgctcccaggaccgtgatacacaaaagatccaatggatagatcgctttatagaagaacttcgcacaaatgacaaatgggttattcccgcactgaaacaaattagagaaatttgtagtttgtttggtgaagcgcctcaaaatttgagtcaaactcagcgaagtccccatgtgttttatcgccatgacttaatcaatcaacttcaacacaatcatgccctagttactttggtagcagaaaaccttgcaacttacatggaaagcatgagactatatgctagagaccatgaagattatgacccacaaactgtgaggctgggaagtagatatagtcatgttcaagaagttcaagaacggcttaacttccttagatttttattgaaggatggtcagctgtggctatgtgctcctcaggcaaaacaaatatggaaatgcttagctgagaatgcagtttacctttgtgatcgtgaagcctgttttaagtggtattccaagttgatgggggatgaaccagacttagatcctgatattaataaggacttctttgaaagtaatgtgcttcagcttgatccttctctgttaactgaaaatggaatgaagtgttttgagcgattcttcaaagctgtgaattgtcgagaaggaaaactagtagcaaaaaggagagcctatatgatggatgacttggagttaataggattagattacctttggagggtcgtgattcagagtaatgatgatattgccagcagagctatagatctcctcaaagagatatacacgaaccttggtccaagactacaagtcaatcaggtggtgatccatgaagacttcattcagtcttgttttgatcgtctgaaggcttcctatgacacattgtgtgttttggatggtgacaaagacagtgttaattgtgcaagacaggaagctgttcgaatggttcgagtattaactgttttaagggaatatataaatgaatgtgacagtgattatcatgaggaaagaacaattctccctatgtcgagagcattccgcggtaaacacctctcttttgtagttcgatttccaaaccagggcagacaggttgatgacttggaggtatggtctcatacaaatgatacaattggttcagtacgacgatgtattctcaatcgtattaaagccaacgtagcccatacaaaaattgagctctttgtgggcggtgagctgatagatcctgcagatgatagaaagttgattggacaattaaacttaaaagataaatcgcttatyacagccaaacttacacagataagttccaatatgccttcaagccctgatagctcttctgattcctccactggatctcctggaaaccatggtaatcattacagtgatggtcccaatccagaagtggaaagctgtttgcctggagtgataatgtcactgcatcccagatacatctcttttctttggcaagttgcagacttaggtagcagcctaaatatgccaccccttagagatggagcaagagtacttatgaaacttatgccgccagatagcacaacgatagaaaaattaagagctatttgtttagaccatgccaaacttggagaaagcagccttagtccatctcttgactcacttttctttggtccttcagcctcacaagtgctatatctaacagaggtagtctatgccttgttaatgcctgctggtgcacctctggctgatgattcctctgattttcagtttcacttcttgaaaagtggtggcctaccccttgtactgagtatgctaaccagaaataacttcctaccgaatgcagatatggaaactcgaaggggtgcctacctcaatgctcttaaaatagccaagcttttgctaactgccattggctatggtcatgttcgagctgtggcagaagcttgtcagccaggtgtagaaggtgtgaatcccatgacacagatcaaccaagttacccatgatcaagcagtggtgctacaaagtgcccttcagagcattcctaatccatcatccgagtgcatgcttagaaatgtgtcagttcgtcttgctcagcagatatctgatgaggcttcaagatatatgcctgatatttgtgtaattagagctatacaaaaaattatctgggcatcaggatgtgggtcgttacagctagtatttagcccaaatgaagaaatcactaaaatttatgagaagaccaatgcaggcaatgagccagacttggaagacgaacaggtttgctgtgaagcattggaagtgatgaccttatgttttgccttgattccaacagccttagatgctcttagtaaagaaaaggcttggcagacattcatcattgacttactattgcactgtcacagcaaaactgttcgtcaggtggcacaggagcagttctttttaatgtgcaccagatgttgcatgggacaccggcctctacttttcttcattactctactctttactgttttrgggagcacagcaagagagagagctaaacactcaggcgactactttactcttttaagacaccttcttaattacgcttacaatagtaatattaaygtacccaatgctgaagttcttctcaataatgaaattgattggcttaaaagaattagggatgatgttaaaagaacaggagaaacgggtattgaagagacgatcttagagggccaccttggagtgacaaaggagttactggcctttcaaacttctgagaaaaaatttcatattggttgtgaaaaaggaggtgctaatctcattaaagaattaattgatgatttcatatttcctgcatccaatgtttacctacagtatatgagaaatggagagcttccagctgaacaggctattccggtctgtggttcaccacctacaattaatgctggttttgaattacttgtagcattagctgttggctgtgtgaggaatctcaaacaaatagtagattctttgactgaaatgtattacattggcacagcaataactacttgtgaagcacttactgagtgggaatatctgccacctgttggaccccgcccacccaaaggattcgtggggctgaaaaatgccggtgctacttgttacatgaattctgtgattcagcaactctacatgattccttccattaggaacggtattcttgccattgaaggcacaggtagtgatgtagatgatgatatgtctggggatgagaarcaggacaatgagagcaatgttgatcccagggatgatgtatttggatatcctcaacaatttgaagataaaccagcattaagtaaaactgaagatagaaaagagtacaacattggtgtcctaagacaccttcaggtcatctttggtcatttagctgcttctcgactgcaatactatgtgcccagaggattttggaaacagttcaggctttggggtgagcctgttaatctgcgtgaacaacacgatgctttagaattttttaattcattggtggatagtttagatgaagctttaaaagctttaggacatccagctatgctaagtaaagtcttaggaggttcctttgctgatcagaagatctgccaaggctgcccacataggtacgaatgtgaagaatcttttacgaccctaaacgtagacattagaaatcaccaaaatcttcttgattctttggaacagtatgtcaaaggagatttactagaaggtgcaaatgcatatcattgtgaaaaatgcaataaaaaggaaaccaccttcgtgggaacaacagtaaacatcaaacaggttgataccgtaaagcgcttgctgattaaaaaattacctcctgttcttgctatacaactaaagcgatttgactatgactgggaaagagaatgtgcaatcaagttcaatgattattttgaatttcctcgagagctggacatggaaccttacacagttgcaggtgtcgcaaagctggaaggggataatgtaaacccagagagtcagttgatacaacagagtgagcagtctgaaagtgagacagcaggaagcacaaaatacagacttgtgggtgtgctcgtacacagtggtcaagcgagtggggggcattattattcttacatcatccaaaggaatggtggagatggtgagagaaatcgctggtataaatttgatgatggtgatgtaacagaatgtaaaatggatgatgacgaagaaatgaaaaaccagtgttttggtggagagtacatgggagaagtgtttgatcacatgatgaagcgtatgtcatacaggcgccagaaaaggtggtggaatgcttatatacttttttatgaacgaatggacacaatagaccaagatgatgagttgataagatatatatcagagcttgctatcaccaccagacctcatcagattattatgccatcagccattgagagaagtgtacggaaacagaacgtacaattcatgcataaccgaatgcagtacagtatggagtattttcagtttatgaaaaaactgcttacatgtaatggcgtttacttaaaccctcctcccgggcaagatcacctgttgcctgaagcagaagaaatcactatgatcagtattcaacttgctgctaggttcctctttactacaggatttcacacaaagaaagtagtccgtggctctgccagtgattggtatgatgcattgtgtattctccttcgtcacagcaagaatgtacgtttttggtttgctcataacgtcctttttaatgtttcaaatcgcttctccgaataccttctggagtgccctagtgcagaagtgaggggtgcgtttgcaaaacttatagtctttattgcacatttttccttgcaagatgggccatgtccttcaccttttgcctctcctggaccttctagtcaggcttatgacaacttaagcttgagtgatcacttactaagagcagtactaaatctcttgagaagggaagtttcagagcatgggcgtcatttacagcagtatttcaacctgtttgtaatgtatgccaatttaggtgtggcagagaagacacagcttctgaaattgagtgtacctgctacttttatgcttgtgtctttagatgaaggtccaggtcctccaatcaaataccagtatgctgaattaggcaaattatactcagtagtgtcacagctgatccgctgttgcaatgtctcttcaagaatgcagtcttcaatcaatggtaatcctcctcttcccaatccttttggtgatcctaatttatcacaacctataatgccaattcagcagaatgtggcagacattttatttgtgagaacaagttatgtgaagaaaatcattgaagactgcagtaattcagaggaaaccgtcaaattgcttcgtttttgctgctgggagaatcctcagttctcatctactgtcctcagtgaacttctctggcaggttgcatattcctatacctatgaactgcggccctatttggatctgcttttgcaaatcttactgattgaggactcctggcaaactcacagaattcataatgcactgaaaggaattccagatgaccgagatgggctgtttgacacaatccagcgctctaagaatcactatcaaaaaagagcataccagtgtataaaatgtatggtagctctatttagtaactgtcctgttgcttaccaaatcctgcagggcaatggagatcttaaaagaaagtggacctgggcagtggaatggcttggagatgaacttgaaagaagaccatatactggcaatcctcagtacacttacaacaattggtctcccccagtgcaaagcaatgaaacgtccaatggttatttcttggagagatcacatagtgctaggatgacacttgcaaaagcttgtgaactctgtccagaggaggagccagatgaccaagatgctccagatgaacatgagtcgcctccacctgaagatgccccattgtacccccattcacctggatctcagtatcaacagaataaccatgtgcatggacagccatatacaggcccagcagcacatcacatgaacaaccctcagagaactggccaacgagcacaagaaaattatgaaggcagtgaagaagtatccccacctcaaaccaaggatcaatgaaatgcacataattaactggttccatcaagactgtgcacccaggccttacagtccaacctttttctgtgtctggctaatatttaaaactagaaaaactattcctaatcaacatggagtggagagtttattcactgtcttatctgcagaaatttgctgtcaatatrtaacccgcctgcagtggaaagtgtatagtgttttgtaataaatggcctgatgctaatgtgtaaatggcaaaggtgtatatagtatattaatgttgactgttaawtcttaagcaagaaacttttttcttgatgagactcacagatctacacaaactacaaaagttaattttcttgttacacccactgcactctgcaaccagtgttgcctgcctcatggcagttggatcagctcctttacaaaaaagaaaaaaaaaaaaccaacagcaacaaaacagagcccatccatgtcagccacaccaatagtttcatgttaattctttgccactggagtcaattttgctatgagcaatgtaaggctggtaattctgatattaggttaatcactttgaagctatagttatgctgtaacatttagcatggcttcacaccaagttagtgtagccaatgaggaaaaagttaccataatgacagcagttgtccgagaagtgacagctgtattactcagagcttttacttcttacacctagaatattaaaatataaaacaaggggagaaatgtgacagtctattttcagttgcacatatgttccttatatataatgtttgacagttcaatctctgggtggaataaagaacacttacgtatcagtaatgggaatttttaaagatttaaaacaaatatgcaaaaatttgctatgccaagatgctggagcataatataagactgtatttggtgtgcttgttttgtttctttggtagagtttattaggtgaatcttctaaaactttccttctgttggatcccagtgacgtggaagtcatcagaaccccacrgtacttggagtacctctctgcacmaagatagctggctgattttctgctcagtcacaattttacttgaaagcaagaattgtcctagctccttttccattattccaaaacgtttaacgttcaaagcagggtctcattaaaaaagaaactactggttgatataattgagatattacaatttcagaataaacatttgattaaaaataaggaaatcctcagttcatactgtatttaaaagagaattggtaacttgaatgtgtgtaattttttggaacctgtctaaaaaccaaatacccctgcaaacagatacagcccaccctattctatttaaatattttgctgttttattttatagaaattattttgctgaattcacaaatagaatttgatttaagaagaactttttgtcctgtggtgtgtttttggttttttttttggttactttttttgtcctttttttttttttttaaaagaggactgcatattaaaattcattctgtgcatagcatgcctaggcatgacactgattcaggatttcagtcacatcaagtttttgtgcacagaaagatttgacctttggccctctactgaagattttgagaaatcaggatgttgacactgtaaaagtttcctaacataatcttgtactt

SEQ ID NO: 2100 - DNA, 9217 bp, Homo sapiens
ggccttgatgttaaaagtgaagcatgtcagcgatttttccgtgatgggctaacaatatcattcactaaaattcttacagatgaagcagtgagtggctggaagtttgaaattcatgtgatctggtggagctatgtgtggccaagttgtcccaagactggtttccacttttagaacttcttgccatggccttaaatcctcattgcaaattccatatctacaatggtacacgtccatgtgaatcagtttcctcaagtgttcagttgcctgaagatgaactctttgctcgttctccagatcctcgatcaccaaagggttggctagtggatcttctcaacaaatttggcactttaaatgggttccagattttgcatgatcgttttattaatggatcagcattaaacgttcaaataattgcagcccttattaaaccatttgggcaatgctatgagtttctcactcttcatacagtgaaaaagtactttcttccaataatagaaatggttccacagtttttagaaaacttaactgatgaagaactgaaaaaagaagcaaagaatgaagccaaaaatgatgctctttcaatgattattaaatctttgaagaatttagcttcaagggttccaggacaagaagaaactgttaaaaacttagaaatatttaggttaaaaatgatacttagattattgcaaatttcttctttcaatggaaagatgaatgcactgaatgaagttaataaggtgatatctagtgtatcatactatactcatcgacatggtaatcctgaggaggaagagtggctcacagctgaacgaatggcagaatggatacagcagaacaatatcttatccatagtgttgcgagatagtcttcatcagccacagtatgtagaaaagttagagaagattcttcgttttgtcatcaaagaaaaagctctgaccttacaggatcttgataatatctgggcagcacaggcagggaaacatgaagccattgtgaagaatgtacatgatctcctggcaaaattggcatgggatttttctcctgaacaacttgatcatctttttgattgttttaaggccagttggacaaatgcgagtaaaaagcaacgtgaaaagctacttgagctgatacgtcgtcttgcagaagatgataaagatggtgtgatggcacacaragtgttgaaccttctgtggaatctggctcacagtgatgatgtgcctgtagatatcatggacctggctctcagtgcccacataaaaatactagattacagttgctcccaggaccgtgatacacaaaagatccaatggatagatcgctttatagaagaacttcgcacaaatgacaaatgggttattcccgcactgaaacaaattagagaaatttgtagtttgtttggtgaagcgcctcaaaatttgagtcaaactcagcgaagtccccatgtgttttatcgccatgacttaatcaatcaacttcaacacaatcatgccctagttactttggtagcagaaaaccttgcaacttacatggaaagcatgagactatatgctagagaccatgaagattatgacccacaaactgtgaggctgggaagtagatatagtcatgttcaagaagttcaagaacggcttaacttccttagatttttattgaaggatggtcagctgtggctatgtgctcctcaggcaaaacaaatatggaaatgcttagctgagaatgcagtttacctttgtgatcgtgaagcctgttttaagtggtattccaagttgatgggggatgaaccagacttagatcctgatattaataaggacttctttgaaagtaatgtgcttcagcttgatccttctctgttaactgaaaatggaatgaagtgttttgagcgattcttcaaagctgtgaattgtcgagaaggaaaactagtagcaaaaaggagagcctatatgatggatgacttggagttaataggattagattacctttggagggtcgtgattcagagtaatgatgatattgccagcagagctatagatctcctcaaagagatatacacgaaccttggtccaagactacaagtcaatcaggtggtgatccatgaagacttcattcagtcttgttttgatcgtctgaaggcttcctatgacacattgtgtgttttggatggtgacaaagacagtgttaattgtgcaagacaggaagctgttcgaatggttcgagtattaactgttttaagggaatatataaatgaatgtgacagtgattatcatgaggaaagaacaattctccctatgtcgagagcattccgcggtaaacacctctcttttgtagttcgatttccaaaccagggcagacaggttgatgacttggaggtatggtctcatacaaatgatacaattggttcagtacgacgatgtattctcaatcgtattaaagccaacgtagcccatacaaaaattgagctctttgtgggcggtgagctgatagatcctgcagatgatagaaagttgattggacaattaaacttaaaagataaatcgcttatyacagccaaacttacacagataagttccaatatgccttcaagccctgatagctcttctgattcctccactggatctcctggaaaccatggtaatcattacagtgatggtcccaatccagaagtggaaagctgtttgcctggagtgataatgtcactgcatcccagatacatctcttttctttggcaagttgcagacttaggtagcagcctaaatatgccaccccttagagatggagcaagagtacttatgaaacttatgccgccagatagcacaacgatagaaaaattaagagctatttgtttagaccatgccaaacttggagaaagcagccttagtccatctcttgactcacttttctttggtccttcagcctcacaagtgctatatctaacagaggtagtctatgccttgttaatgcctgctggtgcacctctggctgatgattcctctgattttcagtttcacttcttgaaaagtggtggcctaccccttgtactgagtatgctaaccagaaataacttcctaccgaatgcagatatggaaactcgaaggggtgcctacctcaatgctcttaaaatagccaagcttttgctaactgccattggctatggtcatgttcgagctgtggcagaagcttgtcagccaggtgtagaaggtgtgaatcccatgacacagatcaaccaagttacccatgatcaagcagtggtgctacaaagtgcccttcagagcattcctaatccatcatccgagtgcatgcttagaaatgtgtcagttcgtcttgctcagcagatatctgatgaggcttcaagatatatgcctgatatttgtgtaattagagctatacaaaaaattatctgggcatcaggatgtgggtcgttacagctagtatttagcccaaatgaagaaatcactaaaatttatgagaagaccaatgcaggcaatgagccagacttggaagacgaacaggtttgctgtgaagcattggaagtgatgaccttatgttttgccttgattccaacagccttagatgctcttagtaaagaaaaggcttggcagacattcatcattgacttactattgcactgtcacagcaaaactgttcgtcaggtggcacaggagcagttctttttaatgtgcaccagatgttgcatgggacaccggcctctacttttcttcattactctactctttactgttttrgggagcacagcaagagagagagctaaacactcaggcgactactttactcttttaagacaccttcttaattacgcttacaatagtaatattaaygtacccaatgctgaagttcttctcaataatgaaattgattggcttaaaagaattagggatgatgttaaaagaacaggagaaacgggtattgaagagacgatcttagagggccaccttggagtgacaaaggagttactggcctttcaaacttctgagaaaaaatttcatattggttgtgaaaaaggaggtgctaatctcattaaagaattaattgatgatttcatatttcctgcatccaatgtttacctacagtatatgagaaatggagagcttccagctgaacaggctattccggtctgtggttcaccacctacaattaatgctggttttgaattacttgtagcattagctgttggctgtgtgaggaatctcaaacaaatagtagattctttgactgaaatgtattacattggcacagcaataactacttgtgaagcacttactgagtgggaatatctgccacctgttggaccccgcccacccaaaggattcgtggggctgaaaaatgccggtgctacttgttacatgaattctgtgattcagcaactctacatgattccttccattaggaacggtattcttgccattgaaggcacaggtagtgatgtagatgatgatatgtctggggatgagaarcaggacaatgagagcaatgttgatcccagggatgatgtatttggatatcctcaacaatttgaagataaaccagcattaagtaaaactgaagatagaaaagagtacaacattggtgtcctaagacaccttcaggtcatctttggtcatttagctgcttctcgactgcaatactatgtgcccagaggattttggaaacagttcaggctttggggtgagcctgttaatctgcgtgaacaacacgatgctttagaattttttaattcattggtggatagtttagatgaagctttaaaagctttaggacatccagctatgctaagtaaagtcttaggaggttcctttgctgatcagaagatctgccaaggctgcccacataggtacgaatgtgaagaatcttttacgaccctaaacgtagacattagaaatcaccaaaatcttcttgattctttggaacagtatgtcaaaggagatttactagaaggtgcaaatgcatatcattgtgaaaaatgcaataaaaaggttgataccgtaaagcgcttgctgattaaaaaattacctcctgttcttgctatacaactaaagcgatttgactatgactgggaaagagaatgtgcaatcaagttcaatgattattttgaatttcctcgagagctggacatggaaccttacacagttgcaggtgtcgcaaagctggaaggggataatgtaaacccagagagtcagttgatacaacagagtgagcagtctgaaagtgagacagcaggaagcacaaaatacagacttgtgggtgtgctcgtacacagtggtcaagcgagtggggggcattattattcttacatcatccaaaggaatggtggagatggtgagagaaatcgctggtataaatttgatgatggtgatgtaacagaatgtaaaatggatgatgacgaagaaatgaaaaaccagtgttttggtggagagtacatgggagaagtgtttgatcacatgatgaagcgtatgtcatacaggcgccagaaaaggtggtggaatgcttatatacttttttatgaacgaatggacacaatagaccaagatgatgagttgataagatatatatcagagcttgctatcaccaccagacctcatcagattattatgccatcagccattgagagaagtgtacggaaacagaacgtacaattcatgcataaccgaatgcagtacagtatggagtattttcagtttatgaaaaaactgcttacatgtaatggcgtttacttaaaccctcctcccgggcaagatcacctgttgcctgaagcagaagaaatcactatgatcagtattcaacttgctgctaggttcctctttactacaggatttcacacaaagaaagtagtccgtggctctgccagtgattggtatgatgcattgtgtattctccttcgtcacagcaagaatgtacgtttttggtttgctcataacgtcctttttaatgtttcaaatcgcttctccgaataccttctggagtgccctagtgcagaagtgaggggtgcgtttgcaaaacttatagtctttattgcacatttttccttgcaagatgggccatgtccttcaccttttgcctctcctggaccttctagtcaggcttatgacaacttaagcttgagtgatcacttactaagagcagtactaaatctcttgagaagggaagtttcagagcatgggcgtcatttacagcagtatttcaacctgtttgtaatgtatgccaatttaggtgtggcagagaagacacagcttctgaaattgagtgtacctgctacttttatgcttgtgtctttagatgaaggtccaggtcctccaatcaaataccagtatgctgaattaggcaaattatactcagtagtgtcacagctgatccgctgttgcaatgtctcttcaagaatgcagtcttcaatcaatggtaatcctcctcttcccaatccttttggtgatcctaatttatcacaacctataatgccaattcagcagaatgtggcagacattttatttgtgagaacaagttatgtgaagaaaatcattgaagactgcagtaattcagaggaaaccgtcaaattgcttcgtttttgctgctgggagaatcctcagttctcatctactgtcctcagtgaacttctctggcaggttgcatattcctatacctatgaactgcggccctatttggatctgcttttgcaaatcttactgattgaggactcctggcaaactcacagaattcataatgcactgaaaggaattccagatgaccgagatgggctgtttgacacaatccagcgctctaagaatcactatcaaaaaagagcataccagtgtataaaatgtatggtagctctatttagtaactgtcctgttgcttaccaaatcctgcagggcaatggagatcttaaaagaaagtggacctgggcagtggaatggcttggagatgaacttgaaagaagaccatatactggcaatcctcagtacacttacaacaattggtctcccccagtgcaaagcaatgaaacgtccaatggttatttcttggagagatcacatagtgctaggatgacacttgcaaaagcttgtgaactctgtccagaggaggagccagatgaccaagatgctccagatgaacatgagtcgcctccacctgaagatgccccattgtacccccattcacctggatctcagtatcaacagaataaccatgtgcatggacagccatatacaggcccagcagcacatcacatgaacaaccctcagagaactggccaacgagcacaagaaaattatgaaggcagtgaagaagtatccccacctcaaaccaaggatcaatgaaatgcacataattaactggttccatcaagactgtgcacccaggccttacagtccaacctttttctgtgtctggctaatatttaaaactagaaaaactattcctaatcaacatggagtggagagtttattcactgtcttatctgcagaaatttgctgtcaatatrtaacccgcctgcagtggaaagtgtatagtgttttgtaataaatggcctgatgctaatgtgtaaatggcaaaggtgtatatagtatattaatgttgactgttaawtcttaagcaagaaacttttttcttgatgagactcacagatctacacaaactacaaaagttaattttcttgttacacccactgcactctgcaaccagtgttgcctgcctcatggcagttggatcagctcctttacaaaaaagaaaaaaaaaaaaccaacagcaacaaaacagagcccatccatgtcagccacaccaatagtttcatgttaattctttgccactggagtcaattttgctatgagcaatgtaaggctggtaacctttaaattatttggttgatgtggaaaattggtgatgtaacactgtttctagatttttttcattgcctttttattctgatattaggttaatcactttgaagctatagttatgctgtaacatttagcatggcttcacaccaagttagtgtagccaatgaggaaaaagttaccataatgacagcagttgtccgagaagtgacagctgtattactcagagcttttacttcttacacctagaatattaaaatataaaacaaggggagaaatgtgacagtctattttcagttgcacatatgttccttatatataatgtttgacagttcaatctctgggtggaataaagaacacttacgtatcagtaatgggaatttttaaagatttaaaacaaatatgcaaaaatttgctatgccaagatgctggagcataatataagactgtatttggtgtgcttgttttgtttctttggtagagtttattaggtgaatcttctaaaactttccttctgttggatcccagtgacgtggaagtcatcagaaccccacrgtacttggagtacctctctgcacmaagatagctggctgattttctgctcagtcacaattttacttgaaagcaagaattgtcctagctccttttccattattccaaaacgtttaacgttcaaagcagggtctcattaaaaaagaaactactggttgatataattgagatattacaatttcagaataaacatttgattaaaaataaggaaatcctcagttcatactgtatttaaaagagaattggtaacttgaatgtgtgtaattttttggaacctgtctaaaaaccaaatacccctgcaaacagatacagcccaccctattctatttaaatattttgctgttttattttatagaaattattttgctgaattcacaaatagaatttgatttaagaagaactttttgtcctgtggtgtgtttttggttttttttttggttactttttttgtcctttttttttttttttaaaagaggactgcatattaaaattcattctgtgcatagcatgcctaggcatgacactgattcaggatttcagtcacatcaagtttttgtgcacagaaagatttgacctttggccctctactgaagattttgagaaatcaggatgttgacactgtaaaagtttcctaacataatcttgtactttttgtatgttttttatatacatgtatatttaatgagcacaagcttggttgtattttttacaattcagttaatagggaaatgttttgtcaaaaggctacacttggaactgaacaaagcagaaacaaaattgagcattgcattattttgtgattaaaaggggcaggtatttaagataaa

SEQ ID NO: 2101 - DNA, 9327 bp, Homo sapiens
ccgggagcgaggagcgagctacttcaaagccaccaggcctggagcggggacagaggcggcgactaggggaaggtgaagccgtcgctgcaggaggaggagcaggaggaggtgacgcaggagaaacgcaccgcccggagcccgtctgagctcagcgagagccccaatgagcaaggtcaaggtgatgccccaccacagcttgaagatgaggaacctgcatttccacatactgacttggccaagttggatgacatgatcaacaggcctcgatgggtggttccagttttgccgaaaggggaattagaagtgcttttagaagctgctattgatcttagtaaaaagggccttgatgttaaaagtgaagcatgtcagcgatttttccgtgatgggctaacaatatcattcactaaaattcttacagatgaagcagtgagtggctggaagtttgaaattcataggtgtattattaacaatactcatcgtctggtggagctatgtgtggccaagttgtcccaagactggtttccacttttagaacttcttgccatggccttaaatcctcattgcaaattccatatctacaatggtacacgtccatgtgaatcagtttcctcaagtgttcagttgcctgaagatgaactctttgctcgttctccagatcctcgatcaccaaagggttggctagtggatcttctcaacaaatttggcactttaaatgggttccagattttgcatgatcgttttattaatggatcagcattaaacgttcaaataattgcagcccttattaaaccatttgggcaatgctatgagtttctcactcttcatacagtgaaaaagtactttcttccaataatagaaatggttccacagtttttagaaaacttaactgatgaagaactgaaaaaagaagcaaagaatgaagccaaaaatgatgctctttcaatgattattaaatctttgaagaatttagcttcaagggttccaggacaagaagaaactgttaaaaacttagaaatatttaggttaaaaatgatacttagattattgcaaatttcttctttcaatggaaagatgaatgcactgaatgaagttaataaggtgatatctagtgtatcatactatactcatcgacatggtaatcctgaggaggaagagtggctcacagctgaacgaatggcagaatggatacagcagaacaatatcttatccatagtgttgcgagatagtcttcatcagccacagtatgtagaaaagttagagaagattcttcgttttgtcatcaaagaaaaagctctgaccttacaggatcttgataatatctgggcagcacaggcagggaaacatgaagccattgtgaagaatgtacatgatctcctggcaaaattggcatgggatttttctcctgaacaacttgatcatctttttgattgttttaaggccagttggacaaatgcgagtaaaaagcaacgtgaaaagctacttgagctgatacgtcgtcttgcagaagatgataaagatggtgtgatggcacacaragtgttgaaccttctgtggaatctggctcacagtgatgatgtgcctgtagatatcatggacctggctctcagtgcccacataaaaatactagattacagttgctcccaggaccgtgatacacaaaagatccaatggatagatcgctttatagaagaacttcgcacaaatgacaaatgggttattcccgcactgaaacaaattagagaaatttgtagtttgtttggtgaagcgcctcaaaatttgagtcaaactcagcgaagtccccatgtgttttatcgccatgacttaatcaatcaacttcaacacaatcatgccctagttactttggtagcagaaaaccttgcaacttacatggaaagcatgagactatatgctagagaccatgaagattatgacccacaaactgtgaggctgggaagtagatatagtcatgttcaagaagttcaagaacggcttaacttccttagatttttattgaaggatggtcagctgtggctatgtgctcctcaggcaaaacaaatatggaaatgcttagctgagaatgcagtttacctttgtgatcgtgaagcctgttttaagtggtattccaagttgatgggggatgaaccagacttagatcctgatattaataaggacttctttgaaagtaatgtgcttcagcttgatccttctctgttaactgaaaatggaatgaagtgttttgagcgattcttcaaagctgtgaattgtcgagaaggaaaactagtagcaaaaaggagagcctatatgatggatgacttggagttaataggattagattacctttggagggtcgtgattcagagtaatgatgatattgccagcagagctatagatctcctcaaagagatatacacgaaccttggtccaagactacaagtcaatcaggtggtgatccatgaagacttcattcagtcttgttttgatcgtctgaaggcttcctatgacacattgtgtgttttggatggtgacaaagacagtgttaattgtgcaagacaggaagctgttcgaatggttcgagtattaactgttttaagggaatatataaatgaatgtgacagtgattatcatgaggaaagaacaattctccctatgtcgagagcattccgcggtaaacacctctcttttgtagttcgatttccaaaccagggcagacaggttgatgacttggaggtatggtctcatacaaatgatacaattggttcagtacgacgatgtattctcaatcgtattaaagccaacgtagcccatacaaaaattgagctctttgtgggcggtgagctgatagatcctgcagatgatagaaagttgattggacaattaaacttaaaagataaatcgcttatyacagccaaacttacacagataagttccaatatgccttcaagccctgatagctcttctgattcctccactggatctcctggaaaccatggtaatcattacagtgatggtcccaatccagaagtggaaagctgtttgcctggagtgataatgtcactgcatcccagatacatctcttttctttggcaagttgcagacttaggtagcagcctaaatatgccaccccttagagatggagcaagagtacttatgaaacttatgccgccagatagcacaacgatagaaaaattaagagctatttgtttagaccatgccaaacttggagaaagcagccttagtccatctcttgactcacttttctttggtccttcagcctcacaagtgctatatctaacagaggtagtctatgccttgttaatgcctgctggtgcacctctggctgatgattcctctgattttcagtttcacttcttgaaaagtggtggcctaccccttgtactgagtatgctaaccagaaataacttcctaccgaatgcagatatggaaactcgaaggggtgcctacctcaatgctcttaaaatagccaagcttttgctaactgccattggctatggtcatgttcgagctgtggcagaagcttgtcagccaggtgtagaaggtgtgaatcccatgacacagatcaaccaagttacccatgatcaagcagtggtgctacaaagtgcccttcagagcattcctaatccatcatccgagtgcatgcttagaaatgtgtcagttcgtcttgctcagcagatatctgatgaggcttcaagatatatgcctgatatttgtgtaattagagctatacaaaaaattatctgggcatcaggatgtgggtcgttacagctagtatttagcccaaatgaagaaatcactaaaatttatgagaagaccaatgcaggcaatgagccagacttggaagacgaacaggtttgctgtgaagcattggaagtgatgaccttatgttttgccttgattccaacagccttagatgctcttagtaaagaaaaggcttggcagacattcatcattgacttactattgcactgtcacagcaaaactgttcgtcaggtggcacaggagcagttctttttaatgtgcaccagatgttgcatgggacaccggcctctacttttcttcattactctactctttactgttttrgggagcacagcaagagagagagctaaacactcaggcgactactttactcttttaagacaccttcttaattacgcttacaatagtaatattaaygtacccaatgctgaagttcttctcaataatgaaattgattggcttaaaagaattagggatgatgttaaaagaacaggagaaacgggtattgaagagacgatcttagagggccaccttggagtgacaaaggagttactggcctttcaaacttctgagaaaaaatttcatattggttgtgaaaaaggaggtgctaatctcattaaagaattaattgatgatttcatatttcctgcatccaatgtttacctacagtatatgagaaatggagagcttccagctgaacaggctattccggtctgtggttcaccacctacaattaatgctggttttgaattacttgtagcattagctgttggctgtgtgaggaatctcaaacaaatagtagattctttgactgaaatgtattacattggcacagcaataactacttgtgaagcacttactgagtgggaatatctgccacctgttggaccccgcccacccaaaggattcgtggggctgaaaaatgccggtgctacttgttacatgaattctgtgattcagcaactctacatgattccttccattaggaacggtattcttgccattgaaggcacaggtagtgatgtagatgatgatatgtctggggatgagaarcaggacaatgagagcaatgttgatcccagggatgatgtatttggatatcctcaacaatttgaagataaaccagcattaagtaaaactgaagatagaaaagagtacaacattggtgtcctaagacaccttcaggtcatctttggtcatttagctgcttctcgactgcaatactatgtgcccagaggattttggaaacagttcaggctttggggtgagcctgttaatctgcgtgaacaacacgatgctttagaattttttaattcattggtggatagtttagatgaagctttaaaagctttaggacatccagctatgctaagtaaagtcttaggaggttcctttgctgatcagaagatctgccaaggctgcccacataggtacgaatgtgaagaatcttttacgaccctaaacgtagacattagaaatcaccaaaatcttcttgattctttggaacagtatgtcaaaggagatttactagaaggtgcaaatgcatatcattgtgaaaaatgcaataaaaaggttgataccgtaaagcgcttgctgattaaaaaattacctcctgttcttgctatacaactaaagcgatttgactatgactgggaaagagaatgtgcaatcaagttcaatgattattttgaatttcctcgagagctggacatggaaccttacacagttgcaggtgtcgcaaagctggaaggggataatgtaaacccagagagtcagttgatacaacagagtgagcagtctgaaagtgagacagcaggaagcacaaaatacagacttgtgggtgtgctcgtacacagtggtcaagcgagtggggggcattattattcttacatcatccaaaggaatggtggagatggtgagagaaatcgctggtataaatttgatgatggtgatgtaacagaatgtaaaatggatgatgacgaagaaatgaaaaaccagtgttttggtggagagtacatgggagaagtgtttgatcacatgatgaagcgtatgtcatacaggcgccagaaaaggtggtggaatgcttatatacttttttatgaacgaatggacacaatagaccaagatgatgagttgataagatatatatcagagcttgctatcaccaccagacctcatcagattattatgccatcagccattgagagaagtgtacggaaacagaacgtacaattcatgcataaccgaatgcagtacagtatggagtattttcagtttatgaaaaaactgcttacatgtaatggcgtttacttaaaccctcctcccgggcaagatcacctgttgcctgaagcagaagaaatcactatgatcagtattcaacttgctgctaggttcctctttactacaggatttcacacaaagaaagtagtccgtggctctgccagtgattggtatgatgcattgtgtattctccttcgtcacagcaagaatgtacgtttttggtttgctcataacgtcctttttaatgtttcaaatcgcttctccgaataccttctggagtgccctagtgcagaagtgaggggtgcgtttgcaaaacttatagtctttattgcacatttttccttgcaagatgggccatgtccttcaccttttgcctctcctggaccttctagtcaggcttatgacaacttaagcttgagtgatcacttactaagagcagtactaaatctcttgagaagggaagtttcagagcatgggcgtcatttacagcagtatttcaacctgtttgtaatgtatgccaatttaggtgtggcagagaagacacagcttctgaaattgagtgtacctgctacttttatgcttgtgtctttagatgaaggtccaggtcctccaatcaaataccagtatgctgaattaggcaaattatactcagtagtgtcacagctgatccgctgttgcaatgtctcttcaagaatgcagtcttcaatcaatggtaatcctcctcttcccaatccttttggtgatcctaatttatcacaacctataatgccaattcagcagaatgtggcagacattttatttgtgagaacaagttatgtgaagaaaatcattgaagactgcagtaattcagaggaaaccgtcaaattgcttcgtttttgctgctgggagaatcctcagttctcatctactgtcctcagtgaacttctctggcaggttgcatattcctatacctatgaactgcggccctatttggatctgcttttgcaaatcttactgattgaggactcctggcaaactcacagaattcataatgcactgaaaggaattccagatgaccgagatgggctgtttgacacaatccagcgctctaagaatcactatcaaaaaagagcataccagtgtataaaatgtatggtagctctatttagtaactgtcctgttgcttaccaaatcctgcagggcaatggagatcttaaaagaaagtggacctgggcagtggaatggcttggagatgaacttgaaagaagaccatatactggcaatcctcagtacacttacaacaattggtctcccccagtgcaaagcaatgaaacgtccaatggttatttcttggagagatcacatagtgctaggatgacacttgcaaaagcttgtgaactctgtccagaggaggagccagatgaccaagatgctccagatgaacatgagtcgcctccacctgaagatgccccattgtacccccattcacctggatctcagtatcaacagaataaccatgtgcatggacagccatatacaggcccagcagcacatcacatgaacaaccctcagagaactggccaacgagcacaagaaaattatgaaggcagtgaagaagtatccccacctcaaaccaaggatcaatgaaatgcacataattaactggttccatcaagactgtgcacccaggccttacagtccaacctttttctgtgtctggctaatatttaaaactagaaaaactattcctaatcaacatggagtggagagtttattcactgtcttatctgcagaaatttgctgtcaatatrtaacccgcctgcagtggaaagtgtatagtgttttgtaataaatggcctgatgctaatgtgtaaatggcaaaggtgtatatagtatattaatgttgactgttaawtcttaagcaagaaacttttttcttgatgagactcacagatctacacaaactacaaaagttaattttcttgttacacccactgcactctgcaaccagtgttgcctgcctcatggcagttggatcagctcctttacaaaaaagaaaaaaaaaaaaccaacagcaacaaaacagagcccatccatgtcagccacaccaatagtttcatgttaattctttgccactggagtcaattttgctatgagcaatgtaaggctggtaattctgatattaggttaatcactttgaagctatagttatgctgtaacatttagcatggcttcacaccaagttagtgtagccaatgaggaaaaagttaccataatgacagcagttgtccgagaagtgacagctgtattactcagagcttttacttcttacacctagaatattaaaatataaaacaaggggagaaatgtgacagtctattttcagttgcacatatgttccttatatataatgtttgacagttcaatctctgggtggaataaagaacacttacgtatcagtaatgggaatttttaaagatttaaaacaaatatgcaaaaatttgctatgccaagatgctggagcataatataagactgtatttggtgtgcttgttttgtttctttggtagagtttattaggtgaatcttctaaaactttccttctgttggatcccagtgacgtggaagtcatcagaaccccacrgtacttggagtacctctctgcacmaagatagctggctgattttctgctcagtcacaattttacttgaaagcaagaattgtcctagctccttttccattattccaaaacgtttaacgttcaaagcagggtctcattaaaaaagaaactactggttgatataattgagatattacaatttcagaataaacatttgattaaaaataaggaaatcctcagttcatactgtatttaaaagagaattggtaacttgaatgtgtgtaattttttggaacctgtctaaaaaccaaatacccctgcaaacagatacagcccaccctattctatttaaatattttgctgttttattttatagaaattattttgctgaattcacaaatagaatttgatttaagaagaactttttgtcctgtggtgtgtttttggttttttttttggttactttttttgtcctttttttttttttttaaaagaggactgcatattaaaattcattctgtgcatagcatgcctaggcatgacactgattcaggatttcagtcacatcaagtttttgtgcacagaaagatttgacctttggccctctactgaagattttgagaaatcaggatgttgacactgtaaaagtttcctaacataatcttgtactt

SEQ ID NO: 2102 - DNA, 9375 bp, Homo sapiens
ccgggagcgaggagcgagctacttcaaagccaccaggcctggagcggggacagaggcggcgactaggggaaggtgaagccgtcgctgcaggaggaggagcaggaggaggtgacgcaggagaaacgcaccgcccggagcccgtctgagctcagcgagagccccaatgagcaaggtcaaggtgatgccccaccacagcttgaagatgaggaacctgcatttccacatactgacttggccaagttggatgacatgatcaacaggcctcgatgggtggttccagttttgccgaaaggggaattagaagtgcttttagaagctgctattgatcttagtaaaaagggccttgatgttaaaagtgaagcatgtcagcgatttttccgtgatgggctaacaatatcattcactaaaattcttacagatgaagcagtgagtggctggaagtttgaaattcataggtgtattattaacaatactcatcgtctggtggagctatgtgtggccaagttgtcccaagactggtttccacttttagaacttcttgccatggccttaaatcctcattgcaaattccatatctacaatggtacacgtccatgtgaatcagtttcctcaagtgttcagttgcctgaagatgaactctttgctcgttctccagatcctcgatcaccaaagggttggctagtggatcttctcaacaaatttggcactttaaatgggttccagattttgcatgatcgttttattaatggatcagcattaaacgttcaaataattgcagcccttattaaaccatttgggcaatgctatgagtttctcactcttcatacagtgaaaaagtactttcttccaataatagaaatggttccacagtttttagaaaacttaactgatgaagaactgaaaaaagaagcaaagaatgaagccaaaaatgatgctctttcaatgattattaaatctttgaagaatttagcttcaagggttccaggacaagaagaaactgttaaaaacttagaaatatttaggttaaaaatgatacttagattattgcaaatttcttctttcaatggaaagatgaatgcactgaatgaagttaataaggtgatatctagtgtatcatactatactcatcgacatggtaatcctgaggaggaagagtggctcacagctgaacgaatggcagaatggatacagcagaacaatatcttatccatagtgttgcgagatagtcttcatcagccacagtatgtagaaaagttagagaagattcttcgttttgtcatcaaagaaaaagctctgaccttacaggatcttgataatatctgggcagcacaggcagggaaacatgaagccattgtgaagaatgtacatgatctcctggcaaaattggcatgggatttttctcctgaacaacttgatcatctttttgattgttttaaggccagttggacaaatgcgagtaaaaagcaacgtgaaaagctacttgagctgatacgtcgtcttgcagaagatgataaagatggtgtgatggcacacaragtgttgaaccttctgtggaatctggctcacagtgatgatgtgcctgtagatatcatggacctggctctcagtgcccacataaaaatactagattacagttgctcccaggaccgtgatacacaaaagatccaatggatagatcgctttatagaagaacttcgcacaaatgacaaatgggttattcccgcactgaaacaaattagagaaatttgtagtttgtttggtgaagcgcctcaaaatttgagtcaaactcagcgaagtccccatgtgttttatcgccatgacttaatcaatcaacttcaacacaatcatgccctagttactttggtagcagaaaaccttgcaacttacatggaaagcatgagactatatgctagagaccatgaagattatgacccacaaactgtgaggctgggaagtagatatagtcatgttcaagaagttcaagaacggcttaacttccttagatttttattgaaggatggtcagctgtggctatgtgctcctcaggcaaaacaaatatggaaatgcttagctgagaatgcagtttacctttgtgatcgtgaagcctgttttaagtggtattccaagttgatgggggatgaaccagacttagatcctgatattaataaggacttctttgaaagtaatgtgcttcagcttgatccttctctgttaactgaaaatggaatgaagtgttttgagcgattcttcaaagctgtgaattgtcgagaaggaaaactagtagcaaaaaggagagcctatatgatggatgacttggagttaataggattagattacctttggagggtcgtgattcagagtaatgatgatattgccagcagagctatagatctcctcaaagagatatacacgaaccttggtccaagactacaagtcaatcaggtggtgatccatgaagacttcattcagtcttgttttgatcgtctgaaggcttcctatgacacattgtgtgttttggatggtgacaaagacagtgttaattgtgcaagacaggaagctgttcgaatggttcgagtattaactgttttaagggaatatataaatgaatgtgacagtgattatcatgaggaaagaacaattctccctatgtcgagagcattccgcggtaaacacctctcttttgtagttcgatttccaaaccagggcagacaggttgatgacttggaggtatggtctcatacaaatgatacaattggttcagtacgacgatgtattctcaatcgtattaaagccaacgtagcccatacaaaaattgagctctttgtgggcggtgagctgatagatcctgcagatgatagaaagttgattggacaattaaacttaaaagataaatcgcttatyacagccaaacttacacagataagttccaatatgccttcaagccctgatagctcttctgattcctccactggatctcctggaaaccatggtaatcattacagtgatggtcccaatccagaagtggaaagctgtttgcctggagtgataatgtcactgcatcccagatacatctcttttctttggcaagttgcagacttaggtagcagcctaaatatgccaccccttagagatggagcaagagtacttatgaaacttatgccgccagatagcacaacgatagaaaaattaagagctatttgtttagaccatgccaaacttggagaaagcagccttagtccatctcttgactcacttttctttggtccttcagcctcacaagtgctatatctaacagaggtagtctatgccttgttaatgcctgctggtgcacctctggctgatgattcctctgattttcagtttcacttcttgaaaagtggtggcctaccccttgtactgagtatgctaaccagaaataacttcctaccgaatgcagatatggaaactcgaaggggtgcctacctcaatgctcttaaaatagccaagcttttgctaactgccattggctatggtcatgttcgagctgtggcagaagcttgtcagccaggtgtagaaggtgtgaatcccatgacacagatcaaccaagttacccatgatcaagcagtggtgctacaaagtgcccttcagagcattcctaatccatcatccgagtgcatgcttagaaatgtgtcagttcgtcttgctcagcagatatctgatgaggcttcaagatatatgcctgatatttgtgtaattagagctatacaaaaaattatctgggcatcaggatgtgggtcgttacagctagtatttagcccaaatgaagaaatcactaaaatttatgagaagaccaatgcaggcaatgagccagacttggaagacgaacaggtttgctgtgaagcattggaagtgatgaccttatgttttgccttgattccaacagccttagatgctcttagtaaagaaaaggcttggcagacattcatcattgacttactattgcactgtcacagcaaaactgttcgtcaggtggcacaggagcagttctttttaatgtgcaccagatgttgcatgggacaccggcctctacttttcttcattactctactctttactgttttrgggagcacagcaagagagagagctaaacactcaggcgactactttactcttttaagacaccttcttaattacgcttacaatagtaatattaaygtacccaatgctgaagttcttctcaataatgaaattgattggcttaaaagaattagggatgatgttaaaagaacaggagaaacgggtattgaagagacgatcttagagggccaccttggagtgacaaaggagttactggcctttcaaacttctgagaaaaaatttcatattggttgtgaaaaaggaggtgctaatctcattaaagaattaattgatgatttcatatttcctgcatccaatgtttacctacagtatatgagaaatggagagcttccagctgaacaggctattccggtctgtggttcaccacctacaattaatgctggttttgaattacttgtagcattagctgttggctgtgtgaggaatctcaaacaaatagtagattctttgactgaaatgtattacattggcacagcaataactacttgtgaagcacttactgagtgggaatatctgccacctgttggaccccgcccacccaaaggattcgtggggctgaaaaatgccggtgctacttgttacatgaattctgtgattcagcaactctacatgattccttccattaggaacggtattcttgccattgaaggcacaggtagtgatgtagatgatgatatgtctggggatgagaarcaggacaatgagagcaatgttgatcccagggatgatgtatttggatatcctcaacaatttgaagataaaccagcattaagtaaaactgaagatagaaaagagtacaacattggtgtcctaagacaccttcaggtcatctttggtcatttagctgcttctcgactgcaatactatgtgcccagaggattttggaaacagttcaggctttggggtgagcctgttaatctgcgtgaacaacacgatgctttagaattttttaattcattggtggatagtttagatgaagctttaaaagctttaggacatccagctatgctaagtaaagtcttaggaggttcctttgctgatcagaagatctgccaaggctgcccacataggtacgaatgtgaagaatcttttacgaccctaaacgtagacattagaaatcaccaaaatcttcttgattctttggaacagtatgtcaaaggagatttactagaaggtgcaaatgcatatcattgtgaaaaatgcaataaaaaggttgataccgtaaagcgcttgctgattaaaaaattacctcctgttcttgctatacaactaaagcgatttgactatgactgggaaagagaatgtgcaatcaagttcaatgattattttgaatttcctcgagagctggacatggaaccttacacagttgcaggtgtcgcaaagctggaaggggataatgtaaacccagagagtcagttgatacaacagagtgagcagtctgaaagtgagacagcaggaagcacaaaatacagacttgtgggtgtgctcgtacacagtggtcaagcgagtggggggcattattattcttacatcatccaaaggaatggtggagatggtgagagaaatcgctggtataaatttgatgatggtgatgtaacagaatgtaaaatggatgatgacgaagaaatgaaaaaccagtgttttggtggagagtacatgggagaagtgtttgatcacatgatgaagcgtatgtcatacaggcgccagaaaaggtggtggaatgcttatatacttttttatgaacgaatggacacaatagaccaagatgatgagttgataagatatatatcagagcttgctatcaccaccagacctcatcagattattatgccatcagccattgagagaagtgtacggaaacagaacgtacaattcatgcataaccgaatgcagtacagtatggagtattttcagtttatgaaaaaactgcttacatgtaatggcgtttacttaaaccctcctcccgggcaagatcacctgttgcctgaagcagaagaaatcactatgatcagtattcaacttgctgctaggttcctctttactacaggatttcacacaaagaaagtagtccgtggctctgccagtgattggtatgatgcattgtgtattctccttcgtcacagcaagaatgtacgtttttggtttgctcataacgtcctttttaatgtttcaaatcgcttctccgaataccttctggagtgccctagtgcagaagtgaggggtgcgtttgcaaaacttatagtctttattgcacatttttccttgcaagatgggccatgtccttcaccttttgcctctcctggaccttctagtcaggcttatgacaacttaagcttgagtgatcacttactaagagcagtactaaatctcttgagaagggaagtttcagagcatgggcgtcatttacagcagtatttcaacctgtttgtaatgtatgccaatttaggtgtggcagagaagacacagcttctgaaattgagtgtacctgctacttttatgcttgtgtctttagatgaaggtccaggtcctccaatcaaataccagtatgctgaattaggcaaattatactcagtagtgtcacagctgatccgctgttgcaatgtctcttcaagaatgcagtcttcaatcaatggtaatcctcctcttcccaatccttttggtgatcctaatttatcacaacctataatgccaattcagcagaatgtggcagacattttatttgtgagaacaagttatgtgaagaaaatcattgaagactgcagtaattcagaggaaaccgtcaaattgcttcgtttttgctgctgggagaatcctcagttctcatctactgtcctcagtgaacttctctggcaggttgcatattcctatacctatgaactgcggccctatttggatctgcttttgcaaatcttactgattgaggactcctggcaaactcacagaattcataatgcactgaaaggaattccagatgaccgagatgggctgtttgacacaatccagcgctctaagaatcactatcaaaaaagagcataccagtgtataaaatgtatggtagctctatttagtaactgtcctgttgcttaccaaatcctgcagggcaatggagatcttaaaagaaagtggacctgggcagtggaatggcttggagatgaacttgaaagaagaccatatactggcaatcctcagtacacttacaacaattggtctcccccagtgcaaagcaatgaaacgtccaatggttatttcttggagagatcacatagtgctaggatgacacttgcaaaagcttgtgaactctgtccagaggaggtaaaaaaagccaccagtgtgcagcagatagaaatggaagagagcaaagagccagatgaccaagatgctccagatgaacatgagtcgcctccacctgaagatgccccattgtacccccattcacctggatctcagtatcaacagaataaccatgtgcatggacagccatatacaggcccagcagcacatcacatgaacaaccctcagagaactggccaacgagcacaagaaaattatgaaggcagtgaagaagtatccccacctcaaaccaaggatcaatgaaatgcacataattaactggttccatcaagactgtgcacccaggccttacagtccaacctttttctgtgtctggctaatatttaaaactagaaaaactattcctaatcaacatggagtggagagtttattcactgtcttatctgcagaaatttgctgtcaatatrtaacccgcctgcagtggaaagtgtatagtgttttgtaataaatggcctgatgctaatgtgtaaatggcaaaggtgtatatagtatattaatgttgactgttaawtcttaagcaagaaacttttttcttgatgagactcacagatctacacaaactacaaaagttaattttcttgttacacccactgcactctgcaaccagtgttgcctgcctcatggcagttggatcagctcctttacaaaaaagaaaaaaaaaaaaccaacagcaacaaaacagagcccatccatgtcagccacaccaatagtttcatgttaattctttgccactggagtcaattttgctatgagcaatgtaaggctggtaattctgatattaggttaatcactttgaagctatagttatgctgtaacatttagcatggcttcacaccaagttagtgtagccaatgaggaaaaagttaccataatgacagcagttgtccgagaagtgacagctgtattactcagagcttttacttcttacacctagaatattaaaatataaaacaaggggagaaatgtgacagtctattttcagttgcacatatgttccttatatataatgtttgacagttcaatctctgggtggaataaagaacacttacgtatcagtaatgggaatttttaaagatttaaaacaaatatgcaaaaatttgctatgccaagatgctggagcataatataagactgtatttggtgtgcttgttttgtttctttggtagagtttattaggtgaatcttctaaaactttccttctgttggatcccagtgacgtggaagtcatcagaaccccacrgtacttggagtacctctctgcacmaagatagctggctgattttctgctcagtcacaattttacttgaaagcaagaattgtcctagctccttttccattattccaaaacgtttaacgttcaaagcagggtctcattaaaaaagaaactactggttgatataattgagatattacaatttcagaataaacatttgattaaaaataaggaaatcctcagttcatactgtatttaaaagagaattggtaacttgaatgtgtgtaattttttggaacctgtctaaaaaccaaatacccctgcaaacagatacagcccaccctattctatttaaatattttgctgttttattttatagaaattattttgctgaattcacaaatagaatttgatttaagaagaactttttgtcctgtggtgtgtttttggttttttttttggttactttttttgtcctttttttttttttttaaaagaggactgcatattaaaattcattctgtgcatagcatgcctaggcatgacactgattcaggatttcagtcacatcaagtttttgtgcacagaaagatttgacctttggccctctactgaagattttgagaaatcaggatgttgacactgtaaaagtttcctaacataatcttgtactt

SEQ ID NO: 2103 - DNA, 9051 bp, Homo sapiens
ggccttgatgttaaaagtgaagcatgtcagcgatttttccgtgatgggctaacaatatcattcactaaaattcttacagatgaagcagtgagtggctggaagtttgaaattcatgtgagtcttgcatttgactttaaaggatcagatttacatagtgatgcctgtgagtgggaagagaggtgtattattaacaatactcatcgtctggtggagctatgtgtggccaagttgtcccaagactggtttccacttttagaacttcttgccatggccttaaatcctcattgcaaattccatatctacaatggtacacgtccatgtgaatcagtttcctcaagtgttcagttgcctgaagatgaactctttgctcgttctccagatcctcgatcaccaaagggttggctagtggatcttctcaacaaatttggcactttaaatgggttccagattttgcatgatcgttttattaatggatcagcattaaacgttcaaataattgcagcccttattaaaccatttgggcaatgctatgagtttctcactcttcatacagtgaaaaagtactttcttccaataatagaaatggttccacagtttttagaaaacttaactgatgaagaactgaaaaaagaagcaaagaatgaagccaaaaatgatgctctttcaatgattattaaatctttgaagaatttagcttcaagggttccaggacaagaagaaactgttaaaaacttagaaatatttaggttaaaaatgatacttagattattgcaaatttcttctttcaatggaaagatgaatgcactgaatgaagttaataaggtgatatctagtgtatcatactatactcatcgacatggtaatcctgaggaggaagagtggctcacagctgaacgaatggcagaatggatacagcagaacaatatcttatccatagtgttgcgagatagtcttcatcagccacagtatgtagaaaagttagagaagattcttcgttttgtcatcaaagaaaaagctctgaccttacaggatcttgataatatctgggcagcacaggcagggaaacatgaagccattgtgaagaatgtacatgatctcctggcaaaattggcatgggatttttctcctgaacaacttgatcatctttttgattgttttaaggccagttggacaaatgcgagtaaaaagcaacgtgaaaagctacttgagctgatacgtcgtcttgcagaagatgataaagatggtgtgatggcacacaragtgttgaaccttctgtggaatctggctcacagtgatgatgtgcctgtagatatcatggacctggctctcagtgcccacataaaaatactagattacagttgctcccaggaccgtgatacacaaaagatccaatggatagatcgctttatagaagaacttcgcacaaatgacaaatgggttattcccgcactgaaacaaattagagaaatttgtagtttgtttggtgaagcgcctcaaaatttgagtcaaactcagcgaagtccccatgtgttttatcgccatgacttaatcaatcaacttcaacacaatcatgccctagttactttggtagcagaaaaccttgcaacttacatggaaagcatgagactatatgctagagaccatgaagattatgacccacaaactgtgaggctgggaagtagatatagtcatgttcaagaagttcaagaacggcttaacttccttagatttttattgaaggatggtcagctgtggctatgtgctcctcaggcaaaacaaatatggaaatgcttagctgagaatgcagtttacctttgtgatcgtgaagcctgttttaagtggtattccaagttgatgggggatgaaccagacttagatcctgatattaataaggacttctttgaaagtaatgtgcttcagcttgatccttctctgttaactgaaaatggaatgaagtgttttgagcgattcttcaaagctgtgaattgtcgagaaggaaaactagtagcaaaaaggagagcctatatgatggatgacttggagttaataggattagattacctttggagggtcgtgattcagagtaatgatgatattgccagcagagctatagatctcctcaaagagatatacacgaaccttggtccaagactacaagtcaatcaggtggtgatccatgaagacttcattcagtcttgttttgatcgtctgaaggcttcctatgacacattgtgtgttttggatggtgacaaagacagtgttaattgtgcaagacaggaagctgttcgaatggttcgagtattaactgttttaagggaatatataaatgaatgtgacagtgattatcatgaggaaagaacaattctccctatgtcgagagcattccgcggtaaacacctctcttttgtagttcgatttccaaaccagggcagacaggttgatgacttggaggtatggtctcatacaaatgatacaattggttcagtacgacgatgtattctcaatcgtattaaagccaacgtagcccatacaaaaattgagctctttgtgggcggtgagctgatagatcctgcagatgatagaaagttgattggacaattaaacttaaaagataaatcgcttatyacagccaaacttacacagataagttccaatatgccttcaagccctgatagctcttctgattcctccactggatctcctggaaaccatggtaatcattacagtgatggtcccaatccagaagtggaaagctgtttgcctggagtgataatgtcactgcatcccagatacatctcttttctttggcaagttgcagacttaggtagcagcctaaatatgccaccccttagagatggagcaagagtacttatgaaacttatgccgccagatagcacaacgatagaaaaattaagagctatttgtttagaccatgccaaacttggagaaagcagccttagtccatctcttgactcacttttctttggtccttcagcctcacaagtgctatatctaacagaggtagtctatgccttgttaatgcctgctggtgcacctctggctgatgattcctctgattttcagtttcacttcttgaaaagtggtggcctaccccttgtactgagtatgctaaccagaaataacttcctaccgaatgcagatatggaaactcgaaggggtgcctacctcaatgctcttaaaatagccaagcttttgctaactgccattggctatggtcatgttcgagctgtggcagaagcttgtcagccaggtgtagaaggtgtgaatcccatgacacagatcaaccaagttacccatgatcaagcagtggtgctacaaagtgcccttcagagcattcctaatccatcatccgagtgcatgcttagaaatgtgtcagttcgtcttgctcagcagatatctgatgaggcttcaagatatatgcctgatatttgtgtaattagagctatacaaaaaattatctgggcatcaggatgtgggtcgttacagctagtatttagcccaaatgaagaaatcactaaaatttatgagaagaccaatgcaggcaatgagccagacttggaagacgaacaggtttgctgtgaagcattggaagtgatgaccttatgttttgccttgattccaacagccttagatgctcttagtaaagaaaaggcttggcagacattcatcattgacttactattgcactgtcacagcaaaactgttcgtcaggtggcacaggagcagttctttttaatgtgcaccagatgttgcatgggacaccggcctctacttttcttcattactctactctttactgttttrgggagcacagcaagagagagagctaaacactcaggcgactactttactcttttaagacaccttcttaattacgcttacaatagtaatattaaygtacccaatgctgaagttcttctcaataatgaaattgattggcttaaaagaattagggatgatgttaaaagaacaggagaaacgggtattgaagagacgatcttagagggccaccttggagtgacaaaggagttactggcctttcaaacttctgagaaaaaatttcatattggttgtgaaaaaggaggtgctaatctcattaaagaattaattgatgatttcatatttcctgcatccaatgtttacctacagtatatgagaaatggagagcttccagctgaacaggctattccggtctgtggttcaccacctacaattaatgctggttttgaattacttgtagcattagctgttggctgtgtgaggaatctcaaacaaatagtagattctttgactgaaatgtattacattggcacagcaataactacttgtgaagcacttactgagtgggaatatctgccacctgttggaccccgcccacccaaaggattcgtggggctgaaaaatgccggtgctacttgttacatgaattctgtgattcagcaactctacatgattccttccattaggaacggtattcttgccattgaaggcacaggtagtgatgtagatgatgatatgtctggggatgagaarcaggacaatgagagcaatgttgatcccagggatgatgtatttggatatcctcaacaatttgaagataaaccagcattaagtaaaactgaagatagaaaagagtacaacattggtgtcctaagacaccttcaggtcatctttggtcatttagctgcttctcgactgcaatactatgtgcccagaggattttggaaacagttcaggctttggggtgagcctgttaatctgcgtgaacaacacgatgctttagaattttttaattcattggtggatagtttagatgaagctttaaaagctttaggacatccagctatgctaagtaaagtcttaggaggttcctttgctgatcagaagatctgccaaggctgcccacataggtacgaatgtgaagaatcttttacgaccctaaacgtagacattagaaatcaccaaaatcttcttgattctttggaacagtatgtcaaaggagatttactagaaggtgcaaatgcatatcattgtgaaaaatgcaataaaaaggttgataccgtaaagcgcttgctgattaaaaaattacctcctgttcttgctatacaactaaagcgatttgactatgactgggaaagagaatgtgcaatcaagttcaatgattattttgaatttcctcgagagctggacatggaaccttacacagttgcaggtgtcgcaaagctggaaggggataatgtaaacccagagagtcagttgatacaacagagtgagcagtctgaaagtgagacagcaggaagcacaaaatacagacttgtgggtgtgctcgtacacagtggtcaagcgagtggggggcattattattcttacatcatccaaaggaatggtggagatggtgagagaaatcgctggtataaatttgatgatggtgatgtaacagaatgtaaaatggatgatgacgaagaaatgaaaaaccagtgttttggtggagagtacatgggagaagtgtttgatcacatgatgaagcgtatgtcatacaggcgccagaaaaggtggtggaatgcttatatacttttttatgaacgaatggacacaatagaccaagatgatgagttgataagatatatatcagagcttgctatcaccaccagacctcatcagattattatgccatcagccattgagagaagtgtacggaaacagaacgtacaattcatgcataaccgaatgcagtacagtatggagtattttcagtttatgaaaaaactgcttacatgtaatggcgtttacttaaaccctcctcccgggcaagatcacctgttgcctgaagcagaagaaatcactatgatcagtattcaacttgctgctaggttcctctttactacaggatttcacacaaagaaagtagtccgtggctctgccagtgattggtatgatgcattgtgtattctccttcgtcacagcaagaatgtacgtttttggtttgctcataacgtcctttttaatgtttcaaatcgcttctccgaataccttctggagtgccctagtgcagaagtgaggggtgcgtttgcaaaacttatagtctttattgcacatttttccttgcaagatgggccatgtccttcaccttttgcctctcctggaccttctagtcaggcttatgacaacttaagcttgagtgatcacttactaagagcagtactaaatctcttgagaagggaagtttcagagcatgggcgtcatttacagcagtatttcaacctgtttgtaatgtatgccaatttaggtgtggcagagaagacacagcttctgaaattgagtgtacctgctacttttatgcttgtgtctttagatgaaggtccaggtcctccaatcaaataccagtatgctgaattaggcaaattatactcagtagtgtcacagctgatccgctgttgcaatgtctcttcaagaatgcagtcttcaatcaatggtaatcctcctcttcccaatccttttggtgatcctaatttatcacaacctataatgccaattcagcagaatgtggcagacattttatttgtgagaacaagttatgtgaagaaaatcattgaagactgcagtaattcagaggaaaccgtcaaattgcttcgtttttgctgctgggagaatcctcagttctcatctactgtcctcagtgaacttctctggcaggttgcatattcctatacctatgaactgcggccctatttggatctgcttttgcaaatcttactgattgaggactcctggcaaactcacagaattcataatgcactgaaaggaattccagatgaccgagatgggctgtttgacacaatccagcgctctaagaatcactatcaaaaaagagcataccagtgtataaaatgtatggtagctctatttagtaactgtcctgttgcttaccaaatcctgcagggcaatggagatcttaaaagaaagtggacctgggcagtggaatggcttggagatgaacttgaaagaagaccatatactggcaatcctcagtacacttacaacaattggtctcccccagtgcaaagcaatgaaacgtccaatggttatttcttggagagatcacatagtgctaggatgacacttgcaaaagcttgtgaactctgtccagaggaggagccagatgaccaagatgctccagatgaacatgagtcgcctccacctgaagatgccccattgtacccccattcacctggatctcagtatcaacagaataaccatgtgcatggacagccatatacaggcccagcagcacatcacatgaacaaccctcagagaactggccaacgagcacaagaaaattatgaaggcagtgaagaagtatccccacctcaaaccaaggatcaatgaaatgcacataattaactggttccatcaagactgtgcacccaggccttacagtccaacctttttctgtgtctggctaatatttaaaactagaaaaactattcctaatcaacatggagtggagagtttattcactgtcttatctgcagaaatttgctgtcaatatrtaacccgcctgcagtggaaagtgtatagtgttttgtaataaatggcctgatgctaatgtgtaaatggcaaaggtgtatatagtatattaatgttgactgttaawtcttaagcaagaaacttttttcttgatgagactcacagatctacacaaactacaaaagttaattttcttgttacacccactgcactctgcaaccagtgttgcctgcctcatggcagttggatcagctcctttacaaaaaagaaaaaaaaaaaaccaacagcaacaaaacagagcccatccatgtcagccacaccaatagtttcatgttaattctttgccactggagtcaattttgctatgagcaatgtaaggctggtaattctgatattaggttaatcactttgaagctatagttatgctgtaacatttagcatggcttcacaccaagttagtgtagccaatgaggaaaaagttaccataatgacagcagttgtccgagaagtgacagctgtattactcagagcttttacttcttacacctagaatattaaaatataaaacaaggggagaaatgtgacagtctattttcagttgcacatatgttccttatatataatgtttgacagttcaatctctgggtggaataaagaacacttacgtatcagtaatgggaatttttaaagatttaaaacaaatatgcaaaaatttgctatgccaagatgctggagcataatataagactgtatttggtgtgcttgttttgtttctttggtagagtttattaggtgaatcttctaaaactttccttctgttggatcccagtgacgtggaagtcatcagaaccccacrgtacttggagtacctctctgcacmaagatagctggctgattttctgctcagtcacaattttacttgaaagcaagaattgtcctagctccttttccattattccaaaacgtttaacgttcaaagcagggtctcattaaaaaagaaactactggttgatataattgagatattacaatttcagaataaacatttgattaaaaataaggaaatcctcagttcatactgtatttaaaagagaattggtaacttgaatgtgtgtaattttttggaacctgtctaaaaaccaaatacccctgcaaacagatacagcccaccctattctatttaaatattttgctgttttattttatagaaattattttgctgaattcacaaatagaatttgatttaagaagaactttttgtcctgtggtgtgtttttggttttttttttggttactttttttgtcctttttttttttttttaaaagaggactgcatattaaaattcattctgtgcatagcatgcctaggcatgacactgattcaggatttcagtcacatcaagtttttgtgcacagaaagatttgacctttggccctctactgaagattttgagaaatcaggatgttgacactgtaaaagtttcctaacataatcttgtactt

SEQ ID NO: 2104 - DNA, 9619 bp, Homo sapiens
cttttctcaagacaactacataagcagacaaaattgcaaagatctgmcctgtgtcgagtatgacagccacgactcgtggctctccggtcggagggaatgacaaccagggccaggctcctgatggacagtctcagccccccctccaacagaatcagacttcatcgcctgattcttccaatgaaaattccccggcaactcccccagatgagcaaggtcaaggtgatgccccaccacagcttgaagatgaggaacctgcatttccacatactgacttggccaagttggatgacatgatcaacaggcctcgatgggtggttccagttttgccgaaaggggaattagaagtgcttttagaagctgctattgatcttagtaaaaagggccttgatgttaaaagtgaagcatgtcagcgatttttccgtgatgggctaacaatatcattcactaaaattcttacagatgaagcagtgagtggctggaagtttgaaattcataggtgtattattaacaatactcatcgtctggtggagctatgtgtggccaagttgtcccaagactggtttccacttttagaacttcttgccatggccttaaatcctcattgcaaattccatatctacaatggtacacgtccatgtgaatcagtttcctcaagtgttcagttgcctgaagatgaactctttgctcgttctccagatcctcgatcaccaaagggttggctagtggatcttctcaacaaatttggcactttaaatgggttccagattttgcatgatcgttttattaatggatcagcattaaacgttcaaataattgcagcccttattaaaccatttgggcaatgctatgagtttctcactcttcatacagtgaaaaagtactttcttccaataatagaaatggttccacagtttttagaaaacttaactgatgaagaactgaaaaaagaagcaaagaatgaagccaaaaatgatgctctttcaatgattattaaatctttgaagaatttagcttcaagggttccaggacaagaagaaactgttaaaaacttagaaatatttaggttaaaaatgatacttagattattgcaaatttcttctttcaatggaaagatgaatgcactgaatgaagttaataaggtgatatctagtgtatcatactatactcatcgacatggtaatcctgaggaggaagagtggctcacagctgaacgaatggcagaatggatacagcagaacaatatcttatccatagtgttgcgagatagtcttcatcagccacagtatgtagaaaagttagagaagattcttcgttttgtcatcaaagaaaaagctctgaccttacaggatcttgataatatctgggcagcacaggcagggaaacatgaagccattgtgaagaatgtacatgatctcctggcaaaattggcatgggatttttctcctgaacaacttgatcatctttttgattgttttaaggccagttggacaaatgcgagtaaaaagcaacgtgaaaagctacttgagctgatacgtcgtcttgcagaagatgataaagatggtgtgatggcacacaragtgttgaaccttctgtggaatctggctcacagtgatgatgtgcctgtagatatcatggacctggctctcagtgcccacataaaaatactagattacagttgctcccaggaccgtgatacacaaaagatccaatggatagatcgctttatagaagaacttcgcacaaatgacaaatgggttattcccgcactgaaacaaattagagaaatttgtagtttgtttggtgaagcgcctcaaaatttgagtcaaactcagcgaagtccccatgtgttttatcgccatgacttaatcaatcaacttcaacacaatcatgccctagttactttggtagcagaaaaccttgcaacttacatggaaagcatgagactatatgctagagaccatgaagattatgacccacaaactgtgaggctgggaagtagatatagtcatgttcaagaagttcaagaacggcttaacttccttagatttttattgaaggatggtcagctgtggctatgtgctcctcaggcaaaacaaatatggaaatgcttagctgagaatgcagtttacctttgtgatcgtgaagcctgttttaagtggtattccaagttgatgggggatgaaccagacttagatcctgatattaataaggacttctttgaaagtaatgtgcttcagcttgatccttctctgttaactgaaaatggaatgaagtgttttgagcgattcttcaaagctgtgaattgtcgagaaggaaaactagtagcaaaaaggagagcctatatgatggatgacttggagttaataggattagattacctttggagggtcgtgattcagagtaatgatgatattgccagcagagctatagatctcctcaaagagatatacacgaaccttggtccaagactacaagtcaatcaggtggtgatccatgaagacttcattcagtcttgttttgatcgtctgaaggcttcctatgacacattgtgtgttttggatggtgacaaagacagtgttaattgtgcaagacaggaagctgttcgaatggttcgagtattaactgttttaagggaatatataaatgaatgtgacagtgattatcatgaggaaagaacaattctccctatgtcgagagcattccgcggtaaacacctctcttttgtagttcgatttccaaaccagggcagacaggttgatgacttggaggtatggtctcatacaaatgatacaattggttcagtacgacgatgtattctcaatcgtattaaagccaacgtagcccatacaaaaattgagctctttgtgggcggtgagctgatagatcctgcagatgatagaaagttgattggacaattaaacttaaaagataaatcgcttatyacagccaaacttacacagataagttccaatatgccttcaagccctgatagctcttctgattcctccactggatctcctggaaaccatggtaatcattacagtgatggtcccaatccagaagtggaaagctgtttgcctggagtgataatgtcactgcatcccagatacatctcttttctttggcaagttgcagacttaggtagcagcctaaatatgccaccccttagagatggagcaagagtacttatgaaacttatgccgccagatagcacaacgatagaaaaattaagagctatttgtttagaccatgccaaacttggagaaagcagccttagtccatctcttgactcacttttctttggtccttcagcctcacaagtgctatatctaacagaggtagtctatgccttgttaatgcctgctggtgcacctctggctgatgattcctctgattttcagtttcacttcttgaaaagtggtggcctaccccttgtactgagtatgctaaccagaaataacttcctaccgaatgcagatatggaaactcgaaggggtgcctacctcaatgctcttaaaatagccaagcttttgctaactgccattggctatggtcatgttcgagctgtggcagaagcttgtcagccaggtgtagaaggtgtgaatcccatgacacagatcaaccaagttacccatgatcaagcagtggtgctacaaagtgcccttcagagcattcctaatccatcatccgagtgcatgcttagaaatgtgtcagttcgtcttgctcagcagatatctgatgaggcttcaagatatatgcctgatatttgtgtaattagagctatacaaaaaattatctgggcatcaggatgtgggtcgttacagctagtatttagcccaaatgaagaaatcactaaaatttatgagaagaccaatgcaggcaatgagccagacttggaagacgaacaggtttgctgtgaagcattggaagtgatgaccttatgttttgccttgattccaacagccttagatgctcttagtaaagaaaaggcttggcagacattcatcattgacttactattgcactgtcacagcaaaactgttcgtcaggtggcacaggagcagttctttttaatgtgcaccagatgttgcatgggacaccggcctctacttttcttcattactctactctttactgttttrgggagcacagcaagagagagagctaaacactcaggcgactactttactcttttaagacaccttcttaattacgcttacaatagtaatattaaygtacccaatgctgaagttcttctcaataatgaaattgattggcttaaaagaattagggatgatgttaaaagaacaggagaaacgggtattgaagagacgatcttagagggccaccttggagtgacaaaggagttactggcctttcaaacttctgagaaaaaatttcatattggttgtgaaaaaggaggtgctaatctcattaaagaattaattgatgatttcatatttcctgcatccaatgtttacctacagtatatgagaaatggagagcttccagctgaacaggctattccggtctgtggttcaccacctacaattaatgctggttttgaattacttgtagcattagctgttggctgtgtgaggaatctcaaacaaatagtagattctttgactgaaatgtattacattggcacagcaataactacttgtgaagcacttactgagtgggaatatctgccacctgttggaccccgcccacccaaaggattcgtggggctgaaaaatgccggtgctacttgttacatgaattctgtgattcagcaactctacatgattccttccattaggaacggtattcttgccattgaaggcacaggtagtgatgtagatgatgatatgtctggggatgagaarcaggacaatgagagcaatgttgatcccagggatgatgtatttggatatcctcaacaatttgaagataaaccagcattaagtaaaactgaagatagaaaagagtacaacattggtgtcctaagacaccttcaggtcatctttggtcatttagctgcttctcgactgcaatactatgtgcccagaggattttggaaacagttcaggctttggggtgagcctgttaatctgcgtgaacaacacgatgctttagaattttttaattcattggtggatagtttagatgaagctttaaaagctttaggacatccagctatgctaagtaaagtcttaggaggttcctttgctgatcagaagatctgccaaggctgcccacataggtacgaatgtgaagaatcttttacgaccctaaacgtagacattagaaatcaccaaaatcttcttgattctttggaacagtatgtcaaaggagatttactagaaggtgcaaatgcatatcattgtgaaaaatgcaataaaaaggttgataccgtaaagcgcttgctgattaaaaaattacctcctgttcttgctatacaactaaagcgatttgactatgactgggaaagagaatgtgcaatcaagttcaatgattattttgaatttcctcgagagctggacatggaaccttacacagttgcaggtgtcgcaaagctggaaggggataatgtaaacccagagagtcagttgatacaacagagtgagcagtctgaaagtgagacagcaggaagcacaaaatacagacttgtgggtgtgctcgtacacagtggtcaagcgagtggggggcattattattcttacatcatccaaaggaatggtggagatggtgagagaaatcgctggtataaatttgatgatggtgatgtaacagaatgtaaaatggatgatgacgaagaaatgaaaaaccagtgttttggtggagagtacatgggagaagtgtttgatcacatgatgaagcgtatgtcatacaggcgccagaaaaggtggtggaatgcttatatacttttttatgaacgaatggacacaatagaccaagatgatgagttgataagatatatatcagagcttgctatcaccaccagacctcatcagattattatgccatcagccattgagagaagtgtacggaaacagaacgtacaattcatgcataaccgaatgcagtacagtatggagtattttcagtttatgaaaaaactgcttacatgtaatggcgtttacttaaaccctcctcccgggcaagatcacctgttgcctgaagcagaagaaatcactatgatcagtattcaacttgctgctaggttcctctttactacaggatttcacacaaagaaagtagtccgtggctctgccagtgattggtatgatgcattgtgtattctccttcgtcacagcaagaatgtacgtttttggtttgctcataacgtcctttttaatgtttcaaatcgcttctccgaataccttctggagtgccctagtgcagaagtgaggggtgcgtttgcaaaacttatagtctttattgcacatttttccttgcaagatgggccatgtccttcaccttttgcctctcctggaccttctagtcaggcttatgacaacttaagcttgagtgatcacttactaagagcagtactaaatctcttgagaagggaagtttcagagcatgggcgtcatttacagcagtatttcaacctgtttgtaatgtatgccaatttaggtgtggcagagaagacacagcttctgaaattgagtgtacctgctacttttatgcttgtgtctttagatgaaggtccaggtcctccaatcaaataccagtatgctgaattaggcaaattatactcagtagtgtcacagctgatccgctgttgcaatgtctcttcaagaatgcagtcttcaatcaatggtaatcctcctcttcccaatccttttggtgatcctaatttatcacaacctataatgccaattcagcagaatgtggcagacattttatttgtgagaacaagttatgtgaagaaaatcattgaagactgcagtaattcagaggaaaccgtcaaattgcttcgtttttgctgctgggagaatcctcagttctcatctactgtcctcagtgaacttctctggcaggttgcatattcctatacctatgaactgcggccctatttggatctgcttttgcaaatcttactgattgaggactcctggcaaactcacagaattcataatgcactgaaaggaattccagatgaccgagatgggctgtttgacacaatccagcgctctaagaatcactatcaaaaaagagcataccagtgtataaaatgtatggtagctctatttagtaactgtcctgttgcttaccaaatcctgcagggcaatggagatcttaaaagaaagtggacctgggcagtggaatggcttggagatgaacttgaaagaagaccatatactggcaatcctcagtacacttacaacaattggtctcccccagtgcaaagcaatgaaacgtccaatggttatttcttggagagatcacatagtgctaggatgacacttgcaaaagcttgtgaactctgtccagaggaggagccagatgaccaagatgctccagatgaacatgagtcgcctccacctgaagatgccccattgtacccccattcacctggatctcagtatcaacagaataaccatgtgcatggacagccatatacaggcccagcagcacatcacatgaacaaccctcagagaactggccaacgagcacaagaaaattatgaaggcagtgaagaagtatccccacctcaaaccaaggatcaatgaaatgcacataattaactggttccatcaagactgtgcacccaggccttacagtccaacctttttctgtgtctggctaatatttaaaactagaaaaactattcctaatcaacatggagtggagagtttattcactgtcttatctgcagaaatttgctgtcaatatrtaacccgcctgcagtggaaagtgtatagtgttttgtaataaatggcctgatgctaatgtgtaaatggcaaaggtgtatatagtatattaatgttgactgttaawtcttaagcaagaaacttttttcttgatgagactcacagatctacacaaactacaaaagttaattttcttgttacacccactgcactctgcaaccagtgttgcctgcctcatggcagttggatcagctcctttacaaaaaagaaaaaaaaaaaaccaacagcaacaaaacagagcccatccatgtcagccacaccaatagtttcatgttaattctttgccactggagtcaattttgctatgagcaatgtaaggctggtaacctttaaattatttggttgatgtggaaaattggtgatgtaacactgtttctagatttttttcattgcctttttattctgatattaggttaatcactttgaagctatagttatgctgtaacatttagcatggcttcacaccaagttagtgtagccaatgaggaaaaagttaccataatgacagcagttgtccgagaagtgacagctgtattactcagagcttttacttcttacacctagaatattaaaatataaaacaaggggagaaatgtgacagtctattttcagttgcacatatgttccttatatataatgtttgacagttcaatctctgggtggaataaagaacacttacgtatcagtaatgggaatttttaaagatttaaaacaaatatgcaaaaatttgctatgccaagatgctggagcataatataagactgtatttggtgtgcttgttttgtttctttggtagagtttattaggtgaatcttctaaaactttccttctgttggatcccagtgacgtggaagtcatcagaaccccacrgtacttggagtacctctctgcacmaagatagctggctgattttctgctcagtcacaattttacttgaaagcaagaattgtcctagctccttttccattattccaaaacgtttaacgttcaaagcagggtctcattaaaaaagaaactactggttgatataattgagatattacaatttcagaataaacatttgattaaaaataaggaaatcctcagttcatactgtatttaaaagagaattggtaacttgaatgtgtgtaattttttggaacctgtctaaaaaccaaatacccctgcaaacagatacagcccaccctattctatttaaatattttgctgttttattttatagaaattattttgctgaattcacaaatagaatttgatttaagaagaactttttgtcctgtggtgtgtttttggttttttttttggttactttttttgtcctttttttttttttttaaaagaggactgcatattaaaattcattctgtgcatagcatgcctaggcatgacactgattcaggatttcagtcacatcaagtttttgtgcacagaaagatttgacctttggccctctactgaagattttgagaaatcaggatgttgacactgtaaaagtttcctaacataatcttgtactttttgtatgttttttatatacatgtatatttaatgagcacaagcttggttgtattttttacaattcagttaatagggaaatgttttgtcaaaaggctacacttggaactgaacaaagcagaaacaaaattgagcattgcattattttgtgattaaaaggggcaggtatttaagataaa

SEQ ID NO: 2105 - DNA, 9265 bp, Homo sapiens
ggccttgatgttaaaagtgaagcatgtcagcgatttttccgtgatgggctaacaatatcattcactaaaattcttacagatgaagcagtgagtggctggaagtttgaaattcatgtgatctggtggagctatgtgtggccaagttgtcccaagactggtttccacttttagaacttcttgccatggccttaaatcctcattgcaaattccatatctacaatggtacacgtccatgtgaatcagtttcctcaagtgttcagttgcctgaagatgaactctttgctcgttctccagatcctcgatcaccaaagggttggctagtggatcttctcaacaaatttggcactttaaatgggttccagattttgcatgatcgttttattaatggatcagcattaaacgttcaaataattgcagcccttattaaaccatttgggcaatgctatgagtttctcactcttcatacagtgaaaaagtactttcttccaataatagaaatggttccacagtttttagaaaacttaactgatgaagaactgaaaaaagaagcaaagaatgaagccaaaaatgatgctctttcaatgattattaaatctttgaagaatttagcttcaagggttccaggacaagaagaaactgttaaaaacttagaaatatttaggttaaaaatgatacttagattattgcaaatttcttctttcaatggaaagatgaatgcactgaatgaagttaataaggtgatatctagtgtatcatactatactcatcgacatggtaatcctgaggaggaagagtggctcacagctgaacgaatggcagaatggatacagcagaacaatatcttatccatagtgttgcgagatagtcttcatcagccacagtatgtagaaaagttagagaagattcttcgttttgtcatcaaagaaaaagctctgaccttacaggatcttgataatatctgggcagcacaggcagggaaacatgaagccattgtgaagaatgtacatgatctcctggcaaaattggcatgggatttttctcctgaacaacttgatcatctttttgattgttttaaggccagttggacaaatgcgagtaaaaagcaacgtgaaaagctacttgagctgatacgtcgtcttgcagaagatgataaagatggtgtgatggcacacaragtgttgaaccttctgtggaatctggctcacagtgatgatgtgcctgtagatatcatggacctggctctcagtgcccacataaaaatactagattacagttgctcccaggaccgtgatacacaaaagatccaatggatagatcgctttatagaagaacttcgcacaaatgacaaatgggttattcccgcactgaaacaaattagagaaatttgtagtttgtttggtgaagcgcctcaaaatttgagtcaaactcagcgaagtccccatgtgttttatcgccatgacttaatcaatcaacttcaacacaatcatgccctagttactttggtagcagaaaaccttgcaacttacatggaaagcatgagactatatgctagagaccatgaagattatgacccacaaactgtgaggctgggaagtagatatagtcatgttcaagaagttcaagaacggcttaacttccttagatttttattgaaggatggtcagctgtggctatgtgctcctcaggcaaaacaaatatggaaatgcttagctgagaatgcagtttacctttgtgatcgtgaagcctgttttaagtggtattccaagttgatgggggatgaaccagacttagatcctgatattaataaggacttctttgaaagtaatgtgcttcagcttgatccttctctgttaactgaaaatggaatgaagtgttttgagcgattcttcaaagctgtgaattgtcgagaaggaaaactagtagcaaaaaggagagcctatatgatggatgacttggagttaataggattagattacctttggagggtcgtgattcagagtaatgatgatattgccagcagagctatagatctcctcaaagagatatacacgaaccttggtccaagactacaagtcaatcaggtggtgatccatgaagacttcattcagtcttgttttgatcgtctgaaggcttcctatgacacattgtgtgttttggatggtgacaaagacagtgttaattgtgcaagacaggaagctgttcgaatggttcgagtattaactgttttaagggaatatataaatgaatgtgacagtgattatcatgaggaaagaacaattctccctatgtcgagagcattccgcggtaaacacctctcttttgtagttcgatttccaaaccagggcagacaggttgatgacttggaggtatggtctcatacaaatgatacaattggttcagtacgacgatgtattctcaatcgtattaaagccaacgtagcccatacaaaaattgagctctttgtgggcggtgagctgatagatcctgcagatgatagaaagttgattggacaattaaacttaaaagataaatcgcttatyacagccaaacttacacagataagttccaatatgccttcaagccctgatagctcttctgattcctccactggatctcctggaaaccatggtaatcattacagtgatggtcccaatccagaagtggaaagctgtttgcctggagtgataatgtcactgcatcccagatacatctcttttctttggcaagttgcagacttaggtagcagcctaaatatgccaccccttagagatggagcaagagtacttatgaaacttatgccgccagatagcacaacgatagaaaaattaagagctatttgtttagaccatgccaaacttggagaaagcagccttagtccatctcttgactcacttttctttggtccttcagcctcacaagtgctatatctaacagaggtagtctatgccttgttaatgcctgctggtgcacctctggctgatgattcctctgattttcagtttcacttcttgaaaagtggtggcctaccccttgtactgagtatgctaaccagaaataacttcctaccgaatgcagatatggaaactcgaaggggtgcctacctcaatgctcttaaaatagccaagcttttgctaactgccattggctatggtcatgttcgagctgtggcagaagcttgtcagccaggtgtagaaggtgtgaatcccatgacacagatcaaccaagttacccatgatcaagcagtggtgctacaaagtgcccttcagagcattcctaatccatcatccgagtgcatgcttagaaatgtgtcagttcgtcttgctcagcagatatctgatgaggcttcaagatatatgcctgatatttgtgtaattagagctatacaaaaaattatctgggcatcaggatgtgggtcgttacagctagtatttagcccaaatgaagaaatcactaaaatttatgagaagaccaatgcaggcaatgagccagacttggaagacgaacaggtttgctgtgaagcattggaagtgatgaccttatgttttgccttgattccaacagccttagatgctcttagtaaagaaaaggcttggcagacattcatcattgacttactattgcactgtcacagcaaaactgttcgtcaggtggcacaggagcagttctttttaatgtgcaccagatgttgcatgggacaccggcctctacttttcttcattactctactctttactgttttrgggagcacagcaagagagagagctaaacactcaggcgactactttactcttttaagacaccttcttaattacgcttacaatagtaatattaaygtacccaatgctgaagttcttctcaataatgaaattgattggcttaaaagaattagggatgatgttaaaagaacaggagaaacgggtattgaagagacgatcttagagggccaccttggagtgacaaaggagttactggcctttcaaacttctgagaaaaaatttcatattggttgtgaaaaaggaggtgctaatctcattaaagaattaattgatgatttcatatttcctgcatccaatgtttacctacagtatatgagaaatggagagcttccagctgaacaggctattccggtctgtggttcaccacctacaattaatgctggttttgaattacttgtagcattagctgttggctgtgtgaggaatctcaaacaaatagtagattctttgactgaaatgtattacattggcacagcaataactacttgtgaagcacttactgagtgggaatatctgccacctgttggaccccgcccacccaaaggattcgtggggctgaaaaatgccggtgctacttgttacatgaattctgtgattcagcaactctacatgattccttccattaggaacggtattcttgccattgaaggcacaggtagtgatgtagatgatgatatgtctggggatgagaarcaggacaatgagagcaatgttgatcccagggatgatgtatttggatatcctcaacaatttgaagataaaccagcattaagtaaaactgaagatagaaaagagtacaacattggtgtcctaagacaccttcaggtcatctttggtcatttagctgcttctcgactgcaatactatgtgcccagaggattttggaaacagttcaggctttggggtgagcctgttaatctgcgtgaacaacacgatgctttagaattttttaattcattggtggatagtttagatgaagctttaaaagctttaggacatccagctatgctaagtaaagtcttaggaggttcctttgctgatcagaagatctgccaaggctgcccacataggtacgaatgtgaagaatcttttacgaccctaaacgtagacattagaaatcaccaaaatcttcttgattctttggaacagtatgtcaaaggagatttactagaaggtgcaaatgcatatcattgtgaaaaatgcaataaaaaggttgataccgtaaagcgcttgctgattaaaaaattacctcctgttcttgctatacaactaaagcgatttgactatgactgggaaagagaatgtgcaatcaagttcaatgattattttgaatttcctcgagagctggacatggaaccttacacagttgcaggtgtcgcaaagctggaaggggataatgtaaacccagagagtcagttgatacaacagagtgagcagtctgaaagtgagacagcaggaagcacaaaatacagacttgtgggtgtgctcgtacacagtggtcaagcgagtggggggcattattattcttacatcatccaaaggaatggtggagatggtgagagaaatcgctggtataaatttgatgatggtgatgtaacagaatgtaaaatggatgatgacgaagaaatgaaaaaccagtgttttggtggagagtacatgggagaagtgtttgatcacatgatgaagcgtatgtcatacaggcgccagaaaaggtggtggaatgcttatatacttttttatgaacgaatggacacaatagaccaagatgatgagttgataagatatatatcagagcttgctatcaccaccagacctcatcagattattatgccatcagccattgagagaagtgtacggaaacagaacgtacaattcatgcataaccgaatgcagtacagtatggagtattttcagtttatgaaaaaactgcttacatgtaatggcgtttacttaaaccctcctcccgggcaagatcacctgttgcctgaagcagaagaaatcactatgatcagtattcaacttgctgctaggttcctctttactacaggatttcacacaaagaaagtagtccgtggctctgccagtgattggtatgatgcattgtgtattctccttcgtcacagcaagaatgtacgtttttggtttgctcataacgtcctttttaatgtttcaaatcgcttctccgaataccttctggagtgccctagtgcagaagtgaggggtgcgtttgcaaaacttatagtctttattgcacatttttccttgcaagatgggccatgtccttcaccttttgcctctcctggaccttctagtcaggcttatgacaacttaagcttgagtgatcacttactaagagcagtactaaatctcttgagaagggaagtttcagagcatgggcgtcatttacagcagtatttcaacctgtttgtaatgtatgccaatttaggtgtggcagagaagacacagcttctgaaattgagtgtacctgctacttttatgcttgtgtctttagatgaaggtccaggtcctccaatcaaataccagtatgctgaattaggcaaattatactcagtagtgtcacagctgatccgctgttgcaatgtctcttcaagaatgcagtcttcaatcaatggtaatcctcctcttcccaatccttttggtgatcctaatttatcacaacctataatgccaattcagcagaatgtggcagacattttatttgtgagaacaagttatgtgaagaaaatcattgaagactgcagtaattcagaggaaaccgtcaaattgcttcgtttttgctgctgggagaatcctcagttctcatctactgtcctcagtgaacttctctggcaggttgcatattcctatacctatgaactgcggccctatttggatctgcttttgcaaatcttactgattgaggactcctggcaaactcacagaattcataatgcactgaaaggaattccagatgaccgagatgggctgtttgacacaatccagcgctctaagaatcactatcaaaaaagagcataccagtgtataaaatgtatggtagctctatttagtaactgtcctgttgcttaccaaatcctgcagggcaatggagatcttaaaagaaagtggacctgggcagtggaatggcttggagatgaacttgaaagaagaccatatactggcaatcctcagtacacttacaacaattggtctcccccagtgcaaagcaatgaaacgtccaatggttatttcttggagagatcacatagtgctaggatgacacttgcaaaagcttgtgaactctgtccagaggaggtaaaaaaagccaccagtgtgcagcagatagaaatggaagagagcaaagagccagatgaccaagatgctccagatgaacatgagtcgcctccacctgaagatgccccattgtacccccattcacctggatctcagtatcaacagaataaccatgtgcatggacagccatatacaggcccagcagcacatcacatgaacaaccctcagagaactggccaacgagcacaagaaaattatgaaggcagtgaagaagtatccccacctcaaaccaaggatcaatgaaatgcacataattaactggttccatcaagactgtgcacccaggccttacagtccaacctttttctgtgtctggctaatatttaaaactagaaaaactattcctaatcaacatggagtggagagtttattcactgtcttatctgcagaaatttgctgtcaatatrtaacccgcctgcagtggaaagtgtatagtgttttgtaataaatggcctgatgctaatgtgtaaatggcaaaggtgtatatagtatattaatgttgactgttaawtcttaagcaagaaacttttttcttgatgagactcacagatctacacaaactacaaaagttaattttcttgttacacccactgcactctgcaaccagtgttgcctgcctcatggcagttggatcagctcctttacaaaaaagaaaaaaaaaaaaccaacagcaacaaaacagagcccatccatgtcagccacaccaatagtttcatgttaattctttgccactggagtcaattttgctatgagcaatgtaaggctggtaacctttaaattatttggttgatgtggaaaattggtgatgtaacactgtttctagatttttttcattgcctttttattctgatattaggttaatcactttgaagctatagttatgctgtaacatttagcatggcttcacaccaagttagtgtagccaatgaggaaaaagttaccataatgacagcagttgtccgagaagtgacagctgtattactcagagcttttacttcttacacctagaatattaaaatataaaacaaggggagaaatgtgacagtctattttcagttgcacatatgttccttatatataatgtttgacagttcaatctctgggtggaataaagaacacttacgtatcagtaatgggaatttttaaagatttaaaacaaatatgcaaaaatttgctatgccaagatgctggagcataatataagactgtatttggtgtgcttgttttgtttctttggtagagtttattaggtgaatcttctaaaactttccttctgttggatcccagtgacgtggaagtcatcagaaccccacrgtacttggagtacctctctgcacmaagatagctggctgattttctgctcagtcacaattttacttgaaagcaagaattgtcctagctccttttccattattccaaaacgtttaacgttcaaagcagggtctcattaaaaaagaaactactggttgatataattgagatattacaatttcagaataaacatttgattaaaaataaggaaatcctcagttcatactgtatttaaaagagaattggtaacttgaatgtgtgtaattttttggaacctgtctaaaaaccaaatacccctgcaaacagatacagcccaccctattctatttaaatattttgctgttttattttatagaaattattttgctgaattcacaaatagaatttgatttaagaagaactttttgtcctgtggtgtgtttttggttttttttttggttactttttttgtcctttttttttttttttaaaagaggactgcatattaaaattcattctgtgcatagcatgcctaggcatgacactgattcaggatttcagtcacatcaagtttttgtgcacagaaagatttgacctttggccctctactgaagattttgagaaatcaggatgttgacactgtaaaagtttcctaacataatcttgtactttttgtatgttttttatatacatgtatatttaatgagcacaagcttggttgtattttttacaattcagttaatagggaaatgttttgtcaaaaggctacacttggaactgaacaaagcagaaacaaaattgagcattgcattattttgtgattaaaaggggcaggtatttaagataaa

SEQ ID NO: 2106 - DNA, 2991 bp, Homo sapiens
ccgccgccggccgggccctccttccggctgggcaaggggccgcggggagcagctcgggacygaaccgagaggtgccgaaggaamcggcgggccgcttgatcccgctgcagacgtaggagatgcctgggacaaggaggccaccttctcagggcaaaagaaaaagaaggtgacaggcgttgagaccaccgaagggaacccatggctaggatcagtttttcctacctctgcccagcctcctggtacttcactgtgcccacagtgagtccatttctccgtcagcggrtggcattcctgggactcttcttcatatcctgtctccttttacttatgttaatcatagactttcgacattggagtgcttcattaccacragataggcaatacgaaaggtatttggctcgagtaggggagcttgaagctactgacactgaagacccaaatctgaattatggacttgttgttgactgtggcagcagtggttcccggatttttgtttatttctggccaagacataatgggaacccccatgacttgctggacatcaaacagatgagagaccgcaacagccaaccagtggttaaaaaaatcaagccaggaatctctgcaatggcagacactccagaacatgccagkgattaccttcgtcctctgctgagctttgctgctgctcatgtgcctgtgaagaagcacaaggagacccctctttacatcctctgcacagcaggcatgaggcttctccctgagaggaagcagttggctatcttggctgacctagtgaaagatttaccmctggagtttgacttcctcttttcacagtctcaagcagaagtgatctctgggaagcaggaaggggtttatgcatggattggaatcaactttgttttgggaagattcgaccacgaggatgaatcagatgctgaggctacccaggaattggcagcaggacggagaaggacagtagggatactggatatgggaggagcctctctccaaattgcttatgaagttcctacctcaacctctgyccttcctgcaaagcaggaagaagctgccaagatcctgctggctgagttcaacctgggctgtgatgtgcaacacactgaacacgtgtacagggtttatgtcacaacttttctgggtttyggaggcaactttgcccggcagcgctacgaagaccttgttctgaatgaaactcttaacaaaaacagattgcttggtcagaagacaggtctgagtcccgacaatccatttctggatccctgcctgccagtgggaytcacagatgtggtggagaggaacagccaagtcttacatgtccgaggaagaggagactgggtgtcttgtggggcaatgctgagccccctgctggctcgctccaacaccagccaggcctcrctcaatggcatatatcaatcgcctattgacttcaacaacagcgagttctayggcttctctgagtttttttattgtacagaggatgtgttgcgcattggtggccgctaccatgggccaacatttgccaaggctgctcaggattactgtggcatggcttggtcggtactaactcagagattcaagaatggcctcttttcatcacatgcagatgagcatcgactcaaatatcagtgttttaaatcggcttggatgtaccaagtcttacatgaaggattccactttccctatgactacccaaacctgcggacagcccagctggtgtatgaccgagaggttcagtggacgctgggagccattctatataaaacacgattcttaccactcagggatcttcggcaggaaggtgtccgacaagcccatggtagctggttccgtctctcctttgtatacaaccactatctcttctttgcctgtatcctggtggtgctactggccatcttcctataccttctgcggctackccgaattcaccaccgacaaacacgagcctcagctccattggacttgctgtggcttgaagaggtggtgcccatgatgggagtacaggtggggccgtgaggctggaccaggactagagaagcttgagcacccccgagttgcygctcattgaattcctccactttcttatatagcctcagatgctgtgattaattccttctccgtacccaggtcttctctgagagaagctataatttaatctgtgaggaactaaatgacaggagattggtgctaatacgggggaccaagctttgtccaagtgaagcaggcttcgactccttctgagaggtctggtgtgttcctagaatctcaccttttcttcccttgctaaagcatgaagtttggcatttggcacactggaagcctggttgaaatgaaatttgtagcatctgatacaaagccagagacattctagcaagtgcagcagccccttctttctctgtaacagagatatcatttatgtggagatccacaacctttaacagggatccaagatctttgcagttcaatcgaccacataggaatttccaggcaccaaaatgatataacttccttgcttccttgacaaagaagccatcatgggtgtgatccaagatccctgtcgtagtgttgatgatgttagtacatgattttaaaggttagaaccccttctaaatgaatggtctgtggaagattttagtatcttatctgatgcctggtatgatgaggatagaaaatttttccatttttatgtgcctcacaggctgtttgggcattaattttgctttttgagccttaagtgtgttagtaggatggagaaactgtgatggggactgggaacctggatttgtctgattttaggtcactgttccctgggcctgtttttgtgagcccttacacaggaagatataaagagagttctttcatttcactgctaaaatcagtatgtagtatggggaatgtatttgggttgtttttaaagaaaaggggaacagaatcaggagagtgggcaaaggcaataaaatcaaagttcttattaattatttctgagaaatagaa

SEQ ID NO: 2107 - DNA, 2955 bp, Homo sapiens
ccgccgccggccgggccctccttccggctgggcaaggggccgcggggagcagctcgggacygaaccgagaggtgccgaaggaamcggcgggccgcttgatcccgctgcagacgtaggagatgcctgggacaaggaggccaccttctcagggcaaaagaaaaagaaggtgacaggcgttgagaccaccgaagggaacccatggctaggatcagtttttcctacctctgcccagcctcctggtacttcactgtgcccacagtgagtccatttctccgtcagcggrtggcattcctgggactcttcttcatatcctgtctccttttacttatgttaatcatagactttcgacattggagtgcttcattaccacragataggcaatacgaaaggtatttggctcgagtaggggagcttgaagctactgacactgaagacccaaatctgaattatggacttgttgttgactgtggcagcagtggttcccggatttttgtttatttctggccaagacataatgggaacccccatgacttgctggacatcaaacagatgagagaccgcaacagccaaccagtggttaaaaaaatcaagccaggaatctctgcaatggcagacactccagaacatgccagkgattaccttcgtcctctgctgagctttgctgctgctcatgtgcctgtgaagaagcacaaggagacccctctttacatcctctgcacagcaggcatgaggcttctccctgagaggaagcagttggctatcttggctgacctagtgaaagatttaccmctggagtttgacttcctcttttcacagtctcaagcagaagtgatctctgggaagcaggaaggggtttatgcatggattggaatcaactttgttttgggaagattcgaccacgaggatggacggagaaggacagtagggatactggatatgggaggagcctctctccaaattgcttatgaagttcctacctcaacctctgyccttcctgcaaagcaggaagaagctgccaagatcctgctggctgagttcaacctgggctgtgatgtgcaacacactgaacacgtgtacagggtttatgtcacaacttttctgggtttyggaggcaactttgcccggcagcgctacgaagaccttgttctgaatgaaactcttaacaaaaacagattgcttggtcagaagacaggtctgagtcccgacaatccatttctggatccctgcctgccagtgggaytcacagatgtggtggagaggaacagccaagtcttacatgtccgaggaagaggagactgggtgtcttgtggggcaatgctgagccccctgctggctcgctccaacaccagccaggcctcrctcaatggcatatatcaatcgcctattgacttcaacaacagcgagttctayggcttctctgagtttttttattgtacagaggatgtgttgcgcattggtggccgctaccatgggccaacatttgccaaggctgctcaggattactgtggcatggcttggtcggtactaactcagagattcaagaatggcctcttttcatcacatgcagatgagcatcgactcaaatatcagtgttttaaatcggcttggatgtaccaagtcttacatgaaggattccactttccctatgactacccaaacctgcggacagcccagctggtgtatgaccgagaggttcagtggacgctgggagccattctatataaaacacgattcttaccactcagggatcttcggcaggaaggtgtccgacaagcccatggtagctggttccgtctctcctttgtatacaaccactatctcttctttgcctgtatcctggtggtgctactggccatcttcctataccttctgcggctackccgaattcaccaccgacaaacacgagcctcagctccattggacttgctgtggcttgaagaggtggtgcccatgatgggagtacaggtggggccgtgaggctggaccaggactagagaagcttgagcacccccgagttgcygctcattgaattcctccactttcttatatagcctcagatgctgtgattaattccttctccgtacccaggtcttctctgagagaagctataatttaatctgtgaggaactaaatgacaggagattggtgctaatacgggggaccaagctttgtccaagtgaagcaggcttcgactccttctgagaggtctggtgtgttcctagaatctcaccttttcttcccttgctaaagcatgaagtttggcatttggcacactggaagcctggttgaaatgaaatttgtagcatctgatacaaagccagagacattctagcaagtgcagcagccccttctttctctgtaacagagatatcatttatgtggagatccacaacctttaacagggatccaagatctttgcagttcaatcgaccacataggaatttccaggcaccaaaatgatataacttccttgcttccttgacaaagaagccatcatgggtgtgatccaagatccctgtcgtagtgttgatgatgttagtacatgattttaaaggttagaaccccttctaaatgaatggtctgtggaagattttagtatcttatctgatgcctggtatgatgaggatagaaaatttttccatttttatgtgcctcacaggctgtttgggcattaattttgctttttgagccttaagtgtgttagtaggatggagaaactgtgatggggactgggaacctggatttgtctgattttaggtcactgttccctgggcctgtttttgtgagcccttacacaggaagatataaagagagttctttcatttcactgctaaaatcagtatgtagtatggggaatgtatttgggttgtttttaaagaaaaggggaacagaatcaggagagtgggcaaaggcaataaaatcaaagttcttattaattatttctgagaaatagaa

SEQ ID NO: 2108 - DNA, 2196 bp, Homo sapiens
gaggccccggtccaatatggcgacctccacgggtcgctggcttctcctccggcttgcactattcggcttcctctgggaagcgtccggcggcctcgactcgggggcctcccgcgacgacgacttgctactgccctatccacgcgcgcgcgcgcgcctcccccgggactgcacacgggtgcgcgccggcaaccgcgagcacgagagttggcctccgcctcccgcgactcccggcgccggcggtctggccgtgcgcaccttcgtgtcgcacttcagggaccgcgcggtggccggccacctgacgcgggccgttgagcccctgcgcaccttctcggtgctggagcccggtggrcccggcggctgcgcggcgagacgacgcgccaccgtggaggagacggcgcgggcggccgactgccgtgtcgcccagaacggcggcttcttccgcatgaactcgggcgagtgcctggggaacgtggtgagcgacgagcggcgggtgagcagctccggggggctgcagaacgcgcagttcgggatccgccgcgacgggaccctggtcaccgggtacctgtctgaggaggaggtgctggacactgagaacccatttgtgcagctgctgagtggggtcgtgtggctgattcgtaatggaagcatctacatcaacgagagccaagccacagagtgtgacgagacacaggagacaggttcctttagcaaatttgtgaatgtgatatcagccaggacggccattggccacgaccggaaagggcagctggtgctctttcatgcagacggccaaacggagcagcgtggcatcaacctgtgggaaatggcggagttcctgctgaaacaggacgtggtcaacgccatcaacctggatgggggtggctctgccacctttgtgctcaacgggaccttggccagttacccgtcagatcactgccaggacaacatgtggcgctgtccccgccaagtgtccaccgtggtgtgtgtgcacgaaccccgctgccagccgcctgactgccacggccacgggacctgcgtggacgggcactgccaatgcaccgggcacttctggcggggtcccggctgtgatgagctggactgtggcccctctaactgcagccagcacggactgtgcacggagaccggctgccgctgtgatgccggatggaccgggtccaactgcagtgaagagtgtccccttggctggcatgggccgggctgccagaggccttgtaagtgtgagcaccattgtccctgtgaccccaagactggcaactgcagcgtctccagagtaaagcagtgtctccagccacctgaagccaccctgagggcgggagaactctcctttttcaccaggaccgcctggctagccctcaccctggcgctggccttcctcctgctgatcagcactgcagcaaacctgtccttgctcctgtccagagcagagaggaaccggcgcctgcatggggactatgcataccacccgctgcaggagatgaayggggagcctctggccgcagagaaggagcagccagggggcgcccacaaccccttcaaggactgaagcctcaagctgcccggggtggcacgtcgcgaaagcttgtttccccacggtctggcttctgcaggggaaatttcaaggccactggcgtggaccatctgggtgtcctcagcccctgtggggcagccaagttcctgatagsacttgtgcctcagcccctcacctggccacctgccagggcacctgcaaccctagcaataccatgctcgctggagaggctcagctgcctgcttytsgcctgcctgtgtctgctgcygagaagcccgtgcccccgggagggctgccgcactgccaaagagtctccctcctcctggggaaggggctgccarcgaaccagactcagtgaccacgtcatgacagaacagcacatcctggccagcacccctggctggagtgggttaaagggacgagtctgccttcctggctgtgacacgggaccccttttctacagacctcatcactggatttgccaactagaattcgatttcctgtcataggaagctccttggaagaagggatggggggatgaratcatgtttacagacctgttttgtcatcctgctgccaagaagttttttaatcacttgaataaattgatataataaaaggagccaccaggtggtgtgtggattctg

SEQ ID NO: 2109 - DNA, 1985 bp, Homo sapiens
acagcaaagttggcccgagatgaccaaattcacattctcaagcaacaccgacgtaaagaactggaaacacggcaaaaacaatatcgatggatggagtggaaccctggcttccccttgagcatcgatgccaaatgccacaaggatttaccccgtgatatccagtttgatagtgaaaaaggagtggactttgttctgaattactccaaagcgatggagaacctgttcatcaaccgcttcatgcacatgttccagtcttcttggaatgacttcgccgactttgagaaaatctttgtcaagatcagcaacactatttctgagcgggtcatgaatcactggcaggaagacctgatgtttggctaccagttcctgaatggctgcaaccctgtgttgatccggcgctgcacagagctgcccragaagctcccggtgaccacggagatggtagagtgcagcctggagcggcagctcagcttggagcaggaggtccagcaagggaacattttcatcgtggactttgagctgctggatggcatcgatgccaacaaaacagacccctgcacactccagttcctggccgctcccatctgcttgctgtataagaacctggccaacaagattgtccccattgccatccagctcaaccaaatcccgggagatgagaaccctattttcctcccttcggatgcaaaatacgactggcttttggccaaaatctgggtgcgttccagtgacttccacgtccaccagaccatcacccaccttctgcgaacacatctggtgtctgaggtttttggcattgcaatgtaccgccagctgcctgctgtgcaccccattttcaagctgctggtggcacacgtgagattcaccattgcaatcaacaccaaggcccgtgagcagctcatctgcgagtgtggcctctttgacaaggccaacgccacagggggcggtgggcacgtgcagatggtgcagagggccatgaaggacctgacctatgcctccctgtgctttcccgaggccatcaaggcccggggcatggagagcaaagaagacatcccctactacttctaccgggacgacgggctcctggtgtgggaagccatcaggacgttcacggccgaggtggtagacatctactacgagggcgaccaggtggtggaggaggacccggagctgcaggacttcgtgaacgatgtctacgtgtacggcatgcggggccgcaagtcctcaggcttccccaagtcggtcaagagccgggagcagctgtcggagtacctgaccgtggtgatcttcaccgcctccgcccagcacgccgcggtcaacttcggccagtacgactggtgctcctggatccccaatgcgcccccaaccatgcgagccccgccaccgactgccaagggcgtggtgaccattgagcagatcgtggacacgctgcccgaccgcggccgctcctgctggcatctgggtgcagtgtgggcgctgagccagttccaggaaaacgaggtgaagctgggcagggcggggcacagccccaggtcaccccaggttaagcggttcctcagcctcagggctttgtgactcgggccycaaggctcacttggagcaaaggaatcctgacttccaaggctggaagggcccagaaggctgcagccgccaccaggtcccccggcctcagcctggacagagctcagggtgtgcagggcaggagagcacacagcccaggctttgctcactgtcaccagagggtcgtgtgtgacgccccctccccccagctattgacaaagttcttgcacatgtgttttaccctggtactccagagggaatgaccaagagtttcctgggttccttccggacacgtgcatctcatttaacctaacaactgaatccggtgtgtcttcgtggatgcacccgctttggggtagctcagtactgcatagaatggccggaccagtccaacctgctccagactgctgggtgtctgagttgtt

SEQ ID NO: 2110 - DNA, 2109 bp, Homo sapiens
acagcaaagttggcccgagatgaccaaattcacattctcaagcaacaccgacgtaaagaactggaaacacggcaaaaacaatatcgatggatggagtggaaccctggcttccccttgagcatcgatgccaaatgccacaaggatttaccccgtgatatccagtttgatagtgaaaaaggagtggactttgttctgaattactccaaagcgatggagaacctgttcatcaaccgcttcatgcacatgttccagtcttcttggaatgacttcgccgactttgagaaaatctttgtcaagatcagcaacactatttctgagcgggtcatgaatcactggcaggaagacctgatgtttggctaccagttcctgaatggctgcaaccctgtgttgatccggcgctgcacagagctgcccragaagctcccggtgaccacggagatggtagagtgcagcctggagcggcagctcagcttggagcaggaggtccagcaagggaacattttcatcgtggactttgagctgctggatggcatcgatgccaacaaaacagacccctgcacactccagttcctggccgctcccatctgcttgctgtataagaacctggccaacaagattgtccccattgccatccagctcaaccaaatcccgggagatgagaaccctattttcctcccttcggatgcaaaatacgactggcttttggccaaaatctgggtgcgttccagtgacttccacgtccaccagaccatcacccaccttctgcgaacacatctggtgtctgaggtttttggcattgcaatgtaccgccagctgcctgctgtgcaccccattttcaagctgctggtggcacacgtgagattcaccattgcaatcaacaccaaggcccgtgagcagctcatctgcgagtgtggcctctttgacaaggccaacgccacagggggcggtgggcacgtgcagatggtgcagagggccatgaaggacctgacctatgcctccctgtgctttcccgaggccatcaaggcccggggcatggagagcaaagaagacatcccctactacttctaccgggacgacgggctcctggtgtgggaagccatcaggacgttcacggccgaggtggtagacatctactacgagggcgaccaggtggtggaggaggacccggagctgcaggacttcgtgaacgatgtctacgtgtacggcatgcggggccgcaagtcctcaggcttccccaagtcggtcaagagccgggagcagctgtcggagtacctgaccgtggtgatcttcaccgcctccgcccagcacgccgcggtcaacttcggccagtacgactggtgctcctggatccccaatgcgcccccaaccatgcgagccccgccaccgactgccaagggcgtggtgaccattgagcagatcgtggacacgctgcccgaccgcggccgctcctgctggcatctgggtgcagtgtgggcgctgagccagttccaggaaaacgagctgttcctgggcatgtacccagaagagcattttatcgagaagcctgtgaaggaagccatggccmgattccgcaagaacctcgaggccattgtmagcgtgattgctgagcgcaacaagaagaagcagctgccatattactacttgtccccagaccggattccgaacagtgtggccatctgagcacactgccagtctcactgtgggaaggccagctgccccagccagatggactccagcctgcctggcaggctgtctggccaggcctcttggcagtcacatctcttcctccgaggccagtacctttccatttattctttgatcttcagggaactgcatagattgatcaaagtgtaaacaccatagggacccattctacacagagcaggactgcacagcgtcctgtccacacccagctcagcatttccacaccaagcagcaacagcaaatcaygaccactgatagatgtctattcttgttggagacatgggatgattattttctgttctatttgtgcttagtccaattccttgcacatagtaggtacccaattcaattactattgaatgaattaagaattggttgccataaaaataaatcagttcatttaaa

SEQ ID NO: 2111 - DNA, 604 bp, Homo sapiens
aagggtccttcaggkaggaggtcctgggtgactttggaagtccgyagtgtctcattgcagataatttttagcttagggcctggtggctaggtyggttctctcctttccagtcggagacytctgccgcaaacatgctccgccagatcatcggtcaggccaagaagcatccgagcttgatccccctctttgtatttattggaactggagctactggagcaacactgtatctcttgcgtctggcattgttcaatccagatgtttgttgggacagaaataacccagagccctggaacaaactgggtcccaatgatcaatacaagttctactcagtgaatgtggattacagcaagctgaagaaggaacgtccagatttctaaatgaaatgtttcactataacgctgctttagaatgaaggtcttccagaagccacatccgcacaattttccacttaaccaggaaatatttctcctctaaatgcatgaaatcatgttggagatctctattgyaatctctattggagattacaatgattaaatcaataaataactgaaacctaaaaaaaaaaaaaaaaccaaaaaaaaaaaaaaaagaaggggccttattt

SEQ ID NO: 2112 - DNA, 942 bp, Homo sapiens
aagggtccttcaggkaggaggtcctgggtgactttggaagtccgyagtgtctcattgcagataatttttagcttagggcctggtggctaggtyggttctctcctttccagtcggagacytctgccgcaaacatgctccgccagatcatcggtcaggccaagaagcatccgagcttgggacagaaataacccagagccctggaacaaactgggtcccaatgatcaatacaagttctactcagtgaatgtggattacagcaagctgaagaaggaacgtccagatttctaaatgaaatgtttcactataacgctgctttagaatgaaggtcttccagaagccacatccgcacaattttccacttaaccaggaaatatttctcctctaaatgcatgaaatcatgttggagatctctattgyaatctctattggagattacaatgattaaatcaataaataactgaaacttgatatgtgtcacttttttatgctgaaagtatgctctgaactttagagtataggaaattaactattagaatttaaagaatttcttgaatttctgtagtttgaaaatacgactttaagctgctttagtaaaacacttccattttgtgtatagactgttggtaacttcactagagcatacataacaactggaactggaaattatacaaaagtaaattgggaaggatactccagcatctgacactggcaaaatggaaacctttgagtttctcttactggctgttgaagtgtgtgcagtttttaacaatggtttttacttggcatctctttgttgtgattttcaaggttataagttgctttggtcctaggattgaagttgaaatctgagtttatcagtgctaaccatggtgctagtrgtcaagagatcttgagaattttggctgctgagtsttggtgcagggtgcaggttttcttttcttt

SEQ ID NO: 2113 - DNA, 1031 bp, Homo sapiens
aagggtccttcaggkaggaggtcctgggtgactttggaagtccgyagtgtctcattgcagataatttttagcttagggcctggtggctaggtyggttctctcctttccagtcggagacytctgccgcaaacatgctccgccagatcatcggtcaggccaagaagcatccgagcttgatccccctctttgtatttattggaactggagctactggagcaacactgtatctcttgcgtctggcattgttcaatccagatgtttgttgggacagaaataacccagagccctggaacaaactgggtcccaatgatcaatacaagttctactcagtgaatgtggattacagcaagctgaagaaggaacgtccagatttctaaatgaaatgtttcactataacgctgctttagaatgaaggtcttccagaagccacatccgcacaattttccacttaaccaggaaatatttctcctctaaatgcatgaaatcatgttggagatctctattgyaatctctattggagattacaatgattaaatcaataaataactgaaacttgatatgtgtcacttttttatgctgaaagtatgctctgaactttagagtataggaaattaactattagaatttaaagaatttcttgaatttctgtagtttgaaaatacgactttaagctgctttagtaaaacacttccattttgtgtatagactgttggtaacttcactagagcatacataacaactggaactggaaattatacaaaagtaaattgggaaggatactccagcatctgacactggcaaaatggaaacctttgagtttctcttactggctgttgaagtgtgtgcagtttttaacaatggtttttacttggcatctctttgttgtgattttcaaggttataagttgctttggtcctaggattgaagttgaaatctgagtttatcagtgctaaccatggtgctagtrgtcaagagatcttgagaattttggctgctgagtsttggtgcagggtgcaggttttcttttcttt

SEQ ID NO: 2114 - DNA, 871 bp, Homo sapiens
gaaaagcgcgcgcggggattccaggagtcgtggtttcttgccttgatgtactggagcaatcagatcacacggcggcttggagagygagtgcaaggttttatgagtggaattagccctcagcagatgggggagccagaaggcagttggagtgggaagaacccagggaccatgggcgcctccaggctctataccctggtgctggtcctgcagcctcagcgagttctcctgggcatgaaaaagcgaggcttcggggccggccggtggaatggctttgggggcaaagtgcaagaaggagagaccatcgaggatggggctaggagggagctgcaggaggagagcggtctgacagtggacgccctgcacaaggtgggccagatcgtgtttgagttcgtgggcgagcctgagctcatggacrtgcatgtcttctgcacagacagcatccaggggacccccgtggagagcgaygaaatgcgcccatgctggttccagctggatcagatccccttcaaggacatgtggcccgaygacagctactggtttccactcctgcttcagaagaagaaattccacgggtacttcaagttccagggtcaggacaccatcctggactacacactccgcgaggtggacacggtctagcgggagcccagggcagcccctgggcaggagaygtggctgctgaacagcygcaaaccatcttcacctgggggcattgagtggcgcagagccrggtttcatctggaattaactggatggaagggaaaataaagctatctagcggtggttttttttttttttttttggagatggagtctctctctgttgcccaggctggagtgcaatggcacgatctcggctcacgtcaacctcc

SEQ ID NO: 2115 - DNA, 759 bp, Homo sapiens
gaaaagcgcgcgcggggattccaggagtcgtggtttcttgccttgatgtactggagcaatcagatcacacggcggcttggagagygagtgcaaggttttatgagtggaattagccctcagcagatgggggagccagaaggcagttggagtgggaagaacccagggaccatgggcgcctccaggctctataccctggtgctggtcctgcagcctcagcgagttctcctgggcatgaaaaagcgaggcttcggggccggccggtggaatggctttgggggcaaagtgcaagaaggagagaccatcgaggatggggctaggagggagctgcaggaggagagcggtctgacagtggacgccctgcacaaggtgggccagatcgtgtttgagttcgtgggcgagcctgagctcatggacrtgcatgtcttctgcacagacagcatccaggggacccccgtggagagcgaygaaatgcgcccatgctggttccagctggatcagatccccttcaaggacatgtggcccgaygacagctactggtttccactcctgcttcagaagaagaaattccacgggtacttcaagttccagggtcaggacaccatcctggactacacactccgcgaggtggacacggtctagcgggagaygtggctgctgaacagcygcaaaccatcttcacctgggggcattgagtggcgcagagccrggtttcatctggaattaactggatggaagggaaaataaagctatctagcggtg

SEQ ID NO: 2116 - DNA, 4671 bp, Homo sapiens
gcttagactgggtacctcttgcccttgcagatgctggatacttatggytgctctaatggtttctttttgtctatctttgaacctttattccagagatccagttgtcatcggtatccaggaagctctcctcttcctcctcctgacgtctacyactacagttgctggttgttgctaaggttgctgccatggtaacatgcacatcctgtttacaccttcatctgggcaagttggtctaagctaggaacctacctaccctggacaacyactatcatcaccacctggggacaccaatcatcgtgacacggagtccaccttccactcagttcccccatcctcttcctcctctcgctgccagacttcatasrgaagaaaggatctagacttcggacggctactcgggagcttattgcacaagatatattcaatctattccctcactgggcccccagagaagcaagaagtaggaagaagttgagacagggaggcaggagacactggtcagttgaagggaaacgctacatcttctctrgttgaggggcttggtaacagcaggcaaaatgacgaacccatcagaccgtgtcttgcctgccaactcgatggccgagagccgtgaaggggactttggctgcacagtaatggaactgaggaagctcatggagctgcgttcragggatgcactgacccagattaatrtccactatggaggtgtacagaatctctgcagtagactgaaaacctcccctgtggaaggtctgtctgggaaccctgcagatctggagaaacgtaggcaggtgtttggacacaacgtgatcccccccaaaaagcccaagactttcttagaattagtgtgggaagctcttcaagatgtcacgctyatcatcctggagattgcagccatcatctccctggtcctgtccttttatcgccctgctggtgaagaaaatgaactgtgtggtcaagtcgcaactaccccagaagatgaaaatgaggcacaagctggctggattgagggggcagccatccttttctcagtgatcatcgtggtgttagtgactgcctttaatgattggagcaaagagaagcaattccgggggctgcagtgccgcattgaacaggagcaaaagttctccatcatccgaaacggtcaactcatccagctccctgtggctgagattgtggttggtgatattgcccaagtcaaatacggtgatctgctgcctgcagatggaatcctgatccaagggaatgatctgaagattgatgagagctctctgacaggggaatctgaccatgtcaagaagtccctggacaaagaccccatgttgctctcagggacccatgtcatggaaggttctggccggatggtggtgacagctgttggtgtcaactctcagactggaatcatccttactctcttgggggtcaatgaggatgacgaaggggagaaaaagaagaaaggtaaaaaacaaggagtccctgaaaatcgcaacaaagcaaagacccaagacggagtggccctggaaatccagccactcaacagccaggagggaatcgacaatgaggaaaaggacaagaaggcagtcaaggtgcctaaaaaggagaagtcagtgctgcagggcaagctgactcgcctggctgttcagattgggaaagccggtctgctcatgtctgctctcacrgttttcatcctgattctatactttgtgattgacaactttgtgataaatcgcagaccatggctccctgagtgtactcccatctacatccagtactttgtcaagttcttcatcatcggcatcactgtactggtggtggctgtgccagaggggctgcctctggctgwcaccatctcactggcctactctgtgaagaaaatgatgaaagacaataacctagtacggcacttggatgcttgtgagaccatgggcaacgccaccgccatctgctctgataagacaggcacgttgaccatgaaccgcatgactgtggtacaagcttatattgggggcatccattaccgtcaaatcccaagccctgatgtcttcctgcccaaagtcctggacctcattgtcaatggcatttctatcaacagtgcttatacctccaagattctgcctccagagaaggagggaggcctgcctcggcaggtgggcaacaagaccgagtgtgctctgctaggctttgtcacagatctgaagcaggattatcaggctgtgcgtaatgaagtgcccgaggagaagctctacaaggtgtacacctttaactcagtgcgcaagtcaatgagcaccgtcatcaggaatcccaacggtggcttccgtatgtacagcaagggcgcctctgagatcatcttgcgcaagtgtaatcgaatcctggaccggaaaggggaagcagtgccwttcaagaataaagacagagatgatatggtacgcactgtcatcgagcccatggcctgtgatggactccggactatctgcatagcttaccgggacttcgatgacacagagccctcttgggacaatgagaatgagatcctcaccgaactgacctgtatcgcggtggtgggcattgaggaccctgtgcgcccagaggtgccagatgctattgccaaatgcaaacaagctggcattactgtcagaatggtgacaggtgacaacatcaacacagcccgggccattgccaccaaatgtggcattctgacacctggggatgacttcctgtgcttagaaggcaaagaattcaaccggctcatccgcaaygagaaaggcgaggtagagcaagaaaagctggacaagatctggcctaagcttcgggtcctggcgcgatcttctcccactgacaagcacaccctggtgaaaggcataattgacagcactgttggggaacaccggcaggtcgtggctgtcactggtgatggcacaaatgacgggcctgctctgaagaaagcggatgttggttttgccatgggcatcgcaggcacagatgtagcaaaggaggcttcagacatcatcctaacagatgacaacttcaccagcattgtgaaggcagtgatgtggggacgaaatgtctatgacagcatctccaagttcctgcagttccagctcactgtcaatgtggtggccgtgattgtagccttcactggagcctgtatcactcaggattccccattgaaagctgtgcagatgttgtgggttaatctgatcatggacacttttgcttcattggccctggccacagagccccctacggaatctctgttgaagcggcgcccctatggccgaaataagcctctgatctcacgcactatgatgaagaacatcttgggccatgcattctatcagctcattgtcatctttatccttgtctttgcrggtgagaaattctttgatattgatagtgggaggaaggcacctctacattcaccacccagccagcactataccattgtttttaacaccttcgtgctgatgcagctcttcaatgaaatcaactcccgaaagatccatggagagaagaaygtcttttcaggcatctaccgcaacattatcttctgctctgtagtcttgggcacattcatctgccagattttcatcgtggaatttgggggtaaacccttcagttgtacaagcctcagcctgtctcagtggctgtggtgtctcttcattgggattggagaacttctgtggggccagttcatctccgcaatacctacccgatccctgaagttcctgaaggaggctgggcatggcaccaccaaagaggagatcaccaaggatgccgagggactggatgagattgaccatgctgagatggagctgcgccgaggccagatcctctggttccggggcctgaaccgtatccagactcagatcaaagtggtcaaagcgttccatagttccctccacgaaagcattcagaaaccctacaaccaaaagtccatccacagcttcatgacccaccctgaattygccatagaggaggagttgccacgaacaccactcctggatgaggaagaggaggaaaatcctgacaaggcttctaagtttgggactagggtgctcctgttggatggtgaggtcactccatatgccaatacaaacaacaatgcggtggattgcaaccaagtgcagctcccccagtcggacagctctctacagagcctagagacatcagtttgaattttctttctctgactctcatccctattttacctatttccattttcgtctrtcccatctatgaggtgatgatgggacttttcatygtcacgtcagctgctgtgttaacagcagtgtgtgtgaagtgaacctctacctgaccatgaagaggcaagagcacagacttacaaggatttcaacttaagcttgacttggggtttgtagcgggacccagtcaaaccccattcaggtcatggtagaatctactccttggtagtcacttgtcatttttaaagaaatgatgacaatcctcttggcatcaccccaccccacattctccccgatgttcctctcctgaattctggattttgtcctacaagtctgtgccatttataagctaagttgagggttcagagggagacaaatatccccgattgtttttcaatttttcccactttgaaaacttacacctaaaggcctgtaggcctctaactctttctgccctttcattcaaacc

SEQ ID NO: 2117 - DNA, 709 bp, Homo sapiens
cgcaacattatcttctgctctgtagtcttgggcacattcatctgccagttcatctccgcaatacctacccgatccctgaagttcctgaaggaggctgggcatggcaccaccaaagaggagatcaccaaggatgccgagggactggatgagattgaccatgctgagatggagctgcgccgaggccagatcctctggttccggggcctgaaccgtatccagactcagatcgacgtaattaacacattccagacgggagcctcttttaagggagtcctaaggcgacagaacatgggtcaacaccttgatgtaaaacttgttcctagttcatcctatgtagcagttgcaccagtcaaatcttcccccaccacttctgttcctgctgtttcatctcctcctatgggcaatcaaagtggtcaaagcgttccatagttccctccacgaaagcattcagaaaccctacaaccaaaagtccatccacagcttcatgacccaccctgaattygccatagaggaggagttgccacgaacaccactcctggatgaggaagaggaggaaaatcctgacaaggcttctaagtttgggactagggtgctcctgttggatggtgaggtcactccatatgccaatacaaacaacaatgcggtggattgcaaccaagtgcagctcccccagtcggacagctctctacagagcctagagacatcagtt

SEQ ID NO: 2118 - DNA, 4280 bp, Homo sapiens
gcttagactgggtacctcttgcccttgcagatgctggatacttatggytgctctaatggtttctttttgtctatctttgaacctttattccagagatccagttgtcatcggtatccaggaagctctcctcttcctcctcctgacgtctacyactacagttgctggttgttgctaaggttgctgccatggtaacatgcacatcctgtttacaccttcatctgggcaagttggtctaagctaggaacctacctaccctggacaacyactatcatcaccacctggggacaccaatcatcgtgacacggagtccaccttccactcagttcccccatcctcttcctcctctcgctgccagacttcatasrgaagaaaggatctagacttcggacggctactcgggagcttattgcacaagatatattcaatctattccctcactgggcccccagagaagcaagaagtaggaagaagttgagacagggaggcaggagacactggtcagttgaagggaaacgctacatcttctctrgttgaggggcttggtaacagcaggcaaaatgacgaacccatcagaccgtgtcttgcctgccaactcgatggccgagagccgtgaaggggactttggctgcacagtaatggaactgaggaagctcatggagctgcgttcragggatgcactgacccagattaatrtccactatggaggtgtacagaatctctgcagtagactgaaaacctcccctgtggaaggtctgtctgggaaccctgcagatctggagaaacgtaggcaggtgtttggacacaacgtgatcccccccaaaaagcccaagactttcttagaattagtgtgggaagctcttcaagatgtcacgctyatcatcctggagattgcagccatcatctccctggtcctgtccttttatcgccctgctggtgaagaaaatgaactgtgtggtcaagtcgcaactaccccagaagatgaaaatgaggcacaagctggctggattgagggggcagccatccttttctcagtgatcatcgtggtgttagtgactgcctttaatgattggagcaaagagaagcaattccgggggctgcagtgccgcattgaacaggagcaaaagttctccatcatccgaaacggtcaactcatccagctccctgtggctgagattgtggttggtgatattgcccaagtcaaatacggtgatctgctgcctgcagatggaatcctgatccaagggaatgatctgaagattgatgagagctctctgacaggggaatctgaccatgtcaagaagtccctggacaaagaccccatgttgctctcagggacccatgtcatggaaggttctggccggatggtggtgacagctgttggtgtcaactctcagactggaatcatccttactctcttgggggtcaatgaggatgacgaaggggagaaaaagaagaaaggtaaaaaacaaggagtccctgaaaatcgcaacaaagcaaagacccaagacggagtggccctggaaatccagccactcaacagccaggagggaatcgacaatgaggaaaaggacaagaaggcagtcaaggtgcctaaaaaggagaagtcagtgctgcagggcaagctgactcgcctggctgttcagattgggaaagccggtctgctcatgtctgctctcacrgttttcatcctgattctatactttgtgattgacaactttgtgataaatcgcagaccatggctccctgagtgtactcccatctacatccagtactttgtcaagttcttcatcatcggcatcactgtactggtggtggctgtgccagaggggctgcctctggctgwcaccatctcactggcctactctgtgaagaaaatgatgaaagacaataacctagtacggcacttggatgcttgtgagaccatgggcaacgccaccgccatctgctctgataagacaggcacgttgaccatgaaccgcatgactgtggtacaagcttatattgggggcatccattaccgtcaaatcccaagccctgatgtcttcctgcccaaagtcctggacctcattgtcaatggcatttctatcaacagtgcttatacctccaagattctgcctccagagaaggagggaggcctgcctcggcaggtgggcaacaagaccgagtgtgctctgctaggctttgtcacagatctgaagcaggattatcaggctgtgcgtaatgaagtgcccgaggagaagctctacaaggtgtacacctttaactcagtgcgcaagtcaatgagcaccgtcatcaggaatcccaacggtggcttccgtatgtacagcaagggcgcctctgagatcatcttgcgcaagtgtaatcgaatcctggaccggaaaggggaagcagtgccwttcaagaataaagacagagatgatatggtacgcactgtcatcgagcccatggcctgtgatggactccggactatctgcatagcttaccgggacttcgatgacacagagccctcttgggacaatgagaatgagatcctcaccgaactgacctgtatcgcggtggtgggcattgaggaccctgtgcgcccagaggtgccagatgctattgccaaatgcaaacaagctggcattactgtcagaatggtgacaggtgacaacatcaacacagcccgggccattgccaccaaatgtggcattctgacacctggggatgacttcctgtgcttagaaggcaaagaattcaaccggctcatccgcaaygagaaaggcgaggtagagcaagaaaagctggacaagatctggcctaagcttcgggtcctggcgcgatcttctcccactgacaagcacaccctggtgaaaggcataattgacagcactgttggggaacaccggcaggtcgtggctgtcactggtgatggcacaaatgacgggcctgctctgaagaaagcggatgttggttttgccatgggcatcgcaggcacagatgtagcaaaggaggcttcagacatcatcctaacagatgacaacttcaccagcattgtgaaggcagtgatgtggggacgaaatgtctatgacagcatctccaagttcctgcagttccagctcactgtcaatgtggtggccgtgattgtagccttcactggagcctgtatcactcaggattccccattgaaagctgtgcagatgttgtgggttaatctgatcatggacacttttgcttcattggccctggccacagagccccctacggaatctctgttgaagcggcgcccctatggccgaaataagcctctgatctcacgcactatgatgaagaacatcttgggccatgcattctatcagctcattgtcatctttatccttgtctttgcrggtgagaaattctttgatattgatagtgggaggaaggcacctctacattcaccacccagccagcactataccattgtttttaacaccttcgtgctgatgcagctcttcaatgaaatcaactcccgaaagatccatggagagaagaaygtcttttcaggcatctaccgcaacattatcttctgctctgtagtcttgggcacattcatctgccagattttcatcgtggaatttgggggtaaacccttcagttgtacaagcctcagcctgtctcagtggctgtggtgtctcttcattgggattggagaacttctgtggggccagttcatctccgcaatacctacccgatccctgaagttcctgaaggaggctgggcatggcaccaccaaagaggagatcaccaaggatgccgagggactggatgagattgaccatgctgagatggagctgcgccgaggccagatcctctggttccggggcctgaaccgtatccagactcagatcgacgtaattaacacattccagacgggagcctcttttaagggagtcctaaggcgacagaacatgggtcaacaccttgatgtaaaacttgttcctagttcatcctatatcaaagtggtcaaagcgttccatagttccctccacgaaagcattcagaaaccctacaaccaaaagtccatccacagcttcatgacccaccctgaattygccatagaggaggagttgccacgaacaccactcctggatgaggaagaggaggaaaatcctgacaaggcttctaagtttgggactagggtgctcctgttggatggtgaggtcactccatatgccaatacaaacaacaatgcggtggattgcaaccaagtgcagctcccccagtcggacagctctctacagagcctagagacatcagtt

SEQ ID NO: 2119 - DNA, 4639 bp, Homo sapiens
gcttagactgggtacctcttgcccttgcagatgctggatacttatggytgctctaatggtttctttttgtctatctttgaacctttattccagagatccagttgtcatcggtatccaggaagctctcctcttcctcctcctgacgtctacyactacagttgctggttgttgctaaggttgctgccatggtaacatgcacatcctgtttacaccttcatctgggcaagttggtctaagctaggaacctacctaccctggacaacyactatcatcaccacctggggacaccaatcatcgtgacacggagtccaccttccactcagttcccccatcctcttcctcctctcgctgccagacttcatasrgaagaaaggatctagacttcggacggctactcgggagcttattgcacaagatatattcaatctattccctcactgggcccccagagaagcaagaagtaggaagaagttgagacagggaggcaggagacactggtcagttgaagggaaacgctacatcttctctrgttgaggggcttggtaacagcaggcaaaatgacgaacccatcagaccgtgtcttgcctgccaactcgatggccgagagccgtgaaggggactttggctgcacagtaatggaactgaggaagctcatggagctgcgttcragggatgcactgacccagattaatrtccactatggaggtgtacagaatctctgcagtagactgaaaacctcccctgtggaaggtctgtctgggaaccctgcagatctggagaaacgtaggcaggtgtttggacacaacgtgatcccccccaaaaagcccaagactttcttagaattagtgtgggaagctcttcaagatgtcacgctyatcatcctggagattgcagccatcatctccctggtcctgtccttttatcgccctgctggtgaagaaaatgaactgtgtggtcaagtcgcaactaccccagaagatgaaaatgaggcacaagctggctggattgagggggcagccatccttttctcagtgatcatcgtggtgttagtgactgcctttaatgattggagcaaagagaagcaattccgggggctgcagtgccgcattgaacaggagcaaaagttctccatcatccgaaacggtcaactcatccagctccctgtggctgagattgtggttggtgatattgcccaagtcaaatacggtgatctgctgcctgcagatggaatcctgatccaagggaatgatctgaagattgatgagagctctctgacaggggaatctgaccatgtcaagaagtccctggacaaagaccccatgttgctctcagggacccatgtcatggaaggttctggccggatggtggtgacagctgttggtgtcaactctcagactggaatcatccttactctcttgggggtcaatgaggatgacgaaggggagaaaaagaagaaaggtaaaaaacaaggagtccctgaaaatcgcaacaaagcaaagacccaagacggagtggccctggaaatccagccactcaacagccaggagggaatcgacaatgaggaaaaggacaagaaggcagtcaaggtgcctaaaaaggagaagtcagtgctgcagggcaagctgactcgcctggctgttcagattgggaaagccggtctgctcatgtctgctctcacrgttttcatcctgattctatactttgtgattgacaactttgtgataaatcgcagaccatggctccctgagtgtactcccatctacatccagtactttgtcaagttcttcatcatcggcatcactgtactggtggtggctgtgccagaggggctgcctctggctgwcaccatctcactggcctactctgtgaagaaaatgatgaaagacaataacctagtacggcacttggatgcttgtgagaccatgggcaacgccaccgccatctgctctgataagacaggcacgttgaccatgaaccgcatgactgtggtacaagcttatattgggggcatccattaccgtcaaatcccaagccctgatgtcttcctgcccaaagtcctggacctcattgtcaatggcatttctatcaacagtgcttatacctccaagattctgcctccagagaaggagggaggcctgcctcggcaggtgggcaacaagaccgagtgtgctctgctaggctttgtcacagatctgaagcaggattatcaggctgtgcgtaatgaagtgcccgaggagaagctctacaaggtgtacacctttaactcagtgcgcaagtcaatgagcaccgtcatcaggaatcccaacggtggcttccgtatgtacagcaagggcgcctctgagatcatcttgcgcaagtgtaatcgaatcctggaccggaaaggggaagcagtgccwttcaagaataaagacagagatgatatggtacgcactgtcatcgagcccatggcctgtgatggactccggactatctgcatagcttaccgggacttcgatgacacagagccctcttgggacaatgagaatgagatcctcaccgaactgacctgtatcgcggtggtgggcattgaggaccctgtgcgcccagaggtgccagatgctattgccaaatgcaaacaagctggcattactgtcagaatggtgacaggtgacaacatcaacacagcccgggccattgccaccaaatgtggcattctgacacctggggatgacttcctgtgcttagaaggcaaagaattcaaccggctcatccgcaaygagaaaggcgaggtagagcaagaaaagctggacaagatctggcctaagcttcgggtcctggcgcgatcttctcccactgacaagcacaccctggtgaaaggcataattgacagcactgttggggaacaccggcaggtcgtggctgtcactggtgatggcacaaatgacgggcctgctctgaagaaagcggatgttggttttgccatgggcatcgcaggcacagatgtagcaaaggaggcttcagacatcatcctaacagatgacaacttcaccagcattgtgaaggcagtgatgtggggacgaaatgtctatgacagcatctccaagttcctgcagttccagctcactgtcaatgtggtggccgtgattgtagccttcactggagcctgtatcactcaggattccccattgaaagctgtgcagatgttgtgggttaatctgatcatggacacttttgcttcattggccctggccacagagccccctacggaatctctgttgaagcggcgcccctatggccgaaataagcctctgatctcacgcactatgatgaagaacatcttgggccatgcattctatcagctcattgtcatctttatccttgtctttgcrggtgagaaattctttgatattgatagtgggaggaaggcacctctacattcaccacccagccagcactataccattgtttttaacaccttcgtgctgatgcagctcttcaatgaaatcaactcccgaaagatccatggagagaagaaygtcttttcaggcatctaccgcaacattatcttctgctctgtagtcttgggcacattcatctgccagattttcatcgtggaatttgggggtaaacccttcagttgtacaagcctcagcctgtctcagtggctgtggtgtctcttcattgggattggagaacttctgtggggccagttcatctccgcaatacctacccgatccctgaagttcctgaaggaggctgggcatggcaccaccaaagaggagatcaccaaggatgccgagggactggatgagattgaccatgctgagatggagctgcgccgaggccagatcctctggttccggggcctgaaccgtatccagactcagatcaaagtggtcaaagcgttccatagttccctccacgaaagcattcagaaaccctacaaccaaaagtccatccacagcttcatgacccaccctgaattygccatagaggaggagttgccacgaacaccactcctggatgaggaagaggaggaaaatcctgacaaggcttctaagtttgggactagggtgctcctgttggatggtgaggtcactccatatgccaatacaaacaacaatgcggtggattgcaaccaagtgcagctcccccagtcggacagctctctacagagcctagagacatcagtttgaattttctttctctgactctcatccctattttacctatttccattttcgtctrtcccatctatgaggtgatgatgggacttttcatygtcacgtcagctgctgtgttaacagcagtgtgtgtgaagtgaacctctacctgaccatgaagaggcaagagcacagacttacaaggatttcaacttaagcttgacttggggtttgtagcgggacccagtcaaaccccattcaggtcatggtagaatctactccttggtagtcacttgtcatttttaaagaaatgatgacaatcctcttggcatcaccccaccccacattctccccgatgttcctctcctgaattctggattttgtcctacaagtctgtgccatttataagctaagttgagggttcagagggagacaaatatccccaagtgaaatatgttgcggtagagatggaatgtataaaatccgccagtagtgtg

SEQ ID NO: 2120 - DNA, 4350 bp, Homo sapiens
gcttagactgggtacctcttgcccttgcagatgctggatacttatggytgctctaatggtttctttttgtctatctttgaacctttattccagagatccagttgtcatcggtatccaggaagctctcctcttcctcctcctgacgtctacyactacagttgctggttgttgctaaggttgctgccatggtaacatgcacatcctgtttacaccttcatctgggcaagttggtctaagctaggaacctacctaccctggacaacyactatcatcaccacctggggacaccaatcatcgtgacacggagtccaccttccactcagttcccccatcctcttcctcctctcgctgccagacttcatasrgaagaaaggatctagacttcggacggctactcgggagcttattgcacaagatatattcaatctattccctcactgggcccccagagaagcaagaagtaggaagaagttgagacagggaggcaggagacactggtcagttgaagggaaacgctacatcttctctrgttgaggggcttggtaacagcaggcaaaatgacgaacccatcagaccgtgtcttgcctgccaactcgatggccgagagccgtgaaggggactttggctgcacagtaatggaactgaggaagctcatggagctgcgttcragggatgcactgacccagattaatrtccactatggaggtgtacagaatctctgcagtagactgaaaacctcccctgtggaaggtctgtctgggaaccctgcagatctggagaaacgtaggcaggtgtttggacacaacgtgatcccccccaaaaagcccaagactttcttagaattagtgtgggaagctcttcaagatgtcacgctyatcatcctggagattgcagccatcatctccctggtcctgtccttttatcgccctgctggtgaagaaaatgaactgtgtggtcaagtcgcaactaccccagaagatgaaaatgaggcacaagctggctggattgagggggcagccatccttttctcagtgatcatcgtggtgttagtgactgcctttaatgattggagcaaagagaagcaattccgggggctgcagtgccgcattgaacaggagcaaaagttctccatcatccgaaacggtcaactcatccagctccctgtggctgagattgtggttggtgatattgcccaagtcaaatacggtgatctgctgcctgcagatggaatcctgatccaagggaatgatctgaagattgatgagagctctctgacaggggaatctgaccatgtcaagaagtccctggacaaagaccccatgttgctctcagggacccatgtcatggaaggttctggccggatggtggtgacagctgttggtgtcaactctcagactggaatcatccttactctcttgggggtcaatgaggatgacgaaggggagaaaaagaagaaaggtaaaaaacaaggagtccctgaaaatcgcaacaaagcaaagacccaagacggagtggccctggaaatccagccactcaacagccaggagggaatcgacaatgaggaaaaggacaagaaggcagtcaaggtgcctaaaaaggagaagtcagtgctgcagggcaagctgactcgcctggctgttcagattgggaaagccggtctgctcatgtctgctctcacrgttttcatcctgattctatactttgtgattgacaactttgtgataaatcgcagaccatggctccctgagtgtactcccatctacatccagtactttgtcaagttcttcatcatcggcatcactgtactggtggtggctgtgccagaggggctgcctctggctgwcaccatctcactggcctactctgtgaagaaaatgatgaaagacaataacctagtacggcacttggatgcttgtgagaccatgggcaacgccaccgccatctgctctgataagacaggcacgttgaccatgaaccgcatgactgtggtacaagcttatattgggggcatccattaccgtcaaatcccaagccctgatgtcttcctgcccaaagtcctggacctcattgtcaatggcatttctatcaacagtgcttatacctccaagattctgcctccagagaaggagggaggcctgcctcggcaggtgggcaacaagaccgagtgtgctctgctaggctttgtcacagatctgaagcaggattatcaggctgtgcgtaatgaagtgcccgaggagaagctctacaaggtgtacacctttaactcagtgcgcaagtcaatgagcaccgtcatcaggaatcccaacggtggcttccgtatgtacagcaagggcgcctctgagatcatcttgcgcaagtgtaatcgaatcctggaccggaaaggggaagcagtgccwttcaagaataaagacagagatgatatggtacgcactgtcatcgagcccatggcctgtgatggactccggactatctgcatagcttaccgggacttcgatgacacagagccctcttgggacaatgagaatgagatcctcaccgaactgacctgtatcgcggtggtgggcattgaggaccctgtgcgcccagaggtgccagatgctattgccaaatgcaaacaagctggcattactgtcagaatggtgacaggtgacaacatcaacacagcccgggccattgccaccaaatgtggcattctgacacctggggatgacttcctgtgcttagaaggcaaagaattcaaccggctcatccgcaaygagaaaggcgaggtagagcaagaaaagctggacaagatctggcctaagcttcgggtcctggcgcgatcttctcccactgacaagcacaccctggtgaaaggcataattgacagcactgttggggaacaccggcaggtcgtggctgtcactggtgatggcacaaatgacgggcctgctctgaagaaagcggatgttggttttgccatgggcatcgcaggcacagatgtagcaaaggaggcttcagacatcatcctaacagatgacaacttcaccagcattgtgaaggcagtgatgtggggacgaaatgtctatgacagcatctccaagttcctgcagttccagctcactgtcaatgtggtggccgtgattgtagccttcactggagcctgtatcactcaggattccccattgaaagctgtgcagatgttgtgggttaatctgatcatggacacttttgcttcattggccctggccacagagccccctacggaatctctgttgaagcggcgcccctatggccgaaataagcctctgatctcacgcactatgatgaagaacatcttgggccatgcattctatcagctcattgtcatctttatccttgtctttgcrggtgagaaattctttgatattgatagtgggaggaaggcacctctacattcaccacccagccagcactataccattgtttttaacaccttcgtgctgatgcagctcttcaatgaaatcaactcccgaaagatccatggagagaagaaygtcttttcaggcatctaccgcaacattatcttctgctctgtagtcttgggcacattcatctgccagattttcatcgtggaatttgggggtaaacccttcagttgtacaagcctcagcctgtctcagtggctgtggtgtctcttcattgggattggagaacttctgtggggccagttcatctccgcaatacctacccgatccctgaagttcctgaaggaggctgggcatggcaccaccaaagaggagatcaccaaggatgccgagggactggatgagattgaccatgctgagatggagctgcgccgaggccagatcctctggttccggggcctgaaccgtatccagactcagatcgacgtaattaacacattccagacgggagcctcttttaagggagtcctaaggcgacagaacatgggtcaacaccttgatgtaaaacttgttcctagttcatcctatgtagcagttgcaccagtcaaatcttcccccaccacttctgttcctgctgtttcatctcctcctatgggcaatcaaagtggtcaaagcgttccatagttccctccacgaaagcattcagaaaccctacaaccaaaagtccatccacagcttcatgacccaccctgaattygccatagaggaggagttgccacgaacaccactcctggatgaggaagaggaggaaaatcctgacaaggcttctaagtttgggactagggtgctcctgttggatggtgaggtcactccatatgccaatacaaacaacaatgcggtggattgcaaccaagtgcagctcccccagtcggacagctctctacagagcctagagacatcagtt

SEQ ID NO: 2121 - DNA, 3179 bp, Homo sapiens
cctgacatccgtaactgttgtgcaccctgcgaatgactttatggtctaagaatgtatgttcagagccccagctaaggaatcaggagtggcaagatcctggaaggatgccaatctatgaaaccctgagtcaagaggtcaagctgggcacttgttttcctttttctttttttttgtaggagtttcactcttgttgcccaggctggagtacaatggcgtgatctcggctcactgcaatctctggttcaggcgattctctcacctcagccttcccgagtagctgggattacagacatgtgccaccatgcccagctaaatatggagatgcggtttctccatattggtcaggctggtctcgaactcccaacctcagggacggggtttcactatcgttggccaggctggtctcgaactcctggcctcaagtgatctgcccccctcgggttcccaaagtgcacctggcctctctccctgcatctttatgtgcctgcaacaccaagagggagctcttggcccctgggttaaggtcagggctccagaagcccagggtcaaggctatggccgcatcccaaggacgtgcatccctgcaagaggctgcatcagacaggcatggaagaggcgccgctggggcctccttgaattcctgctgggaaaagcaagtggaggtgctccttgaagaaacagggggatcccaccgatctcaggggttctgttctggcctgcggccctggatcgtccagcctgggtcggggtggggagcagacctcgcccttatcggctggggctgagggtgagggtcccgtttccccaaaggcctagcctggggttccagccacaagccctaccgggcagcgcccggccccgcccctccaggcctggcactcgtcctcaaccaagatggcgcggatggcttcaggcgcatcacgacaccggcgcgtcacgckacccgccctacgggcacctcccgcgcttttcttagcgccgcagacggtggccgagcgggrgwccgggaagcatggcccgggggtcggcggttgcctgggcggcgctcgggccgttgttgtggggctgcgcgctggggctgcagggcgggatgctgtacccccaggagagcccgtcgcgggagkgcaaggagctggacggcctctggagcttccgcgccgacttctytgacaaccgacgccggggcttcgaggagcagtggtaccggcggccgctgtgggagtcaggccccaccgtggacatgccagttccctccagcttcaatgacatcagccaggactggcgtctgcggcattttgtcggctgggtgtggtacgaacgggaggtgatcctgccggagygatggacccaggacctgcgcacaagagtggtgctgaggattggcagtgcccattcctatgccatcgtgtgggtgaatrgggtcgacacgctagagcatgaggggggctacctcyccttcraggccracatcagcaacctggtccaggtggggcccctgccctcccggctccgaatcactatcgccatcaacaacacaytcacccccaccaccctgccaccagggaccatccaatacctgactgacacctccaagtatcccaagggttactttgtccagaacacatattttgactttttcaactacgctggactgcagyggtctgtacttctgtacacgacacccaccacctacatcgatgacatcaccgtcaccaccagcgtggagcaagacagtgggctggtgaattaccagatctctgtcaagggcagtaacctgttcaagttggaagtgcgtcttttggatgcagaaaacaaagtcgtggcgaatgggactgggacccagggccaacttaaggtgccaggtgtcagcctctggtggccgtacctgatgcacgaacgccctgcctatctgtattcattggaggtgcagctgactgcacagacgtmactggggcctgtgtctgacttctvcacactccctgtggggatccgcactgtggctgtcaccaagagccagttcctcatcaatgggaaacctttctatttccacggtgtcaacaagyatgaggatgyggacatcygagggaagggcttcgactggccgctgctggtgaaggacttcaacctgcttygctggcttggtgccaacgctttcyrtaccagccactacccctatgcagaggaagtgatgcagatgtgtgaccgctatgggattgtggtcatcgatgagtgtcccggcgtgggcctggcgctgcygcagttcttcaacaacgtttctctgcatcaccacatgcaggtgatggaagaagtggtgcstagggacaagaaccaccccgcggtcgtgatgtrgtctgtggccaacgagcctgcgtcccacctagaatctgctggctactacttgaagatggtgatcgctcacaccaaatccttggacccctcccggcctgtgacctttgtgagcaactctaactatgcagcagacaagggggctccgtrtgtggatgtgatctgtttgaacagctactactcttrrtrtcrcgactaygggcacctggagttgattcagctgcagctggccacccagtttgagaactggtataagaagtatcagaagcccattattcagagcgagtatggagcagaaacgattgcagggtttcaccaggatccacctctgatgttcactgaagagtaccagaaaagtctgctagagcagtaccatctggrtctggatcaaaaacgcagaaaataygtggttggagagctcatttggaattttgccgatttcatgactgaacagtcaccgacgagagtgctggggaataaaaaggggatcttcactyggcagagacaaccaaaaagtgcagygttccttttgcgagagagayactgkaagattgccaatgaaaccaggtatccccactcagtagccaagtcacaatgtttggaaaacagccygtttacttgagcaagactgataccacctgcgtgtcccttcctccccgagtcagggcgacttccacagcagcagaacaagtgcctcctggactgttcacggcagaccagaacgtttctggcctgggttttgtggtcatctattctagcagggaacactaaaggtggaaataaaagattttctattatggaaataaagagttggcatgaaagtggctactgaa

SEQ ID NO: 2122 - DNA, 2809 bp, Homo sapiens
ggacggggtttcactatcgttggccaggctggtctcgaactcctggcctcaagtgatctgcccccctcgggttcccaaagtgcacctggcctctctccctgcatctttatgtgcctgcaacaccaagagggagctcttggcccctgggttaaggtcagggctccagaagcccagggtcaaggctatggccgcatcccaaggacgtgcatccctgcaagaggctgcatcagacaggcatggaagaggcgccgctggggcctccttgaattcctgctgggaaaagcaagtggaggtgctccttgaagaaacagggggatcccaccgatctcaggggttctgttctggcctgcggccctggatcgtccagcctgggtcggggtggggagcagacctcgcccttatcggctggggctgagggtgagggtcccgtttccccaaaggcctagcctggggttccagccacaagccctaccgggcagcgcccggccccgcccctccaggcctggcactcgtcctcaaccaagatggcgcggatggcttcaggcgcatcacgacaccggcgcgtcacgckacccgccctacgggcacctcccgcgcttttcttagcgccgcagacggtggccgagcgggrgwccgggaagcatggcccgggggtcggcggttgcctgggcggcgctcgggccgttgttgtggggctgcgcgctggggctgcagggcgggatgctgtacccccaggagagcccgtcgcgggagkgcaaggagctggacggcctctggagcttccgcgccgacttctytgacaaccgacgccggggcttcgaggagcagtggtaccggcggccgctgtgggagtcaggccccaccgtggacatgccagttccctccagcttcaatgacatcagccaggactggcgtctgcggcattttgtcggctgggtgtggtacgaacgggaggtgatcctgccggagygatggacccaggacctgcgcacaagagtggtgctgaggattggcagtgcccattcctatgccatcgtgtgggtgaatrgggtcgacacgctagagcatgaggggggctacctcyccttcraggccracatcagcaacctggtccaggtggggcccctgccctcccggctccgaatcactatcgccatcaacaacacaytcacccccaccaccctgccaccagggaccatccaatacctgactgacacctccaagtatcccaagggttactttgtccagaacacatattttgactttttcaactacgctggactgcagyggtctgtacttctgtacacgacacccaccacctacatcgatgacatcaccgtcaccaccagcgtggagcaagacagtgggctggtgaattaccagatctctgtcaagggcagtaacctgttcaagttggaagtgcgtcttttggatgcagaaaacaaagtcgtggcgaatgggactgggacccagggccaacttaaggtgccaggtgtcagcctctggtggccgtacctgatgcacgaacgccctgcctatctgtattcattggaggtgcagctgactgcacagacgtmactggggcctgtgtctgacttctvcacactccctgtggggatccgcactgtggctgtcaccaagagccagttcctcatcaatgggaaacctttctatttccacggtgtcaacaagyatgaggatgyggacatcygagggaagggcttcgactggccgctgctggtgaaggacttcaacctgcttygctggcttggtgccaacgctttcyrtaccagccactacccctatgcagaggaagtgatgcagatgtgtgaccgctatgggattgtggtcatcgatgagtgtcccggcgtgggcctggcgctgcygcagttcttcaacaacgtttctctgcatcaccacatgcaggtgatggaagaagtggtgcstagggacaagaaccaccccgcggtcgtgatgtrgtctgtggccaacgagcctgcgtcccacctagaatctgctggctactacttgaagatggtgatcgctcacaccaaatccttggacccctcccggcctgtgacctttgtgagcaactctaactatgcagcagacaagggggctccgtrtgtggatgtgatctgtttgaacagctactactcttrrtrtcrcgactaygggcacctggagttgattcagctgcagctggccacccagtttgagaactggtataagaagtatcagaagcccattattcagagcgagtatggagcagaaacgattgcagggtttcaccaggatccacctctgatgttcactgaagagtaccagaaaagtctgctagagcagtaccatctggrtctggatcaaaaacgcagaaaataygtggttggagagctcatttggaattttgccgatttcatgactgaacagtcaccgacgagagtgctggggaataaaaaggggatcttcactyggcagagacaaccaaaaagtgcagygttccttttgcgagagagayactgkaagattgccaatgaaaccaggtatccccactcagtagccaagtcacaatgtttggaaaacagccygtttacttgagcaagactgataccacctgcgtgtcccttcctccccgagtcagggcgacttccacagcagcagaacaagtgcctcctggactgttcacggcagaccagaacgtttctggcctgggttttgtggtcatctattctagcagggaacactaaaggtggaaataaaagattttctattatggaaataaagagttggcatgaaagtggctactgaa

SEQ ID NO: 2123 - DNA, 3186 bp, Homo sapiens
cctgacatccgtaactgttgtgcaccctgcgaatgactttatggtctaagaatgtatgttcagagccccagctaaggaatcaggagtggcaagatcctggaaggatgccaatctatgaaaccctgagtcaagaggtcaagctgggcacttgttttcctttttctttttttttgtaggagtttcactcttgttgcccaggctggagtacaatggcgtgatctcggctcactgcaatctctggttcaggcgattctctcacctcagccttcccgagtagctgggattacagacatgtgccaccatgcccagctaaatatggagatgcggtttctccatattggtcaggctggtctcgaactcccaacctcagggacggggtttcactatcgttggccaggctggtctcgaactcctggcctcaagtgatctgcccccctcgggttcccaaagtgcacctggcctctctccctgcatctttatgtgcctgcaacaccaagagggagctcttggcccctgggttaaggtcagggctccagaagcccagggtcaaggctatggccgcatcccaaggacgtgcatccctgcaagaggctgcatcagacaggcatggaagaggcgccgctggggcctccttgaattcctgctgggaaaagcaagtggaggtgctccttgaagaaacagggggatcccaccgatctcaggggttctgttctggcctgcggccctggatcgtccagcctgggtcggggtggggagcagacctcgcccttatcggctggggctgagggtgagggtcccgtttccccaaaggcctagcctggggttccagccacaagccctaccgggcagcgcccggccccgcccctccaggcctggcactcgtcctcaaccaagatggcgcggatggcttcaggcgcatcacgacaccggcgcgtcacgckacccgccctacgggcacctcccgcgcttttcttagcgccgcagacggtggccgagcgggrgwccgggaagcatggcccgggggtcggcggttgcctgggcggcgctcgggccgttgttgtggggctgcgcgctggggctgcagggcgggatgctgtacccccaggagagcccgtcgcgggagkgcaaggagctggacggcctctggagcttccgcgccgacttctytgacaaccgacgccggggcttcgaggagcagtggtaccggcggccgctgtgggagtcaggccccaccgtggacatgccagttccctccagcttcaatgacatcagccaggactggcgtctgcggcattttgtcggctgggtgtggtacgaacgggaggtgatcctgccggagygatggacccaggacctgcgcacaagagtggtgctgaggattggcagtgcccattcctatgccatcgtgtgggtgaatrgggtcgacacgctagagcatgaggggggctacctcyccttcraggccracatcagcaacctggtccaggtggggcccctgccctcccggctccgaatcactatcgccatcaacaacacaytcacccccaccaccctgccaccagggaccatccaatacctgactgacacctccaagtatcccaagggttactttgtccagaacacatattttgactttttcaactacgctggactgcagyggtctgtacttctgtacacgacacccaccacctacatcgatgacatcaccgtcaccaccagcgtggagcaagacagtgggctggtgaattaccagatctctgtcaagggcagtaacctgttcaagttggaagtgcgtcttttggatgcagaaaacaaagtcgtggcgaatgggactgggacccagggccaacttaaggtgccaggtgtcagcctctggtggccgtacctgatgcacgaacgccctgcctatctgtattcattggaggtgcagctgactgcacagacgtmactggggcctgtgtctgacttctvcacactccctgtggggatccgcactgtggctgtcaccaagagccagttcctcatcaatgggaaacctttctatttccacggtgtcaacaagyatgaggatgyggacatcygagggaagggcttcgactggccgctgctggtgaaggacttcaacctgcttygctggcttggtgccaacgctttcyrtaccagccactacccctatgcagaggaagtgatgcagatgtgtgaccgctatgggattgtggtcatcgatgagtgtcccggcgtgggcctggcgctgcygcagttcttcaacaacgtttctctgcatcaccacatgcaggtgatggaagaagtggtgcstagggacaagaaccaccccgcggtcgtgatgtrgtctgtggccaacgagcctgcgtcccacctagaatctgctggctactacttgaagatggtgatcgctcacaccaaatccttggacccctcccggcctgtgacctttgtgagcaactctaactatgcagcagacaagggggctccgtrtgtggatgtgatctgtttgaacagctactactcttrrtrtcrcgactaygggcacctggagttgattcagctgcagctggccacccagtttgagaactggtataagaagtatcagaagcccattattcagagcgagtatggagcagaaacgattgcagggtttcaccaggtaagcagatccacctctgatgttcactgaagagtaccagaaaagtctgctagagcagtaccatctggrtctggatcaaaaacgcagaaaataygtggttggagagctcatttggaattttgccgatttcatgactgaacagtcaccgacgagagtgctggggaataaaaaggggatcttcactyggcagagacaaccaaaaagtgcagygttccttttgcgagagagayactgkaagattgccaatgaaaccaggtatccccactcagtagccaagtcacaatgtttggaaaacagccygtttacttgagcaagactgataccacctgcgtgtcccttcctccccgagtcagggcgacttccacagcagcagaacaagtgcctcctggactgttcacggcagaccagaacgtttctggcctgggttttgtggtcatctattctagcagggaacactaaaggtggaaataaaagattttctattatggaaataaagagttggcatgaaagtggctactgaa

SEQ ID NO: 2124 - DNA, 4078 bp, Homo sapiens
acgatggcagcgtcagtggcagctgcagcccggaggctgcggcgggccattcgaaggtcgcccgcatggcggggcctcagccatcggccgctctcatcggagccccctgcagccaaggcctcggccgtgagggccgcctttctgaacttctttcgggaccgccatggccaccggctggtgccctccgcttccgtgcggccccgcggcgaccccagtttgctttttgtcaatgcgggcatgaaccagttcaagccaatctttctgggcaccgtggatccacgaagcgagatggcaggcttccgacgtgtggccaacagccagaaatgtgtgagagctggaggacaccataacgacctggaagatgtgggtcgagacctttcccatcataccttctttgaaatgcttggcaattgggcctttgggggtgaatattttaaggaggaggcttgtaacatggcctgggaactgctgactcaggtctatgggatccctgaggaaaggctctggatctcctactttgatggtgaccccaaggcagggctggacccagacctggagaccagggacatctggctgagcttaggggtgcctgctagccgtgtgctttcctttggaccacaagagaacttctgggagatgggggatactggcccttgtgggccctgtactgagatccactacgaccttgctggtggggtgggagccccccagctggtagagctttggaacctggtcttcatgcaacacaacagagaggcagatggaagcctgcagcccctgccccagcggcatgtggacacaggaatgggcctggaaaggctggtggctgtgctgcaaggcaaacactccacctatgacactgacctcttttccccgctgctcaacgccatacagcagggctgcagggcacccccttacttgggccgagtaggggtggcagacgaggggcgcacagacacagcgtaccgcgtggtggctgaccacatccgcacactcagtgtctgcatctctgatggcrtcttccctgggatgtcaggtcccccgctggttcttcgtcggatcctgcgtcgagctgtgcgtttctccatggagatcttaaaggcaccacctggcttcctaggcagcctggtacctgtagtggtggagacactgggagatgcttatccagaactgcaaaggaactcagcccagatcgccaacctggtgtcagaggacgaggcagccttcctggcctccctggagcggggtaggcggatcattgatcggactctgaggaccctggggccttcagatatgttccctgctgaagtggcctggtccttgtcactgtgtggagacctgggactccccttggacatggtagagctgatgctggaggagaaaggggtccagctagactccgctggactggagcrgttggcccaagaggaggcccagcaccgggcacggcaggmtgagccagttcagaagcagggattgtggcttgatgtccatgcgcttggggagctgcagcgccaaggagtgcccccaactgacgacagccccaagtacaactactccctgcgacccagcggaagttatgagttcggcacctgtgaggcccaggtgttgcaactgtatacagaggacgggacagcagtggcctccgtggggaaaggccagcgctgtggcctcctcttggacaggaccaacttctacgcagaacaggggggccaggcttcagaccgtggctacctggtgcgggcagggcaagaggacgtgctgttcccagtagcccgggcccaggtctgtggaggtttcatcctgcatgaggcagtagcccctgagtgcctgcggttaggggaccaggtgcagctgcatgtggatgaggcctggcgtctaggctgcatggcgaagcatacggccacccacctgctgaactgggcactgaggcagaccctgggccctggcacagagcagcagggctcccatctcaatcctgagcagctgcgcttggatgtgaccacccagaccccattgaccccagagcagctccgggcagtggagaacactgtgcaggaggccgtggggcaggatgaggctgtgtacatggaggaggtgcccctggcgctcactgcccaggtccctggcctgcgctctctggatgaggtttacccagaccctgtgcgggtggtatcagtgggggtgcccrtggcccatgcattggacccagcctcccaagccgcactgcagacctctgtggagctatgctgtgggacgcacctgttacgtactggggctgtaggggacctggttatcatcggggaccgccagctttccaagggcactacccgcctgctggccgtcactggggagcaggcccagcaggcccgagagctaggccagagcctggcccaggaagtgaaagcggccactgagcggctgagtcwggggagccgggatgtggcggaggcactgaggctgtccaaggacataggacgactcattgaagctgtggaaactgctgtgatgccccagtggcagcggcgggagctgctggccacagtgaagrtgctgcagcggcgtgccaacactgccatccgtaagctgcaaatgggacaggctgcaaaraaaactcaggagctgctggagcggcactcgaaggggcctctgattgtggacacagtctctgctgagtctctctcagtgctggtgaaggtggtacggcagctrtgtgagcaggcccccagcacgtctgtgctcctactcagcccccagcccatggggaaggtgctgtgtgcctgtcaggtggcccagggtgccatgcccaccttcacagcagaggcctgggcactggcagtgtgcagccacatggggggcaaggcgtggggctcrcgagtggtggcccaaggcaccggaagcactactgacctggaagctgccctcagtatagcccaaacctatgccctcagccagctctgacccaggtccgcccagggacccacatggactaaaggcaatgccaggagccctgaaggagccagcagaaccttcccacatgctgaagcgaggactagaggctggaggccaagcagctgagccaaagaagatcacctgggccagggcctacrtgacacaaggagacatgggctagggaaggcagaactgggcccaaagacacacacccccttggtgaaagagaagacatggacaattatggctgtgactgcacattagaaattatttcactggccgggtgtggtggttcacacctgtaatccaagcactttgggaggccgaggcaggtagatcatgaggtcagragatcaaaaccatcctggctaacayggtgaaaccccatctctactaaaaatacaaaaaattagccgggtgtggtggcacacrcctgtagtcccagctactcgggaggctgaggcagaagaatcgcttgaacctgggaggtggaggttgcagtgggccaagatcgcaccactgcactccagcctgggtgacagagcgagactctgtctcaaataaataaattatttcacagaggatagcaagctccagaaggttctattacctttaaaaaagagtagttttgcccctcccagcaacctggtatgggtgccctaagaccagtctgaactcacactgtctgaaaggccacccaggatccaaatcgggccatcttcattgccatgagtgttcggacaggctctgcgtgccaggcaacagtgggcagacaaagggctccctggctactgggaagatacagaaccatcctgtgaaaatcatttcagcactggagaccttctttgctattacttctttcattaacaatgacctctaatttaaattgggccctgctggtttgttgatgaattgagcaactgagaacgtggcgggcactaaactgacagttccttccttcatggagcctgcttcatgtggaggaaacaggaaataaagcaaaagaagagggtcaggcttggtggctcatgcctataatcctggcattttaggaggctgaggttggagaatcgcttgaggccagaagtgcaagaccagcctgcgcaaacagcaagaccctgtctac

SEQ ID NO: 2125 - DNA, 1309 bp, Homo sapiens
cctcctctccgcgcggggcgggctccgcgccacgtgactccgcggccgggccgggacgcgacgggacgcgctgggaccggcgtcgggggtcgcggggaccatgcagcggaggtgggtcttcgtgctgctcgacgtgctgtgcttactggtcgcctccctgcccttcgctatcctgacgctggtgaacgccccgtacaagcgaggattttactgcggggatgactccatccggtacccctaccgtccagataccatcacccacgggctcatggctggggtcaccatcacggccaccgtcatccttgtctcggccggggaagcctacctggtgtacacagaccggctctattctygctcggacttcaacaactacgtggctgctgtatacaaggtgctggggaccttcctgtttggggctgccgtgagccagtctctgacagacctggccaagtacatgattgggcgtctgaggcccaacttcctagccgtctgcgaccccgactggagccgggtcaactgctcggtctatgtgcagctggagaaggtgtgcaggggaaaccctgctgatgtcaccgaggccaggttgtctttctactcgggacactcttcctttgggatgtactgcatggtgttcttggygctgtatgtgcaggcacgactctgttggaagtgggcacggctgctgcgacccacagtccagttcttcctggtggcctttgccctctacgtgggctacacccgcgtgtctgattacaaacaccactggagcgatgtccttgttggcctcctgcagggggcactggtggctgccctcactgtcygctacatctcagacttcttcaaagcccgacccccacagcactgtctgaaggaggaggagctggaayggaagcccagcctgtcactgacgttgaccctgggcgaggctgaccacaaccactatggatacycgcactcctcctcctgaggccrgaccccgcccaggcagggagctrctgtgagtccagctgakgcccacccaggtggtccctccrgccctggttaggcactgagggytctggacgggctccaggaaccctgggctgatgggagcagtgagcgggctccgctgccccctgccctgcactggaccaggagtctggagatgcctgggtagccctcagcatttggaggggaacctgttcccgtcggtccccaaatatccccttctttttatggggttaaggaagggaccgagagatcagatagttgctgttttgtaaaatgtaatgtatatgtggtttttagtaaaatagggcacctgtttcac

SEQ ID NO: 2126 - DNA, 1711 bp, Homo sapiens
atgaaaggtgctgggtccctggctgcctccttgcccatggctgagaagttctggtgggaaggaaccatggagggcccatctggatatccttcctcagctaaaactgcctccttccaggatgccgtgcgcatgctcaataccctgcagaccaatgccggctacctggagcaggtgaagcgccagcggggtgaccctcagacacagttggaagccatggaactrtacctggcacggagtgggctgcaggtggaggacttggaccggctgaacatcatccacgtcactgggacgaaggggaagggctccacctgtgccttcacggaatgtatcctccgaagctatggcctgaagacgggattctttagctctccccacctggtgcaggttcgggagcggatccgcatcaatgggcagcccatcagtcctgagctcttcaccaagtacttctggcgcctctaccaccggctggaggagaccaaggatggcagctgtgtctccatgcccccctacttccgcttcctgacactcatggccttccacgtcttcctccaagagaaggtggacctggcagtggtggaggtgggcattggcggggcttatgactgcaccaacatcatcaggaagcctgtggtgtgcggagtctcctctcttggcatcgaccacaccagcctcctgggggatacggtggagaagatcgcatggcagaaagggggcatctttaagcaaggtgtccctgccttcactgtgctccaacctgaaggtcccctggcagtgctgagggaccgagcccagcagatctcatgtcctctatacctgtgtccgatgctggaggccctcgaggaaggggggccgccgctgaccctgggcctggagggggagcaccagcggtccaacgccgccttggccttgcagctggcccactgctggctgcagcggcaggaccgccatggtgctggggagccaaaggcatccaggccagggctcctgtggcagctgcccctggcacctgtgttccagcccacatcccacatgcggctcgggcttcggaacacggagtggccgggccggacgcaggtgctgcggcgcgggcccctcacctggtacctggacggtgcgcacaccgccagcagcgcgcaggcctgcgtgcgctggttccgccaggcgctgcagggccgcgagaggccgagcggtggccccgaggttcgagtcttgctcttcaatgctaccggggaccgggacccggcggccctgctgaagctgctgcagccctgccagtttgactatgccgtcttctgccctaacctgacagaggtgtcatccacaggcaacgcagaccaacagaacttcacagtgacactggaccaggtcctgctcygctgcctggaacaccagcagcactggaaccacctggacgaagagcaggccagcccggacctctggagtgcccccagcccagagcccggtggcctgtctgtgagatgagaagaagaccagactgaagcctgttcaccatatgccaggcagtgctttctgcagacccccttgcagagaccttgtgatggagaattatacmcatttgacagacgagggaactgtggctggtttcaagaagccatggaggccgggcacggtggctcacgcctgtaatcccagcactttgggaggctgaggcgggcggatcatgaggtcaagaggtcgagaccatctggcc

SEQ ID NO: 2127 - DNA, 2714 bp, Homo sapiens
gcggggcgtctcccgcccgggcctagagcgctgccgggggcgccgggactatgtcgcgggcgcggagccacctgcgcgccgctctattcctggcagcggcgtctgcgcgcggcgtaacgacccaggtcgcggcgcggcggggcttgagcgcgtggccggtgccgcaggagccgagcatggagtaccaggatgccgtgcgcatgctcaataccctgcagaccaatgccggctacctggagcaggtgaagcgccagcggggtgaccctcagacacagttggaagccatggaactrtacctggcacggagtgggctgcaggtggaggacttggaccggctgaacatcatccacgtcactgggacgaaggggaagggctccacctgtgccttcacggaatgtatcctccgaagctatggcctgaagacgggattctttagctctccccacctggtgcaggttcgggagcggatccgcatcaatgggcagcccatcagtcctgagctcttcaccaagtacttctggcgcctctaccaccggctggaggagaccaaggatggcagctgtgtctccatgcccccctacttccgcttcctgacactcatggccttccacgtcttcctccaagagaaggtggacctggcagtggtggaggtgggcattggcggggcttatgactgcaccaacatcatcaggaagcctgtggtgtgcggagtctcctctcttggcatcgaccacaccagcctcctgggggatacggtggagaagatcgcatggcagaaagggggcatctttaagcaaggtgtccctgccttcactgtgctccaacctgaaggtcccctggcagtgctgagggaccgagcccagcagatctcatgtcctctatacctgtgtccgatgctggaggccctcgaggaaggggggccgccgctgaccctgggcctggagggggagcaccagcggtccaacgccgccttggccttgcagctggcccactgctggctgcagcggcaggaccgccatggtgctggggagccaaaggcatccaggccagggctcctgtggcagctgcccctggcacctgtgttccagcccacatcccacatgcggctcgggcttcggaacacggagtggccgggccggacgcaggtgctgcggcgcgggcccctcacctggtacctggacggtgcgcacaccgccagcagcgcgcaggcctgcgtgcgctggttccgccaggcgctgcagggccgcgagaggccgagcggtggccccgaggttcgagtcttgctcttcaatgctaccggggaccgggacccggcggccctgctgaagctgctgcagccctgccagtttgactatgccgtcttctgccctaacctgacagaggtgtcatccacaggcaacgcagaccaacagaacttcacagtgacactggaccaggtcctgctcygctgcctggaacaccagcagcactggaaccacctggacgaagagcaggccagcccggacctctggagtgcccccagcccagagcccggtgggtccgcatccctgcttctggcgccccacccaccccacacctgcagtgccagctccctcgtcttcagctgcatttcacatgccttgcaatggatcasccaaggccgagaccccatcttccagccacctagtcccccaaagggcctcctcacccaccctgtggctcacagtggggccagcatactccgtgaggctgctgccatccatgtgctagtcactggcagcctgcacctggtgggtggtgtcctgaagctgctggagcccgcactgtcccagtagccaaggcccggggttggaggtgggagcttcccacacctgcctgcgttctccccatgaacttacatactaggtgccttttgtttttggctttcctggttctgtctagactggcctaggggccagggctttgggatgggaggccgggagaggatgtcttttttaaggctctgtgccttggtctctccttcctcytggctgagatarcagaggggctccccgggtctctcactgttgcagtggcctggccgttcagcctgtctcccccaacaccccgcctgcctcctggctcaggcccagcttattgtgtgcgctgcctggccaggccctgggtcttgccatgtgctgggtggtagatttcctcctcccagtgccttytgggaagggagagggcctctgcctgggacactgcgggacagagggtggctggagtgaattaaagcctttgttttttaaagaaatggcaaagccttcgactgacccttgaccccctgctccctcagcagagacggagggaggggctgctggtggtcagggacctgcactgtgtagagggagcctggctgtgtggcctggaacaagtccctccctccctgtgcgcctcaggtggcctgtctgtgagatgagaagaagaccagactgaagcctgttcaccatatgccaggcagtgctttctgcagacccccttgcagagaccttgtgatggagaattatacmcatttgacagacgagggaactgtggctggtttcaagaagccatggaggccgggcacggtggctcacgcctgtaatcccagcactttgggaggctgaggcgggcggatcatgaggtcaagaggtcgagaccatctggccaacatggtgaaaccccgtctctgctaaaaatacaaaaattrttagctg

SEQ ID NO: 2128 - DNA, 1763 bp, Homo sapiens
gcggggcgtctcccgcccgggcctagagcgctgccgggggcgccgggactatgtcgcgggcgcggagccacctgcgcgccgctctattcctggcagcggcgtctgcgcgcggcgtaacgacccaggtcgcggcgcggcggggcttgagcgcgtggccggtgccgcaggagccgagcatggagtaccaggatgccgtgcgcatgctcaataccctgcagaccaatgccggctacctggagcaggtgaagcgccagcggggtgaccctcagacacagttggaagccatggaactrtacctggcacggagtgggctgcaggtggaggacttggaccggctgaacatcatccacgtcactgggacgaaggggaagggctccacctgtgccttcacggaatgtatcctccgaagctatggcctgaagacgggattctttaggttcgggagcggatccgcatcaatgggcagcccatcagtcctgagctcttcaccaagtacttctggcgcctctaccaccggctggaggagaccaaggatggcagctgtgtctccatgcccccctacttccgcttcctgacactcatggccttccacgtcttcctccaagagaaggtggacctggcagtggtggaggtgggcattggcggggcttatgactgcaccaacatcatcaggaagcctgtggtgtgcggagtctcctctcttggcatcgaccacaccagcctcctgggggatacggtggagaagatcgcatggcagaaagggggcatctttaagcaaggtgtccctgccttcactgtgctccaacctgaaggtcccctggcagtgctgagggaccgagcccagcagatctcatgtcctctatacctgtgtccgatgctggaggccctcgaggaaggggggccgccgctgaccctgggcctggagggggagcaccagcggtccaacgccgccttggccttgcagctggcccactgctggctgcagcggcaggaccgccatggtgctggggagccaaaggcatccaggccagggctcctgtggcagctgcccctggcacctgtgttccagcccacatcccacatgcggctcgggcttcggaacacggagtggccgggccggacgcaggtgctgcggcgcgggcccctcacctggtacctggacggtgcgcacaccgccagcagcgcgcaggcctgcgtgcgctggttccgccaggcgctgcagggccgcgagaggccgagcggtggccccgaggttcgagtcttgctcttcaatgctaccggggaccgggacccggcggccctgctgaagctgctgcagccctgccagtttgactatgccgtcttctgccctaacctgacagaggtgtcatccacaggcaacgcagaccaacagaacttcacagtgacactggaccaggtcctgctcygctgcctggaacaccagcagcactggaaccacctggacgaagagcaggccagcccggacctctggagtgcccccagcccagagcccggtggcctgtctgtgagatgagaagaagaccagactgaagcctgttcaccatatgccaggcagtgctttctgcagacccccttgcagagaccttgtgatggagaattatacmcatttgacagacgagggaactgtggctggtttcaagaagccatggaggccgggcacggtggctcacgcctgtaatcccagcactttgggaggctgaggcgggcggatcatgaggtcaagaggtcgagaccatctggcc

SEQ ID NO: 2129 - DNA, 624 bp, Homo sapiens
gcggggcgtctcccgcccgggcctagagcgctgccgggggcgccgggactatgtcgcgggcgcggagccacctgcgcgccgctctattcctggcagcggcgtctgcgcgcggcgtaacgacccaggtcgcggcgcggcggggcttgagcgcgtggccggtgccgcaggagccgagcatggagtaccaggatgccgtgcgcatgctcaataccctgcagaccaatgccggctacctggagcaggtgaagcgccagcggggtgaccctcagacacagttggaagccatggaactrtacctggcacggagtgggctgcaggtggaggacttggaccggctgaacatcatccacgtcactgggacgaaggggaagggctccacctgtgccttcacggaatgtatcctccgaagctatggcctgaagacgggattctttaggtactggcttgtggggggatgtggtgtctgtgtcccaatggaccctggggggctatggaaccagccagtgcttcaggaccagggtcacccccaggaggtcagctgcatgtctctctgcccagtgtttattcattcaataaacattcagttagcacttacccctgggcgacagagcaaactgctatctt

SEQ ID NO: 2130 - DNA, 1898 bp, Homo sapiens
cagggctggatcaacaattgcatcagtgaattaaaaggcacaggaggctgggcaccgtggctcacgcctgtaaacttttggaggccgagttgggaggatcgcttgagcccaggagttcgacaccagcctggataacatagaactccgtctcaaaaacaaacaaacaaacaaaraaaacgttcccgactggcttccctgaggaacgtggcgtcccagtgagaccggatgggtgaggagcagccggcctgtgagtggtgggggaccgcgttcctatctcggagctgaagaagcgtggaagatgatctggcccaacatctctttgttctcagaggaagggccttccaagaccggggaggggcctgtgcgtgggtcccggtccgaaacgtgtctgggctgctgcgagagrcagtcggtgaaggaagggaggggacatccgaagggtggcccgggaggccgggcgatggtgaggagggcgcctcctctccaccaaatcctccccatccatgcgggctagggacagaccctcccccgcccaccctaggctggaaagtgaacgttctctgcacctctcccacctacagactaagtagggcacccggtttccgtgtcggcttcaccactgactcggaatgggatctacctttctctgagcctcacttttcccatctgaaaaatggaacttccgatcccgcactcccatcccactctggccccgggactctgggatacttagagattggcttttggtggggcggcgacaggactgtggccatgaaggccagggagtctgggtccccaactcggtcccattccctagagagattcgggcagcaaccggccccacaatgctcttgagaactacacttcgccgatatgcaaaggagaggaggcggttcctgctcgtctccgacgaggtgggcccgagcaggcctggggactacgactcccggcgtgctccgcagtccaaagccggaagagcgtggacccggaaccggatgtggcttgcggctcgggtggctgagcgcgcggggaaatggccacggggacagaccaggtggtgggactcggcctcgtcgccgttagcctgatcatcttcacctactacaccgcctgggtgattctcttgccattcatcgacagtcagcatgtcatccacaagtatttcctgccccgagcctatgctgtcgccatcccactggctgcaggcctyctgctgctcctgtttgtgggactgttcatctcctaygtgatgctgaagascaagagagtgaccaagaaggctcagtgaaggtcccgcagggatgaggctgccagccccttctctgcttcccctccagcacagggaccaagtgggggagcctgcagaacctgtccaggcacagtggctcctcaagcctgcctgtcctgcagagtccccatggcatggagcttacacctgactgactggagccccctccccgactcccacttccagaagctaggagggagggatacctggaagactccggtcacctccttcttgctcagggcctaaaagatgctggtcctcccaacctcactctcagactccctgccaccttttcccctgggttctgccgtcttgcctcacttcccctcctgtcacatgctgacgttggacttagcaggttctaaggccacatgtgtgacctctctgacttctcttcctccaccaaggcagctttccttaccctgacacagccccagaccccacaaagccttctggacctggaaagcctggggaaggactgacagaccccaggaccagccctggggctcagggcagccaccccgggccgctgaccgactgacctctcctcacggaggcccagccccaaagccccagggctggcccgtttgggacagctgaccaataaaca

SEQ ID NO: 2131 - DNA, 1733 bp, Homo sapiens
gggctgctgcgagagrcagtcggtgaaggaagggaggggacatccgaagggtggcccgggaggccgggcgatggtgaggagggcgcctcctctccaccaaatcctccccatccatgcgggctagggacagaccctcccccgcccaccctaggctggaaagtgaacgttctctgcacctctcccacctacagactaagtagggcacccggtttccgtgtcggcttcaccactgactcggaatgggatctacctttctctgagcctcacttttcccatctgaaaaatggaacttccgatcccgcactcccatcccactctggccccgggactctgggatacttagagattggcttttggtggggcggcgacaggactgtggccatgaaggccagggagtctgggtccccaactcggtcccattccctagagagattcgggcagcaaccggccccacaatgctcttgagaactacacttcgccgatatgcaaaggagaggaggcggttcctgctcgtctccgacgaggtgggcccgagcaggcctggggactacgactcccggcgtgctccgcagtccaaagccggaagagcgtggacccggaaccggatgtggcttgcggctcgggtggctgagcgcgcggggaaatggtgagattggcrccgtgtgccggagataggggcgtctgggggtggggtcccgggtctgctcaggagctggggcatgggcacttggaacggggattgctctcccgcccccactattgtacggacgacaacgcggaggcctagcattctctcccagcctagaaactgatccctagtcagccytctaccatctgttgaatgggaagcttagaccgtgatcgggccgcgacgccccgcttccattagtgcgccgaaatagagggtcacttcgtcagctgagacctcccttttctccaggccacggggacagaccaggtggtgggactcggcctcgtcgccgttagcctgatcatcttcacctactacaccgcctgggtgattctcttgccattcatcgacagtcagcatgtcatccacaagtatttcctgccccgagcctatgctgtcgccatcccactggctgcaggcctyctgctgctcctgtttgtgggactgttcatctcctaygtgatgctgaagascaagagagtgaccaagaaggctcagtgaaggtcccgcagggatgaggctgccagccccttctctgcttcccctccagcacagggaccaagtgggggagcctgcagaacctgtccaggcacagtggctcctcaagcctgcctgtcctgcagagtccccatggcatggagcttacacctgactgactggagccccctccccgactcccacttccagaagctaggagggagggatacctggaagactccggtcacctccttcttgctcagggcctaaaagatgctggtcctcccaacctcactctcagactccctgccaccttttcccctgggttctgccgtcttgcctcacttcccctcctgtcacatgctgacgttggacttagcaggttctaaggccacatgtgtgacctctctgacttctcttcctccaccaaggcagctttccttaccctgacacagccccagaccccacaaagccttctggacctggaaagcctggggaaggactgacaccccagggctggcccgtttgggacagctgaccaataaacactgatggtgtgtttgtc

SEQ ID NO: 2132 - DNA, 1225 bp, Homo sapiens
gtccccccacccaggtatgacatcaaaggctgcgaggtgagccgctgggtggatcccgcccctgagggcagcccccttgttctggtgctgaaggacctcaactttcagggcaagaccatcaacctggggccccagcggagctggttcctccgccagatggaactggataccaccttcctccgggagctcaacgtgytggattacagcctcctgatagccttccaacgtctccacgaggatgagaggggcccgggcagcagcctcatcttccgcacggccaggtctgtgcaaggggcacagagcccggaagagtcgagagcccaaaaccgccggctgctgcccgacgcccccaacgccctacacatcctggacgggcccgagcagcgctatttcctgggcgtcgtggatctcgccacagtctacgggctccgcaagcggctggagcacctgtggaagacactgcgctacccaggccggaccttctccactgtcagcccggctcgctacgcccgtcgcctctgccagtgggtggaggcgcacacggagtgacgggcgcccggccccactctccggatctggacgatgggctcacgccaggaacgccggttcccccgggcccgggcatctcgcctgcgcttcctcctgatggtcgccagagggcagcatcccctaactaataccgtaaccgcgcagtcccgtttgacggtggtgccgtgcccagcatcgtgccaaggactcccctactttagctcatttaatcctcaaaaaatgctattattctctttttacagaccatgaaatggaggctcagggggtgaagggactgatcaagatcattcagcaataaatgctggaaccaggactcaaccatggcttttggattccggagcctgtattcttaaccaccagctcctgcagcttggtcctcatgatctgggcaaggggggaggctgaaggctgcagccctcttgtcatccagatggggaaactgaggcccagagactttaaggggcgtaagcacgggaaactccagcctggcctctgaccccagttcaatccgaccatgcccaagcccaagcgggcctttcctccagaactgctccggggcctggctgtgtgactggagcaaggtgctaaacctctctgtgcctcgctggtctaatctgtaaaatgaaggaatggaaacagacctcattaactcattaaatatttgttgagcacctgc

SEQ ID NO: 2133 - DNA, 1425 bp, Homo sapiens
aggcctctagtcccagtaggaggtttgactaagatcaatcatgacgacttacagkgacaaaggggcaaagcctgagagaggccgattcctccacttccactctgtgaccttctgggttggcaacgccaagcaggccrcgtcattctactgcagcaagatgggctttgaacctctagcctacaggggcctggagaccggttcccgggaggtggtcagccatgtaatcaaacaagggaagattgtgtttgtcctctcctcagcgctcaacccctggaacaaagagatgggcgatcacctggtgaaacacggtgacggagtgaaggacattgcgttcgaggtggaagattgtgactacatcgtgcagaaagcacgggaacrgggygcyaaaatcatgcgggagccctgggtagagcaagacaagtttgggaaggtgaagtttgctgtgctgcagacgtatggggacaccacacacaccctggtggagaagatgaamtacatcggccaattcttgcctggatrtgagsccccagcgttcatggaccccctacttcctaaactgcccaaatgcagtctggagatgatcgaccacattgtgggaaaccagcctgatcaggagatggtgtccgcctccgaatggtasctgaaaaacctgcagttccaccgcttctggtccgtggatgacacgcaggtgcacacggaatatagctctctgcgatccattgtggtggccaactatgaagagtccatcaagatgcccatcaatgagccagcgcctggcaagaagaagtcccagatccaggaatatgtggactakaacgggggcgctggggtccagcacatcgctctcaagaccgaagacatcatcacagcgattcgccacttgagagagagaggcctggagttcttatctgttccctccacgtactacaaacaactgcgggagaagctgaagacggccaagatcaaggtgaaggagaacattgatgccctggaggagctgaaaatcctggtggactacgacgagaaaggctacctcctgcagatcttcaccaaaccgktgcaggaccggcccacgctcttcctggaagtcatccagcgccacaaccaccagggttttggagccggcaacttcaactcactgttcaaggctttcgaggaggagcagaacytgcggggtaacctcaccaacatggagaccaatggggtggtgcccggcatgtaagccccgcccaccccacggaggccacagccacacagccacgccccctgattctggaactcgcccaacttccctactggctgctccccwwgggtcccgcccaccagcggactcggcccccaasgctccgcccacactgaccacgcccctcggsggggccgccctctgctccagccctcccgattaaagcgtgccccggtccaata

SEQ ID NO: 2134 - DNA, 1371 bp, Homo sapiens
aggcctctagtcccagtaggaggtttgactaagatcaatcatgacgacttacagkgacaaaggggcaaagcctgagagaggccgattcctccacttccactctgtgaccttctgggttggcaacgccaagcaggccrcgtcattctactgcagcaagatgggctttgaacctctagcctacaggggcctggagaccggttcccgggaggtggtcagccatgtaatcaaacaagggaagattgtgtttgtcctctcctcagcgctcaacccctggaacaaagagatgggcgatcacctggtgaaacacggtgacggagtgaaggacattgcgttcgaggtggaagattgtgactacatcgtgcagaaagcacgggaacrgggygcyaaaatcatgcgggagccctgggtagagcaagacaagtttgggaaggtgaagtttgctgtgctgcagacgtatggggacaccacacacaccctggtggagaagatgaamtacatcggccaattcttgcctggatrtgagsccccagcgttcatggaccccctacttcctaaactgcccaaatgcagtctggagatgatcgaccacattgtgggaaaccagcctgatcaggagatggtgtccgcctccgaatggtasctgaaaaacctgcagttccaccgcttctggtccgtggatgacacgcaggtgcacacggaatatagctctctgcgatccattgtggtggccaactatgaagagtccatcaagatgcccatcaatgagccagcgcctggcaagaagaagtcccagatccaggaatatgtggactakaacgggggcgctggggtccagcacatcgctctcaagaccgaagacatcatcacagcgattcgccacttgagagagagaggcctggagttcttatctgttccctccacgtactacaaacaactgcgggagaagctgaagacggccaagatcaaggtgaaggagaacattgatgccctggaggtgagaccgktgcaggaccggcccacgctcttcctggaagtcatccagcgccacaaccaccagggttttggagccggcaacttcaactcactgttcaaggctttcgaggaggagcagaacytgcggggtaacctcaccaacatggagaccaatggggtggtgcccggcatgtaagccccgcccaccccacggaggccacagccacacagccacgccccctgattctggaactcgcccaacttccctactggctgctccccwwgggtcccgcccaccagcggactcggcccccaasgctccgcccacactgaccacgcccctcggsggggccgccctctgctccagccctcccgattaaagcgtgccccggtccaata

SEQ ID NO: 2135 - DNA, 1999 bp, Homo sapiens
acaatgcaccgcacaccctttactggccggccccgcgctgctctcctaagaccccgcgggccagcgccgcgaccccttcccagcgctcctcgcgctgtgtgcggcgcgtcctctcgccggtgacccggtgtgcgtggggtcgaggcgccgggcggagtggctccgggccgaaacgccatgcggaggggcgagcgcagggacgccggaggtccgcggcccgagtccccggtgcccgcgggcagggcctcgctggaggagccgcctgacgggccgtctgccggccaagccaccgggccgggcgagggccgccgcagcaccgagtccgaggtctacgacgacggcaccaacaccttcttctggcgagcccacaccttaaccgtgctcttcatcctcacctgtacgcttggctatgtgacgctgctggaggaaacacctcaggacacggcctacaacaccaagagaggtattgtggccagtattttggttttcttatgttttggagtcacacaagctaaagacgggccattttccagacctcatccagcttactggaggttttggctctgcgtgagtgtggtctacgagctgtttctcatctttatactcttccagactgtccaggacggccggcagtttctaaagtatgttgaccccaagctgggagtcccactgccagagagagactacgggggaaactgcctcatctacgacccagacaatgagactgacccctttcacaacatctgggacaagttggatggctttgttcccgcgcactttcttggctggtacctgaagaccctgatgatccgagactggtggatgtgcatgatcatcagcgtgatgttcgagttcctggagtacagcctggagcaccagctgcccaacttcagcgagtgctggtgggatcactggatcatggacrtgctcgtctgcaacgggctgggcatctactgcggcatgaagacccttgagtggctgtccctgaagacgtacaagtggcagggcctctggaacattccgacctacaagggcaagatgaagaggatcgccttccagttcacgccgtacagctgggttcgcttcgagtggaagccggcctccagcctgcgtcgctggctggccgtgtgcggcatcatcctggtgttcctgttggcagaactgaacacgttctacctgaagtttgtgctgtggatgcccccggagcactacctggtcctcctgcggctcgtcttcttcgtgaacgtgggtggcgtggccatgcgtgagatctacgacttcatggatgacccgaagccccacaagaagctgggcccgcaggcctggctggtggcggccatcacggccacggagctgctcatcgtggtgaagtacgacccccacacgctcaccctgtccctgcccttctacatctcccagtgctggaccctcggctccgtcctggygctcacctggaccgtctggcgcttcttcctgcgggayatcacattgaggtacaaggagacccggtggcagaagtggcagaacaaggatgaccagggcagcaccgtcggcaacggggaccagcacccactggggctggacgaagacctgctggggcctggggtggccgagggcgagggagcaccaactccaaactgacctgggccgtggctgcctcgtgagcctcccagagcccaggcctccgtggcctcctcctgtgtgagtcccaccaggagccacgtgcccggccttgccctcaagctcgtgtgggcgctcgtccacaaacactccgtggctgagaggcagcggatccaggcagcgatgctgagccacctcctccgagccttcctttcacacagaccaccccggaggacacgtggatgatggggtcagagatcactgagctgcccctcaagggggcctggaacccgggtgctggggtcatgctgcctccgtggctccaaggtgagggtcmtcttcacgagcaaagagaaccaataaagtgacaacgaacgtc

SEQ ID NO: 2136 - DNA, 2457 bp, Homo sapiens
acaatgcaccgcacaccctttactggccggccccgcgctgctctcctaagaccccgcgggccagcgccgcgaccccttcccagcgctcctcgcgctgtgtgcggcgcgtcctctcgccggtgacccggtgtgcgtggggtcgaggcgccgggcggagtggctccgggccgaaacgccatgcggaggggcgagcgcagggacgccggaggtccgcggcccgagtccccggtgcccgcgggcagggcctcgctggaggagccgcctgacgggccgtctgccggccaagccaccgggccgggcgagggccgccgcagcaccgagtccgaggtctacgacgacggcaccaacaccttcttctggcgagcccacaccttaaccgtgctcttcatcctcacctgtacgcttggctatgtgacgctgctggaggaaacacctcaggacacggcctacaacaccaagagaggtattgtggccagtattttggttttcttatgttttggagtcacacaagctaaagacgggccattttccagacctcatccagcttactggaggttttggctctgcgtgagtgtggtctacgagctgtttctcatctttatactcttccagactgtccaggacggccggcagtttctaaagtatgttgaccccaagctgggagtcccactgccagagagagactacgggggaaactgcctcatctacgacccagacaatgagactgacccctttcacaacatctgggacaagttggatggctttgttcccgcgcactttcttggctggtacctgaagaccctgatgatccgagactggtggatgtgcatgatcatcagcgtgatgttcgagttcctggagtacagcctggagcaccagctgcccaacttcagcgagtgctggtgggatcactggatcatggacrtgctcgtctgcaacgggctgggcatctactgcggcatgaagacccttgagtggctgtccctgaagacgtacaagtggcagggcctctggaacattccgacctacaagggcaagatgaagaggatcgccttccagttcacgccgtacagctgggttcgcttcgagtggaagccggcctccagcctgcgtcgctggctggccgtgtgcggcatcatcctggtgttcctgttggcagaactgaacacgttctacctgaagtttgtgctgtggatgcccccggagcactacctggtcctcctgcggctcgtcttcttcgtgaacgtgggtggcgtggccatgcgtgagatctacgacttcatggatgacccgaagccccacaagaagctgggcccgcaggcctggctggtggcggccatcacggccacggagctgctcatcgtggtgaagtacgacccccacacgctcaccctgtccctgcccttctacatctcccagtgctggaccctcggctccgtcctggygctcacctggaccgtctggcgcttcttcctgcgggayatcacattgaggtacaaggagacccggtggcagaagtggcagaacaaggatgaccagggcagcaccgtcggcaacggggaccagcacccactggggctggacgaagacctgctggggcctggggtggccgagggcgagggagcaccaactccaaactgacctgggccgtggctgcctcgtgagcctcccagagcccaggcctccgtggcctcctcctgtgtgagtcccaccaggagccacgtgcccggccttgccctcaaggttttttgcttttctcctgtgcacctggcgaggctgaaggcgaggggtggaggaggccccagcacagcctcatctccatgtgtacacgtgtgtacgtgtgtatgcgtgtgtgtacgcgtgtgtacgcgcgtgtgtacacatgcgtggccgcctgtggtgtgcacgtgtgctctgggctccgaggcttctccagagctgggagctggctggcgtggcaagggcatgctctggggcagtgtgtccctcaggaaccagggtcctccctcccctttctgcctggtcagccccgtggcctctggcccaccaagctccctgtcacccagccatggtgtggtccaggcagggacatctcggtaccctttctgcactccgtgggccctgggtgcgctgaggcctggaggcgtctacactggctccacatccacttcccccgcagctcgtgtgggcgctcgtccacaaacactccgtggctgagaggcagcggatccaggcagcgatgctgagccacctcctccgagccttcctttcacacagaccaccccggaggacacgtggatgatggggtcagagatcactgagctgcccctcaagggggcctggaacccgggtgctggggtcatgctgcctccgtggctccaaggtgagggtcmtcttcacgagcaaagagaaccaataaagtgacaacgaacgtctgaggcttccagccctcccccc

SEQ ID NO: 2137 - DNA, 1980 bp, Homo sapiens
acaatgcaccgcacaccctttactggccggccccgcgctgctctcctaagaccccgcgggccagcgccgcgaccccttcccagcgctcctcgcgctgtgtgcggcgcgtcctctcgccggtgacccggtgtgcgtggggtcgaggcgccgggcggagtggctccgggccgaaacgccatgcggaggggcgagcgcagggacgccggaggtccgcggcccgagtccccggtgcccgcgggcagggcctcgctggaggagccgcctgacgggccgtctgccggccaagccaccgggccgggcgagggccgccgcagcaccgagtccgaggtctacgacgacggcaccaacaccttcttctggcgagcccacaccttaaccgtgctcttcatcctcacctgtacgcttggctatgtgacgctgctggaggaaacacctcaggacacggcctacaacaccaagagaggtattgtggccagtattttggttttcttatgttttggagtcacacaagctaaagacgggccattttccagacctcatccagcttactggaggttttggctctgcgtgagtgtggtctacgagctgtttctcatctttatactcttccagactgtccaggacggccggcagtttctaaagtatgttgaccccaagctgggagtcccactgccagagagagactacgggggaaactgcctcatctacgacccagacaatgagactgacccctttcacaacatctgggacaagttggatggctttgttcccgcgcactttcttggctggtacctgaagaccctgatgatccgagactggtggatgtgcatgatcatcagcgtgatgttcgagttcctggagtacagcctggagcaccagctgcccaacttcagcgagtgctggtgggatcactggatcatggacrtgctcgtctgcaacgggctgggcatctactgcggcatgaagacccttgagtggctgtccctgaagacgtacaagtggcagggcctctggaacattccgacctacaagggcaagatgaagaggatcgccttccagttcacgccgtacagctgggttcgcttcgagtggaagccggcctccagcctgcgtcgctggctggccgtgtgcggcatcatcctggtgttcctgttggcagaactgaacacgttctacctgaagtttgtgctgtggatgcccccggagcactacctggtcctcctgcggctcgtcttcttcgtgaacgtgggtggcgtggccatgcgtgagatctacgacttcatggatgacccgaagccccacaagaagctgggcccgcaggcctggctggtggcggccatcacggccacggagctgctcatcgtggtgaagtacgacccccacacgctcaccctgtccctgcccttctacatctcccagtgctggaccctcggctccgtcctggygctcacctggaccgtctggcgcttcttcctgcgggayatcacattgaggtacaaggagacccggtggcagaagtggcagaacaaggatgaccagggcagcaccgtcggcaacggggaccagcacccactggggctggacgaagacctgctggggcctggggtggccgagggcgagggagcaccaactccaaactgacctgggccgtggctgcctcgtgagcctcccagagcccaggcctccgtggcctcctcctgtctcgtgtgggcgctcgtccacaaacactccgtggctgagaggcagcggatccaggcagcgatgctgagccacctcctccgagccttcctttcacacagaccaccccggaggacacgtggatgatggggtcagagatcactgagctgcccctcaagggggcctggaacccgggtgctggggtcatgctgcctccgtggctccaaggtgagggtcmtcttcacgagcaaagagaaccaataaagtgacaacgaacgtctgaggcttccagccctcccccca

SEQ ID NO: 2138 - DNA, 1230 bp, Homo sapiens
actatccaaaacatttctattttcctaacacaaaaactatagctaagtttttatattctatgtagccccagcctaggacgtaaattccacgagaccaaaagccttgtgatgattccccgaggttgctgaccctcccggtgtgtcccgggcctgctctgggggacacagcggcgaatacgttgaacgaggcccctgtttcacggagctaaagatccagtaaggacttcacccagcgagaggcaactacgccgggcttcgatacccaatacctctgcagaaaggtggagtggcaggaatctcctgaagcctccaacgtccaggaacgcggaaacccagggcctccagtgcaggtgtcatcccggagggcgcatgcggagtcccaagagaggmgcgtcccattggacaatgctgagcggaagagcccaagatagcggggggagttgtgacaggctgctgcagacgtacttagaaaaggggtgcatactggatattcaggctaggagaagaacgcaaaaagcagtgacgtacattattctctgcatatatttacttgggaaattgtgcgtctccctattctgagtcttggaggaattggactggtccaaccttataaagagagcagtagagcgcggcagtatagagagtacctcacgaaggggacgtgggaaagtgttagcggggaacgctgggaaactcccggcctccgccaccatcttgctttcctttaatccggcagtgaccgtgtgtcagaacaatcttgaatcatgaagctactaaccagagccggctctttctcgagattttattccctcaaagttgcccccaaagttaaagccacagctgcgcctgcaggagcaccgccacaacctcaggaccttgagtttaccaagttaccaaatggcttggtkattgcttctttgkaaaactattctcctgtatcaagaattggtttgttcattaaagcaggcagtagatatgaggacttcagcaatttaggaaccacccatttgctgcgtcttacatccagtctgacgacaaaaggagcttcatctttcaagataacccgtggaattgaagcagttggtggcaaattaagtgttcacagcatcttcaaccaggagcagattctatctcaagaaaccactttgtttgctcatccataagaagcatctcctcatctgttcaagctttatcataagattgcagccattcagtcacatcttcaggccc

SEQ ID NO: 2139 - DNA, 2596 bp, Homo sapiens
actatccaaaacatttctattttcctaacacaaaaactatagctaagtttttatattctatgtagccccagcctaggacgtaaattccacgagaccaaaagccttgtgatgattccccgaggttgctgaccctcccggtgtgtcccgggcctgctctgggggacacagcggcgaatacgttgaacgaggcccctgtttcacggagctaaagatccagtaaggacttcacccagcgagaggcaactacgccgggcttcgatacccaatacctctgcagaaaggtggagtggcaggaatctcctgaagcctccaacgtccaggaacgcggaaacccagggcctccagtgcaggtgtcatcccggagggcgcatgcggagtcccaagagaggmgcgtcccattggacaatgctgagcggaagagcccaagatagcggggggagttgtgacaggctgctgcagacgtacttagaaaaggggtgcatactggatattcaggctaggagaagaacgcaaaaagcagtgacgtacattattctctgcatatatttacttgggaaattgtgcgtctccctattctgagtcttggaggaattggactggtccaaccttataaagagagcagtagagcgcggcagtatagagagtacctcacgaaggggacgtgggaaagtgttagcggggaacgctgggaaactcccggcctccgccaccatcttgctttcctttaatccggcagtgaccgtgtgtcagaacaatcttgaatcatgaagctactaaccagagccggctctttctcgagattttattccctcaaagttgcccccaaagttaaagccacagctgcgcctgcaggagcaccgccacaacctcaggaccttgagtttaccaagttaccaaatggcttggtkattgcttctttgkaaaactattctcctgtatcaagaattggtttgttcattaaagcaggcagtagatatgaggacttcagcaatttaggaaccacccatttgctgcgtcttacatccagtctgacgacaaaaggagcttcatctttcaagataacccgtggaattgaagcagttggtggcaaattaagtgtgaccgcaacaagggaaaacatggcttatactgtggaatgcctgcggggtgatgttgatattctaatggagttcctgctcaatgtcaccacagcaccagaatttcgtmgttgggaagtagctgaccttcagcctcagctaaagattgacaaagctgtggcctttcagaatccgcagactcatgtcattgaaaatttgcatgcagcagcttaccrgaatgccttggctaatcccttgtattgtcctgactataggattggaaaagtgacatcagaggagttacattacttcgttcagaaccatttcacaagtgcaagaatggctttgattggacttggtgtgagtcatcctgttctaaagcaagttgctgaacagtttctcaacatgaggggtgggcttggtttatctggtgcaaaggccaactaccrtggaggtgaaatccgagaacagaatggagacagtcttgtccatgctgcttttgtagcagaaagtgctgtcgcgggaagtgcagaggcaaatgcatttagtgttcttcagcatgtcctcggtgctgggccacatgtcaagaggggcagcaacaccaccagccatctgcaccaggctgttgccaaggcaactcagcagccatttgatgtttctgcatttaatgccagttactcagattctggactctttgggatttatactatctcccaggccacagctgctggagatgttatcaaggctgcctataatcaagtaaaaasaatagctcaaggaaacctttccaacacagatgtccaagctgccaagaacaagctgaaagctggatacctaatgtcagtggagtcttctgagtgtttcctggaagaagtcgggtcccaggctctagttgctggttcttacatgccaccatccacagtccttcagcagattgaytcagtggctaatgctgatatcataaatgcrgcaaagaagtttgtttctggccagaagtcaatggcagcaagtggaaatttgggacatacrccttttgttgatgagttgtaatactgatgcacacattacaggagagagctgaacgttctctcagcccagagcagcaaacacatgaaagtcagaagtctctaatatatcatttgtcttttttccagtgaggtaaaataaggcataaatgcaggtaattattcccagctgacctaaagtcaataaaacattctgtttaagtgtttttcttacgtttttctcaatgagttaatcaacaagtatttattatgtgctgatatctttgttttagatgctttaaaggagacaggaatataattattgagtatagaagcatcagaaactattaaaattaaggctaagtggctatcggggtaaatagtgccagattactattggtggcgtttaagatgaaagcaagttcaaaatttgtcattttgggtgtcaacagctaaatggtctggtttttacccctgttttgccttttttgcaataaaattatttccaaaaaacat

SEQ ID NO: 2140 - DNA, 1764 bp, Homo sapiens
gcttattatccttagcataatgtcctcagggttcatctgtgttgtaacatgtgaccagatttcactccttttaaggttgaattatttgctggtttttaaaaaaattttgaattttagttggttaatatgtggagttttgttatattattgttcgcaccttttatacttcagaaattttctttccaaaggaattggttgatagaagattataagggaaagcttactatcctgattcagatgatttactctagtttattttccgattcagtgtgaccgcaacaagggaaaacatggcttatactgtggaatgcctgcggggtgatgttgatattctaatggagttcctgctcaatgtcaccacagcaccagaatttcgtmgttgggaagtagctgaccttcagcctcagctaaagattgacaaagctgtggcctttcagaatccgcagactcatgtcattgaaaatttgcatgcagcagcttaccrgaatgccttggctaatcccttgtattgtcctgactataggattggaaaagtgacatcagaggagttacattacttcgttcagaaccatttcacaagtgcaagaatggctttgattggacttggtgtgagtcatcctgttctaaagcaagttgctgaacagtttctcaacatgaggggtgggcttggtttatctggtgcaaaggccaactaccrtggaggtgaaatccgagaacagaatggagacagtcttgtccatgctgcttttgtagcagaaagtgctgtcgcgggaagtgcagaggcaaatgcatttagtgttcttcagcatgtcctcggtgctgggccacatgtcaagaggggcagcaacaccaccagccatctgcaccaggctgttgccaaggcaactcagcagccatttgatgtttctgcatttaatgccagttactcagattctggactctttgggatttatactatctcccaggccacagctgctggagatgttatcaaggctgcctataatcaagtaaaaasaatagctcaaggaaacctttccaacacagatgtccaagctgccaagtaagtctcagtattaactgtgttttatgtttttgttatttgaaagttgtattcttttcagattataacaatattacaatctatgctcataaggactgagaagtacagaaaagcgtaaaaagggaaacatacccatatcctaccacctaaagatataattgttaacattttggccaggcacagtggctcactaatcccagcactttgggaggccaaggcaggtggttcatttgagaccaggagtttgagaccagcttgggcaacatagcaagacctcgtctccaccaaaattagagaataattgttaacatttttcttagtttattgatcatgcatttttaaacataattgttaatattgtatatatagatgctgcttgacttacactggggttacgtcctgagaaatgcgcatatcgaaaatgcatttaataccctaataacccagtcatccagccaaacaaacataagtcaaaccatcataagttaagttagggaccatctgtatacttttttatcttatttaaatagcatccttattatagaagtttgaaaattacaaataaaagacaaaaatgatctctgatttccctagcaatgattctgtttccattgattcaaattactaaaaatttaaacaatattcattggtgtgtcaaaatacacttgtgcattttctgcagttataaagatatctttgggctt

SEQ ID NO: 2141 - DNA, 1805 bp, Homo sapiens
tcaagaataggagggaatgttgaccagggagcaccgctgcggccgatcagaggagcaggaactggaaccctggccgagtccgaaaaaagccagatctggaaggtggctgcggaacggttttaagcggaagatggaggagccggaggaaccggcrgacagtgggcagtcgctggtcccggtttatatctatagtcccgagtatgtcagtatgtgtgactccctggccaagatccccaaacgggccagtatggtgcattctttgattgaagcatatgcactgcataagcaratgaggatagttaagcctaaagtggcctccatggaggagatggccaccttccacactgatgcttatctgcagcatctccagaaggtcagccaagagggcgatgatgatcatccggactccatagaatatgggctaggttatgactgcccagccactgaagggatatttgactatgcagcagctataggaggggctacgatcacagctgcccaatgcctgattgacggaatgtgcaaagtagcaattaactggtctggagggtggcatcatgcaaagaaagatgaagcatctggtttttgttatctcaatgatgctgtcctgggaatattacgattgcgacggaaatttgagcgtattctctacgtggatttggatctgcaccatggagatggtgtagaagacgcattcagtttcacctccaaagtcatgaccgtgtccctgcacaaattctccccaggatttttcccaggcaagaacaggtgacgtgtctgatgttggcctagggaagggacggtactacagtgtaaatgtgcccattcaggatggcatacaagatgaaaaatattaccagatctgtgaaagtgtactaaaggaagtataccaagcctttaatcccaaagcagtggtcttacagctgggagctgacacaatagctggggatcccatgtgctcctttaacatgactccagtgggaattggcaagtgtcttaagtacatccttcaatggcagttggcaacactcattttgggaggaggaggctataaccttgccaacacggctcgatgctggacatacttgaccggggtcatcctagggaaaacactatcctctgagatcccagatcatgagtttttcacagcatatggtcctgattatgtgctggaaatcacgccaagctgccggccagaccgcaatgagccccaccgaatccaacaaatcctcaactacatcaaagggaatctgaagcatgtggtctagttgacagaaagagatcaggtttccagagctgaggagtggtgcctataatgaagacagcgtgtttatgcaagcagtttgtggaatttgtgactgcagggaaaatttgaaagaaattacttcctgaaaatttccaaggggcatcaagtggcagctggcttcctggggtgaagaggcaggcaccccagagtcctcaactggacctaggggaagaaggagatatcccacatttaaagttcttatttaaaaaaacacacacacacaaatgaaatttttaatctttgaaaattatttttaagcgaattggggaggggagtattttaatcatcttaaatgaaacagatcagaagctggatgagagcagtcaccagtttgtagggcaggaggcagctgasaggcagggtttgggcctcaggaccatccaggtggagccctgggagagagggtactgatcagcagactgggaggtggggagaagtccgctggtgttgttttagtgttatatatctttggtttttttaataaaatctttgaaaacct

SEQ ID NO: 2142 - DNA, 616 bp, Homo sapiens
tcaagaataggagggaatgttgaccagggagcaccgctgcggccgatcagaggagcaggaactggaaccctggccgagtccgaaaaaagccagatctggaaggtggctgcggaacggttttaagcggaagatggaggagccggaggaaccggcrgacagtgggcagtcgctggtcccggtttatatctatagtcccgagtatgtcagtatgtgtgactccctggccaagatccccaaacgggccagtatggtgcattctttgattgaagcatatgcactgcataagcaratgaggatagttaagcctaaagtggcctccatggaggagatggccaccttccacactgatgcttatctgcagcatctccagaaggtcagccaagagggcgatgatgatcatccggactccatagaatatgggctaggttatgactgcccagccactgaagggatatttgactatgcagcagctataggaggggctacgatcacagctgcccaatgcctgattgacggaatgtgcaaagtagcaattaactggtctggagggtggcatcatgcaaagaaagacgtgtgtgtatgtggcactttacaaggcattctgaagaaatccaag

SEQ ID NO: 2143 - DNA, 1799 bp, Homo sapiens
tcaagaataggagggaatgttgaccagggagcaccgctgcggccgatcagaggagcaggaactggaaccctggccgagtccgaaaaaagccagatctggaaggtggctgcggaacggttttaagcggaagatggaggagccggaggaaccggcrgacagtgggcagtcgctggtcccggtttatatctatagtcccgagtatgtcagtatgtgtgactccctggccaagatccccaaacgggccagtatggtgcattctttgattgaagcatatgcactgcataagcaratgaggatagttaagcctaaagtggcctccatggaggagatggccaccttccacactgatgcttatctgcagcatctccagaaggtcagccaagagggcgatgatgatcatccggactccatagaatatgggctaggttatgactgcccagccactgaagggatatttgactatgcagcagctataggaggggctacgatcacagctgcccaatgcctgattgacggaatgtgcaaagtagcaattaactggtctggagggtggcatcatgcaaagaaagatgaagcatctggtttttgttatctcaatgatgctgtcctgggaatattacgattgcgacggaaatttgagcgtattctctacgtggatttggatctgcaccatggagatggtgtagaagacgcattcagtttcacctccaaagtcatgaccgtgtccctgcacaaattctccccaggatttttcccaggcaagtgacgtgtctgatgttggcctagggaagggacggtactacagtgtaaatgtgcccattcaggatggcatacaagatgaaaaatattaccagatctgtgaaagtgtactaaaggaagtataccaagcctttaatcccaaagcagtggtcttacagctgggagctgacacaatagctggggatcccatgtgctcctttaacatgactccagtgggaattggcaagtgtcttaagtacatccttcaatggcagttggcaacactcattttgggaggaggaggctataaccttgccaacacggctcgatgctggacatacttgaccggggtcatcctagggaaaacactatcctctgagatcccagatcatgagtttttcacagcatatggtcctgattatgtgctggaaatcacgccaagctgccggccagaccgcaatgagccccaccgaatccaacaaatcctcaactacatcaaagggaatctgaagcatgtggtctagttgacagaaagagatcaggtttccagagctgaggagtggtgcctataatgaagacagcgtgtttatgcaagcagtttgtggaatttgtgactgcagggaaaatttgaaagaaattacttcctgaaaatttccaaggggcatcaagtggcagctggcttcctggggtgaagaggcaggcaccccagagtcctcaactggacctaggggaagaaggagatatcccacatttaaagttcttatttaaaaaaacacacacacacaaatgaaatttttaatctttgaaaattatttttaagcgaattggggaggggagtattttaatcatcttaaatgaaacagatcagaagctggatgagagcagtcaccagtttgtagggcaggaggcagctgasaggcagggtttgggcctcaggaccatccaggtggagccctgggagagagggtactgatcagcagactgggaggtggggagaagtccgctggtgttgttttagtgttatatatctttggtttttttaataaaatctttgaaaacct

SEQ ID NO: 2144 - DNA, 1801 bp, Homo sapiens
tcaagaataggagggaatgttgaccagggagcaccgctgcggccgatcagaggagcaggaactggaaccctggccgagtccgaaaaaagccagatctggaaggtggctgcggaacggttttaagcggaagatggaggagccggaggaaccggcrgacagtgggcagtcgctggtcccggtttatatctatagtcccgagtatgtcagtatgtgtgactccctggccaagatccccaaacgggccagtatggtgcattctttgattgaagcatatgcactgcataagcaratgaggatagttaagcctaaagtggcctccatggaggagatggccaccttccacactgatgcttatctgcagcatctccagaaggtcagccaagagggcgatgatgatcatccggactccatagaatatgggctaggttatgactgcccagccactgaagggatatttgactatgcagcagctataggaggggctacgatcacagctgcccaatgcctgattgacggaatgtgcaaagtagcaattaactggtctggagggtggcatcatgcaaagaaagatgaagcatctggtttttgttatctcaatgatgctgtcctgggaatattacgattgcgacggaaatttgagcgtattctctacgtggatttggatctgcaccatggagatggtgtagaagacgcattcagtttcacctccaaagtcatgaccgtgtccctgcacaaattctccccaggatttttcccaggaacaggtgacgtgtctgatgttggcctagggaagggacggtactacagtgtaaatgtgcccattcaggatggcatacaagatgaaaaatattaccagatctgtgaaagtgtactaaaggaagtataccaagcctttaatcccaaagcagtggtcttacagctgggagctgacacaatagctggggatcccatgtgctcctttaacatgactccagtgggaattggcaagtgtcttaagtacatccttcaatggcagttggcaacactcattttgggaggaggaggctataaccttgccaacacggctcgatgctggacatacttgaccggggtcatcctagggaaaacactatcctctgagatcccagatcatgagtttttcacagcatatggtcctgattatgtgctggaaatcacgccaagctgccggccagaccgcaatgagccccaccgaatccaacaaatcctcaactacatcaaagggaatctgaagcatgtggtctagttgacagaaagagatcaggtttccagagctgaggagtggtgcctataatgaagacagcgtgtttatgcaagcagtttgtggaatttgtgactgcagggaaaatttgaaagaaattacttcctgaaaatttccaaggggcatcaagtggcagctggcttcctggggtgaagaggcaggcaccccagagtcctcaactggacctaggggaagaaggagatatcccacatttaaagttcttatttaaaaaaacacacacacacaaatgaaatttttaatctttgaaaattatttttaagcgaattggggaggggagtattttaatcatcttaaatgaaacagatcagaagctggatgagagcagtcaccagtttgtagggcaggaggcagctgasaggcagggtttgggcctcaggaccatccaggtggagccctgggagagagggtactgatcagcagactgggaggtggggagaagtccgctggtgttgttttagtgttatatatctttggtttttttaataaaatctttgaaaacct

SEQ ID NO: 2145 - DNA, 1928 bp, Homo sapiens
tcagagctttgtggagggaagaaaaacctggagggggcaggagagtaaaaagaagaaacccaggcagacaggcagttggacacactgaggaagaccccccacgagtgggaaccccctggaaggaacacaccggccccggcccccaggaagggagcacaatggaggccgctcatgctaaaaccacggaggaatgtttggcctattttggggtgagtgagaccacgggcctcaccccggaccaagttaagcggaatctggagaaatacggcctcaatgagctccctgctgaggaagggaagaccctgtgggagctggtgatagagcagtttgaagacctcctggtgcggattctcctcctggccgcatgcatttccttcgtgctggcctggtttgaggaaggtgaagagaccatcactgcctttgttgaaccctttgtcatcctcttgatcctcattgccaatgccatcgtgggggtttggcaggagcggaacgcagagaacgccatcgaggccctgaaggagtatgagccagagatggggaaggtctaccgggctgaccgcaagtcagtgcaaaggatcaaggctcgggacatcgtccctggggacatcgtggaggtggctgtgggggacaaagtccctgcagacatccgaatcctcgccatcaaatccaccacgctgcgggttgaccagtccatcctgacaggcgagtctgtatctgtcatcaaacacacggagcccgttcctgacccccgagctgtcaaccaggacaagaagaacatgcttttctcgggcaccaacattgcagccggcaaggccttgggcatcgtggccaccacyggtgtgggcaccgagattgggaagatccgagaccaaatggctgccacagaacaggacaagacccccttgcagcagaagctggatgagtttggggagcagctctccaaggtcatctccctcatctgtgtggctgtctggcttatcaacattggccacttcaacgaccccgtccatgggggctcctggttccgcggggccatctactactttaagattgccgtggccttggctgtggctgccatccccgaaggtcttcctgcagtcatcaccacctgcctggccctgggtacccgtcggatggcaaagaagaatgccattgtaagaagcttgccctccgtagagaccctgggctgcacctctgtcatctgttccgacaagacaggcaccctcaccaccaaccagatgtctgtctgcaagatgtttatcattgacaaggtggatggggacatctgcctcctgaatgagttctccatcaccggctccacttamgctccagagggagaggtcttgaagaatgataagccagtccggccagggcagtatgacgggctggtggagctggccaccatctgtgccctctgcaatgactcctccttggacttcaacgaggccaaaggtgtctatgagaaggtcggcgaggccaccgagacagcactcaccaccctggtggagaagatgaatgtgttcaacacggatgtgagaagcctctcgaaggtggagagagccaacgcctgcaactcggtgatccgccagctaatgaagaaggaattcaccctggagttctcccgagacagaaagtccatgtctgtctattgctccccagccaaatcttcccgggctgctgtgggcaacaagatgtttgtcaagggtgcccctgagggcgtcatcgaccgctgtaactatgtgcgagttggcaccacccgggtgccactgacrgggccggtgaaggaaaagatcatggcggtgatcaaggagtggggcactggccgggacaccctgcgctgcttggccctggccacccgggacacccccccgaagcgagaggaaatggtcctggatgactctgccaggttcctggagtatgaggtaagc

SEQ ID NO: 2146 - DNA, 1922 bp, Homo sapiens
tcagagctttgtggagggaagaaaaacctggagggggcaggagagtaaaaagaagaaacccaggcagacaggcagttggacacactgaggaagaccccccacgagtgggaaccccctggaaggaacacaccggccccggcccccaggaagggagcacaatggaggccgctcatgctaaaaccacggaggaatgtttggcctattttggggtgagtgagaccacgggcctcaccccggaccaagttaagcggaatctggagaaatacggcctcaatgagctccctgctgaggaagggaagaccctgtgggagctggtgatagagcagtttgaagacctcctggtgcggattctcctcctggccgcatgcatttccttcgtgctggcctggtttgaggaaggtgaagagaccatcactgcctttgttgaaccctttgtcatcctcttgatcctcattgccaatgccatcgtgggggtttggcaggagcggaacgcagagaacgccatcgaggccctgaaggagtatgagccagagatggggaaggtctaccgggctgaccgcaagtcagtgcaaaggatcaaggctcgggacatcgtccctggggacatcgtggaggtggctgtgggggacaaagtccctgcagacatccgaatcctcgccatcaaatccaccacgctgcgggttgaccagtccatcctgacaggcgagtctgtatctgtcatcaaacacacggagcccgttcctgacccccgagctgtcaaccaggacaagaagaacatgcttttctcgggcaccaacattgcagccggcaaggccttgggcatcgtggccaccacyggtgtgggcaccgagattgggaagatccgagaccaaatggctgccacagaacaggacaagacccccttgcagcagaagctggatgagtttggggagcagctctccaaggtcatctccctcatctgtgtggctgtctggcttatcaacattggccacttcaacgaccccgtccatgggggctcctggttccgcggggccatctactactttaagattgccgtggccttggctgtggctgccatccccgaaggtcttcctgcagtcatcaccacctgcctggccctgggtacccgtcggatggcaaagaagaatgccattgtaagaagcttgccctccgtagagaccctgggctgcacctctgtcatctgttccgacaagacaggcaccctcaccaccaaccagatgtctgtctgcaagatgtttatcattgacaaggtggatggggacatctgcctcctgaatgagttctccatcaccggctccacttamgctccagagggagaggtcttgaagaatgataagccagtccggccagggcagtatgacgggctggtggagctggccaccatctgtgccctctgcaatgactcctccttggacttcaacgaggccaaaggtgtctatgagaaggtcggcgaggccaccgagacagcactcaccaccctggtggagaagatgaatgtgttcaacacggatgtgagaagcctctcgaaggtggagagagccaacgcctgcaactcggtgatccgccagctaatgaagaaggaattcaccctggagttctcccgagacagaaagtccatgtctgtctattgctccccagccaaatcttcccgggctgctgtgggcaacaagatgtttgtcaagggtgcccctgagggcgtcatcgaccgctgtaactatgtgcgagttggcaccacccgggtgccactgacrgggccggtgaaggaaaagatcatggcggtgatcaaggagtggggcactggccgggacaccctgcgctgcttggccctggccacccgggacacccccccgaagcgagaggaaatggtcctggatgactctgccaggttcctggagtatgag

SEQ ID NO: 2147 - DNA, 4891 bp, Homo sapiens
gcttcacctctgccgacccggcgcgctcggctgcgggcggcggcgcctccttcggctcctcctcggaatagctcgcggcctgtagcccctggcaggagggcccctcagccccccggtgtggacaggcagcggcggctggcgacgaacgccgggatttcggcggccccggcgctccctttcccggcctcgttttccggataaggaagcgcgggtcccgcatgagccccggcggtggcggcagcgaaagagaacgaggcggtggcgggcggaggcggcgggcgagggcgactacgaccagtgaggcggccgccgcagcccaggcgcgggggcgacgacagatcaggagaacctcagtctgacgacattgaagctagccgaatgaagcgagcagctgcaaagcatctaatagaacgctactaccaccagttaactgagggctrtggaaatgaagcctgcacgaatgagttttgtgcttcctgtccaacttttcttcgtatggataataatgcagcagctattaaagccctcgagctttataagattaatgcaaaactctgtgatcctcatccctccaagaaaggagcaagctcagcttaccttgagaactcgaaaggtgcccccaacaactcctgctctgagataaaaatgaacaagaaaggcgctagaattgattttaaagatgtgacttacytaacagaagagaaggtatatgaaattcttgaattatgtagagaaagagaggattattcccctttaatccgtgttattggaagagttttttctagtgctgaggcwttggtacagagcttccggaaagttaaacaacacaccaaggaagaactgaaatctcttcaagcaaaagatgaagacaaagatkaagatgaaaaggaaaaagctgcatgttctgctgctgctatggaagaagactcagaagcatcttcctcaaggataggtgatagctcacagggagacaacaatttgcaaaaattaggccctgatgatgtgtctgtggatattgatgccattagaagggtctacaccagattgctctctaatgaaaaaattgaaaytgcctttctcaatgcacttgtatatttgtcacctaacgtggaatgtgacttgacgtatcacaatgtatactctcgagatcctaattatctgaatttgttcattatmgkaatggagaayagaaatctccacagtcctgaatatctggaaatggctttgccattattttgcaaagcgatgagcaagctaccccttgcagcccaaggaaaactgatcagactgtrgtctaaatacaatgcagaccagattcggagaatgatggagacatttcagcaacttattacttataaagtcataagcaatgaatttaacagtcgaaatctagtgaatgatgatgatgccattgttgctgcttcgaagtgcttgaaaatggtttactatgcaaatgtagtgggaggggaagtggacacaaatcacaatgaagaagatgatgaagagcccatccctgagtccagcgagctgacacttcaggaacttttgggagaagaaagaagaaacaagaaaggtcctcgagtggaccccctggaaactgaacttggtgttaaaaccctggattgtygaaaaccacttatcccttttgaagagtttattaatgaaccactgaatgaggttctagaaatggataaagattatacttttttcaaagtagaaacagagaacaaattctcttttatgacatgtccctttatattgaatgctgtcacaaagaatttgggattatattatgacaatagaattcgcatgtacagtgaacgaagaatcactgttctctacagcttagttcaaggacagcagttgaatccatatttgagactcaaagttagacgtgaccatatcatagatgatgcacttgtccggctagagatgatcgctatggaaaatcctgcagacttgaagaagcagttgtakgtggaatttgaaggagaacaaggagttgatgagggaggtgtttccaaagaattttttcagctggttgtggaggaaatcttcaatccagatattggtatgttcacatacgatgartctacaaaattgttttggtttaatccatcttcttttgaaactgagggtcagtttactctgattggcatagtactgggtctggctatttacaataactgtatactggatgtacattttcccatggttgtctacaggaagctaatggggaaaaaaggaacttttcgtgacttgggagactctcacccagttctatatcagagtttaaaagatttattggagtatgaagggaatgtggaagatgacatgatgatcactttccagatatcacagacagatctttttggtaacccaatgatgtatgatctaaaggaaaatggtgataaaattccaattacaaatgaaaacaggaaggaatttgtcaatctttattctgactacattctcaataaatcagtagaaaaacagttcaaggcttttcggagaggttttcatatggtgaccaatgaatctcccttaaagtacttattcagaccagaagaaattgaattgcttatatgtggaagccggaatctagatttccaagcactagaagaaactacagaatatgacggtggctataccagggactctgttctgattagggagttctgggaaatcgttcattcatttacagatgaacagaaaagactcttcttgcagtttacaacgggcacagacagagcacctgtgggaggactaggaaaaytaaagatgattatagccaaaaatggcccagacacagaaaggttacctacatctcatacttgctttaatgtgcttttacttccggaatactcaagcaaagaaaaacttaaagagagattgttgaaggccatcacgtatgccaaaggatttggcatgctgtaaaacaaaacaaaacaaaataaaacaaaaaaaaggaaggaaaaaaaaagaaaaaatttaaaaaattttaaaaatataacgagggataaatttttggtggtgatagtgtcccagtacaaaaaggctgtaagatagtcaaccacagtagtcacctatgtctgtgcctcccttctttattggggacatgtgggctggaacagcagatttcagctacatatatgaacaaatcctttattattattataattatttttttgcgtgaaagtgttacatattctttcacttgtatgtacagagaggtttttctgaatatttattttaagggttaaatcacttttgcttgtgtttattactgcttgaggttgagccttttgagtatttaaaaaatatataccaacagaactactctcccaaggaaaatattgccaccatttgtagaccacgtaaccttcaagtatgtgctacttttttgtccctgtatctaactcaaatcaggaactgtattttttttaatgatttgcttttgaaacttgaagtcttgaaaacagtgtgatgcaattactgctgttctagcccccaaagagttttctgtgcaaaatcttgagaatcaatcaataaagaaagatggaaggaagggagaaattggaatgttttaactgcagccctcagaactttagtaacagcacaacaaattaaaaacaaaaacaactcatgccacagtatgtcgtcttcatgtgtcttgcaatgaactgtttcagtagccaatcctctttcttagtatatgaaaggacagggatttttgttcttgttgttctcgttgttgttttaagtttactggggaaagtgcatttggccaaatgaaatggtagtcaagcctattgcaacaaagttaggaagtttgttgtttgtttattataaacaaaaagcatgtgaaagtgcacttaagatagagtttttattaattacttacttattacctagattttaaatagacaatccaaagtctccccttcgtgttgccatcatcttgttgaatcagccattttatcgaggcacgtgatcagtgttgcaacataatgaaaaagatggctactgtgccttgtgttacttaatcatacagtaagctgacctggaaatgaatgaaactattactcctaagaattacattgtatagccccacagattaaatttaattaattaattcaaaacatgttaaacgttactttcatgtactatggaaaagtacaagtargtttacattactgatttccagaagtaagtagtttcccctttcctagtcttctgtgtatgtgatgttgttaatttcttttattgcattataaaataaaaggattatgtatttttaactaaggtgagacattgatatatccttttgctacaagctatagctaatgtgctgagcttgtgccttggtgattgattgattgattgactgattgttttaactgattactgtagatcaacctgatgatttgtttgtttgaaattggcaggaaaaatgcagctttcaaatcattggggggagaaaaaggatgtctttcaggattattttaattaatttttttcataattgagacagaactgtttgttatgtaccataatgctaaataaaactgtggcacttttcaccataatttaatttagtggaaaaagaagacaatgctttccatattgtgataaggtaacatggggtttttctgggccagcctttagaacactgttagggtacatacgctaccttgatgaaagggaccttcgtgcaactgtagtcatcttaaaggcttctcatccactgtgcttcttaatgtgtaattaaagtgaggagaaattaaatactctgagggcgttttatataataaattcgtgaagaaatgtgtgctcttcagttctcaagttttattattatggtatttattaaagttctacaattgtaata

SEQ ID NO: 2148 - DNA, 4225 bp, Homo sapiens
tctgattttctagatgtgacttacytaacagaagagaaggtatatgaaattcttgaattatgtagagaaagagaggattattcccctttaatccgtgttattggaagagttttttctagtgctgaggcwttggtacagagcttccggaaagttaaacaacacaccaaggaagaactgaaatctcttcaagcaaaagatgaagacaaagatkaagatgaaaaggaaaaagctgcatgttctgctgctgctatggaagaagactcagaagcatcttcctcaaggataggtgatagctcacagggagacaacaatttgcaaaaattaggccctgatgatgtgtctgtggatattgatgccattagaagggtctacaccagattgctctctaatgaaaaaattgaaaytgcctttctcaatgcacttgtatatttgtcacctaacgtggaatgtgacttgacgtatcacaatgtatactctcgagatcctaattatctgaatttgttcattatmgkaatggagaayagaaatctccacagtcctgaatatctggaaatggctttgccattattttgcaaagcgatgagcaagctaccccttgcagcccaaggaaaactgatcagactgtrgtctaaatacaatgcagaccagattcggagaatgatggagacatttcagcaacttattacttataaagtcataagcaatgaatttaacagtcgaaatctagtgaatgatgatgatgccattgttgctgcttcgaagtgcttgaaaatggtttactatgcaaatgtagtgggaggggaagtggacacaaatcacaatgaagaagatgatgaagagcccatccctgagtccagcgagctgacacttcaggaacttttgggagaagaaagaagaaacaagaaaggtcctcgagtggaccccctggaaactgaacttggtgttaaaaccctggattgtygaaaaccacttatcccttttgaagagtttattaatgaaccactgaatgaggttctagaaatggataaagattatacttttttcaaagtagaaacagagaacaaattctcttttatgacatgtccctttatattgaatgctgtcacaaagaatttgggattatattatgacaatagaattcgcatgtacagtgaacgaagaatcactgttctctacagcttagttcaaggacagcagttgaatccatatttgagactcaaagttagacgtgaccatatcatagatgatgcacttgtccggctagagatgatcgctatggaaaatcctgcagacttgaagaagcagttgtakgtggaatttgaaggagaacaaggagttgatgagggaggtgtttccaaagaattttttcagctggttgtggaggaaatcttcaatccagatattggtatgttcacatacgatgartctacaaaattgttttggtttaatccatcttcttttgaaactgagggtcagtttactctgattggcatagtactgggtctggctatttacaataactgtatactggatgtacattttcccatggttgtctacaggaagctaatggggaaaaaaggaacttttcgtgacttgggagactctcacccagttctatatcagagtttaaaagatttattggagtatgaagggaatgtggaagatgacatgatgatcactttccagatatcacagacagatctttttggtaacccaatgatgtatgatctaaaggaaaatggtgataaaattccaattacaaatgaaaacaggaaggaatttgtcaatctttattctgactacattctcaataaatcagtagaaaaacagttcaaggcttttcggagaggttttcatatggtgaccaatgaatctcccttaaagtacttattcagaccagaagaaattgaattgcttatatgtggaagccggaatctagatttccaagcactagaagaaactacagaatatgacggtggctataccagggactctgttctgattagggagttctgggaaatcgttcattcatttacagatgaacagaaaagactcttcttgcagtttacaacgggcacagacagagcacctgtgggaggactaggaaaaytaaagatgattatagccaaaaatggcccagacacagaaaggttacctacatctcatacttgctttaatgtgcttttacttccggaatactcaagcaaagaaaaacttaaagagagattgttgaaggccatcacgtatgccaaaggatttggcatgctgtaaaacaaaacaaaacaaaataaaacaaaaaaaaggaaggaaaaaaaaagaaaaaatttaaaaaattttaaaaatataacgagggataaatttttggtggtgatagtgtcccagtacaaaaaggctgtaagatagtcaaccacagtagtcacctatgtctgtgcctcccttctttattggggacatgtgggctggaacagcagatttcagctacatatatgaacaaatcctttattattattataattatttttttgcgtgaaagtgttacatattctttcacttgtatgtacagagaggtttttctgaatatttattttaagggttaaatcacttttgcttgtgtttattactgcttgaggttgagccttttgagtatttaaaaaatatataccaacagaactactctcccaaggaaaatattgccaccatttgtagaccacgtaaccttcaagtatgtgctacttttttgtccctgtatctaactcaaatcaggaactgtattttttttaatgatttgcttttgaaacttgaagtcttgaaaacagtgtgatgcaattactgctgttctagcccccaaagagttttctgtgcaaaatcttgagaatcaatcaataaagaaagatggaaggaagggagaaattggaatgttttaactgcagccctcagaactttagtaacagcacaacaaattaaaaacaaaaacaactcatgccacagtatgtcgtcttcatgtgtcttgcaatgaactgtttcagtagccaatcctctttcttagtatatgaaaggacagggatttttgttcttgttgttctcgttgttgttttaagtttactggggaaagtgcatttggccaaatgaaatggtagtcaagcctattgcaacaaagttaggaagtttgttgtttgtttattataaacaaaaagcatgtgaaagtgcacttaagatagagtttttattaattacttacttattacctagattttaaatagacaatccaaagtctccccttcgtgttgccatcatcttgttgaatcagccattttatcgaggcacgtgatcagtgttgcaacataatgaaaaagatggctactgtgccttgtgttacttaatcatacagtaagctgacctggaaatgaatgaaactattactcctaagaattacattgtatagccccacagattaaatttaattaattaattcaaaacatgttaaacgttactttcatgtactatggaaaagtacaagtargtttacattactgatttccagaagtaagtagtttcccctttcctagtcttctgtgtatgtgatgttgttaatttcttttattgcattataaaataaaaggattatgtatttttaactaaggtgagacattgatatatccttttgctacaagctatagctaatgtgctgagcttgtgccttggtgattgattgattgattgactgattgttttaactgattactgtagatcaacctgatgatttgtttgtttgaaattggcaggaaaaatgcagctttcaaatcattggggggagaaaaaggatgtctttcaggattattttaattaatttttttcataattgagacagaactgtttgttatgtaccataatgctaaataaaactgtggcacttttcaccataatttaatttagtggaaaaagaagacaatgctttccatattgtgataaggtaacatggggtttttctgggccagcctttagaacactgttagggtacatacgctaccttgatgaaagggaccttcgtgcaactgtagtcatcttaaaggcttctcatccactgtgcttcttaatgtgtaattaaagtgaggagaaattaaatactctgagggcgttttatataataaattcgtgaagaaatgtgtgctcttcagttctcaagttttattattatggtatttattaaagttctacaattgtaata

SEQ ID NO: 2149 - DNA, 5255 bp, Homo sapiens
cgcggccgcgagatccgtgtgtctcccaagatggtggcgctgggctcggggtgactacaggagacgacggggccttttcccttcgccaggacccgacacaccaggcttcgctcgctcgcgcacccctccgccgcgtagccatccgccagcgcgggcgcccgccatccgccgcctacttacgcttcacctctgccgacccggcgcgctcggctgcgggcggcggcgcctccttcggctcctcctcggaatagctcgcggcctgtagcccctggcaggagggcccctcagccccccggtgtggacaggcagcggcggctggcgacgaacgccgggatttcggcggccccggcgctccctttcccggcctcgttttccggataaggaagcgcgggtcccgcatgagccccggcggtggcggcagcgaaagagaacgaggcggtggcgggcggaggcggcgggcgagggcgactacgaccagtgaggcggccgccgcagcccaggcgcgggggcgacgacaggttaaaaatctgtaagagcctgattttagaattcaccagctcctcagaagtttggcgaaatatgagttattaagcctacgctcagatcaaggtagcagctagactggtgtgacaacctgtttttaatcagtgactcaaagctgtgatcaccctgatgtcaccgaatggccacagcttgtaaaagatcaggagaacctcagtctgacgacattgaagctagccgaatgaagcgagcagctgcaaagcatctaatagaacgctactaccaccagttaactgagggctrtggaaatgaagcctgcacgaatgagttttgtgcttcctgtccaacttttcttcgtatggataataatgcagcagctattaaagccctcgagctttataagattaatgcaaaactctgtgatcctcatccctccaagaaaggagcaagctcagcttaccttgagaactcgaaaggtgcccccaacaactcctgctctgagataaaaatgaacaagaaaggcgctagaattgattttaaagatgtgacttacytaacagaagagaaggtatatgaaattcttgaattatgtagagaaagagaggattattcccctttaatccgtgttattggaagagttttttctagtgctgaggcwttggtacagagcttccggaaagttaaacaacacaccaaggaagaactgaaatctcttcaagcaaaagatgaagacaaagatkaagatgaaaaggaaaaagctgcatgttctgctgctgctatggaagaagactcagaagcatcttcctcaaggataggtgatagctcacagggagacaacaatttgcaaaaattaggccctgatgatgtgtctgtggatattgatgccattagaagggtctacaccagattgctctctaatgaaaaaattgaaaytgcctttctcaatgcacttgtatatttgtcacctaacgtggaatgtgacttgacgtatcacaatgtatactctcgagatcctaattatctgaatttgttcattatmgkaatggagaayagaaatctccacagtcctgaatatctggaaatggctttgccattattttgcaaagcgatgagcaagctaccccttgcagcccaaggaaaactgatcagactgtrgtctaaatacaatgcagaccagattcggagaatgatggagacatttcagcaacttattacttataaagtcataagcaatgaatttaacagtcgaaatctagtgaatgatgatgatgccattgttgctgcttcgaagtgcttgaaaatggtttactatgcaaatgtagtgggaggggaagtggacacaaatcacaatgaagaagatgatgaagagcccatccctgagtccagcgagctgacacttcaggaacttttgggagaagaaagaagaaacaagaaaggtcctcgagtggaccccctggaaactgaacttggtgttaaaaccctggattgtygaaaaccacttatcccttttgaagagtttattaatgaaccactgaatgaggttctagaaatggataaagattatacttttttcaaagtagaaacagagaacaaattctcttttatgacatgtccctttatattgaatgctgtcacaaagaatttgggattatattatgacaatagaattcgcatgtacagtgaacgaagaatcactgttctctacagcttagttcaaggacagcagttgaatccatatttgagactcaaagttagacgtgaccatatcatagatgatgcacttgtccggctagagatgatcgctatggaaaatcctgcagacttgaagaagcagttgtakgtggaatttgaaggagaacaaggagttgatgagggaggtgtttccaaagaattttttcagctggttgtggaggaaatcttcaatccagatattggtatgttcacatacgatgartctacaaaattgttttggtttaatccatcttcttttgaaactgagggtcagtttactctgattggcatagtactgggtctggctatttacaataactgtatactggatgtacattttcccatggttgtctacaggaagctaatggggaaaaaaggaacttttcgtgacttgggagactctcacccagttctatatcagagtttaaaagatttattggagtatgaagggaatgtggaagatgacatgatgatcactttccagatatcacagacagatctttttggtaacccaatgatgtatgatctaaaggaaaatggtgataaaattccaattacaaatgaaaacaggaaggaatttgtcaatctttattctgactacattctcaataaatcagtagaaaaacagttcaaggcttttcggagaggttttcatatggtgaccaatgaatctcccttaaagtacttattcagaccagaagaaattgaattgcttatatgtggaagccggaatctagatttccaagcactagaagaaactacagaatatgacggtggctataccagggactctgttctgattagggagttctgggaaatcgttcattcatttacagatgaacagaaaagactcttcttgcagtttacaacgggcacagacagagcacctgtgggaggactaggaaaaytaaagatgattatagccaaaaatggcccagacacagaaaggttacctacatctcatacttgctttaatgtgcttttacttccggaatactcaagcaaagaaaaacttaaagagagattgttgaaggccatcacgtatgccaaaggatttggcatgctgtaaaacaaaacaaaacaaaataaaacaaaaaaaaggaaggaaaaaaaaagaaaaaatttaaaaaattttaaaaatataacgagggataaatttttggtggtgatagtgtcccagtacaaaaaggctgtaagatagtcaaccacagtagtcacctatgtctgtgcctcccttctttattggggacatgtgggctggaacagcagatttcagctacatatatgaacaaatcctttattattattataattatttttttgcgtgaaagtgttacatattctttcacttgtatgtacagagaggtttttctgaatatttattttaagggttaaatcacttttgcttgtgtttattactgcttgaggttgagccttttgagtatttaaaaaatatataccaacagaactactctcccaaggaaaatattgccaccatttgtagaccacgtaaccttcaagtatgtgctacttttttgtccctgtatctaactcaaatcaggaactgtattttttttaatgatttgcttttgaaacttgaagtcttgaaaacagtgtgatgcaattactgctgttctagcccccaaagagttttctgtgcaaaatcttgagaatcaatcaataaagaaagatggaaggaagggagaaattggaatgttttaactgcagccctcagaactttagtaacagcacaacaaattaaaaacaaaaacaactcatgccacagtatgtcgtcttcatgtgtcttgcaatgaactgtttcagtagccaatcctctttcttagtatatgaaaggacagggatttttgttcttgttgttctcgttgttgttttaagtttactggggaaagtgcatttggccaaatgaaatggtagtcaagcctattgcaacaaagttaggaagtttgttgtttgtttattataaacaaaaagcatgtgaaagtgcacttaagatagagtttttattaattacttacttattacctagattttaaatagacaatccaaagtctccccttcgtgttgccatcatcttgttgaatcagccattttatcgaggcacgtgatcagtgttgcaacataatgaaaaagatggctactgtgccttgtgttacttaatcatacagtaagctgacctggaaatgaatgaaactattactcctaagaattacattgtatagccccacagattaaatttaattaattaattcaaaacatgttaaacgttactttcatgtactatggaaaagtacaagtargtttacattactgatttccagaagtaagtagtttcccctttcctagtcttctgtgtatgtgatgttgttaatttcttttattgcattataaaataaaaggattatgtatttttaactaaggtgagacattgatatatccttttgctacaagctatagctaatgtgctgagcttgtgccttggtgattgattgattgattgactgattgttttaactgattactgtagatcaacctgatgatttgtttgtttgaaattggcaggaaaaatgcagctttcaaatcattggggggagaaaaaggatgtctttcaggattattttaattaatttttttcataattgagacagaactgtttgttatgtaccataatgctaaataaaactgtggcacttttcaccataatttaatttagtggaaaaagaagacaatgctttccatattgtgataaggtaacatggggtttttctgggccagcctttagaacactgttagggtacatacgctaccttgatgaaagggaccttcgtgcaactgtagtcatcttaaaggcttctcatccactgtgcttcttaatgtgtaattaaagtgaggagaaattaaatactctgagggcgttttatataataaattcgtgaagaaatgtgtgctcttcagttctcaagttttattattatggtatttattaaagttctacaattgtaata

SEQ ID NO: 2150 - DNA, 5391 bp, Homo sapiens
cgcggccgcgagatccgtgtgtctcccaagatggtggcgctgggctcggggtgactacaggagacgacggggccttttcccttcgccaggacccgacacaccaggcttcgctcgctcgcgcacccctccgccgcgtagccatccgccagcgcgggcgcccgccatccgccgcctacttacgcttcacctctgccgacccggcgcgctcggctgcgggcggcggcgcctccttcggctcctcctcggaatagctcgcggcctgtagcccctggcaggagggcccctcagccccccggtgtggacaggcagcggcggctggcgacgaacgccgggatttcggcggccccggcgctccctttcccggcctcgttttccggataaggaagcgcgggtcccgcatgagccccggcggtggcggcagcgaaagagaacgaggcggtggcgggcggaggcggcgggcgagggcgactacgaccagtgaggcggccgccgcagcccaggcgcgggggcgacgacaggttaaaaatctgtaagagcctgattttagaattcaccagctcctcagaagtttggcgaaatatgagttattaagcctacgctcagatcaaggtagcagctagactggtgtgacaacctgtttttaatcagtgactcaaagctgtgatcaccctgatgtcaccgaatggccacagcttgtaaaagagagttacagtggaggtaaaaggagtggcttgcaggatggagaagctgcaccagtgttattggaactcttctgtctgggagatacaagtttggaagcaatcttggggtacttacccacaaggctggtggagaccagatcaggagaacctcagtctgacgacattgaagctagccgaatgaagcgagcagctgcaaagcatctaatagaacgctactaccaccagttaactgagggctrtggaaatgaagcctgcacgaatgagttttgtgcttcctgtccaacttttcttcgtatggataataatgcagcagctattaaagccctcgagctttataagattaatgcaaaactctgtgatcctcatccctccaagaaaggagcaagctcagcttaccttgagaactcgaaaggtgcccccaacaactcctgctctgagataaaaatgaacaagaaaggcgctagaattgattttaaagatgtgacttacytaacagaagagaaggtatatgaaattcttgaattatgtagagaaagagaggattattcccctttaatccgtgttattggaagagttttttctagtgctgaggcwttggtacagagcttccggaaagttaaacaacacaccaaggaagaactgaaatctcttcaagcaaaagatgaagacaaagatkaagatgaaaaggaaaaagctgcatgttctgctgctgctatggaagaagactcagaagcatcttcctcaaggataggtgatagctcacagggagacaacaatttgcaaaaattaggccctgatgatgtgtctgtggatattgatgccattagaagggtctacaccagattgctctctaatgaaaaaattgaaaytgcctttctcaatgcacttgtatatttgtcacctaacgtggaatgtgacttgacgtatcacaatgtatactctcgagatcctaattatctgaatttgttcattatmgkaatggagaayagaaatctccacagtcctgaatatctggaaatggctttgccattattttgcaaagcgatgagcaagctaccccttgcagcccaaggaaaactgatcagactgtrgtctaaatacaatgcagaccagattcggagaatgatggagacatttcagcaacttattacttataaagtcataagcaatgaatttaacagtcgaaatctagtgaatgatgatgatgccattgttgctgcttcgaagtgcttgaaaatggtttactatgcaaatgtagtgggaggggaagtggacacaaatcacaatgaagaagatgatgaagagcccatccctgagtccagcgagctgacacttcaggaacttttgggagaagaaagaagaaacaagaaaggtcctcgagtggaccccctggaaactgaacttggtgttaaaaccctggattgtygaaaaccacttatcccttttgaagagtttattaatgaaccactgaatgaggttctagaaatggataaagattatacttttttcaaagtagaaacagagaacaaattctcttttatgacatgtccctttatattgaatgctgtcacaaagaatttgggattatattatgacaatagaattcgcatgtacagtgaacgaagaatcactgttctctacagcttagttcaaggacagcagttgaatccatatttgagactcaaagttagacgtgaccatatcatagatgatgcacttgtccggctagagatgatcgctatggaaaatcctgcagacttgaagaagcagttgtakgtggaatttgaaggagaacaaggagttgatgagggaggtgtttccaaagaattttttcagctggttgtggaggaaatcttcaatccagatattggtatgttcacatacgatgartctacaaaattgttttggtttaatccatcttcttttgaaactgagggtcagtttactctgattggcatagtactgggtctggctatttacaataactgtatactggatgtacattttcccatggttgtctacaggaagctaatggggaaaaaaggaacttttcgtgacttgggagactctcacccagttctatatcagagtttaaaagatttattggagtatgaagggaatgtggaagatgacatgatgatcactttccagatatcacagacagatctttttggtaacccaatgatgtatgatctaaaggaaaatggtgataaaattccaattacaaatgaaaacaggaaggaatttgtcaatctttattctgactacattctcaataaatcagtagaaaaacagttcaaggcttttcggagaggttttcatatggtgaccaatgaatctcccttaaagtacttattcagaccagaagaaattgaattgcttatatgtggaagccggaatctagatttccaagcactagaagaaactacagaatatgacggtggctataccagggactctgttctgattagggagttctgggaaatcgttcattcatttacagatgaacagaaaagactcttcttgcagtttacaacgggcacagacagagcacctgtgggaggactaggaaaaytaaagatgattatagccaaaaatggcccagacacagaaaggttacctacatctcatacttgctttaatgtgcttttacttccggaatactcaagcaaagaaaaacttaaagagagattgttgaaggccatcacgtatgccaaaggatttggcatgctgtaaaacaaaacaaaacaaaataaaacaaaaaaaaggaaggaaaaaaaaagaaaaaatttaaaaaattttaaaaatataacgagggataaatttttggtggtgatagtgtcccagtacaaaaaggctgtaagatagtcaaccacagtagtcacctatgtctgtgcctcccttctttattggggacatgtgggctggaacagcagatttcagctacatatatgaacaaatcctttattattattataattatttttttgcgtgaaagtgttacatattctttcacttgtatgtacagagaggtttttctgaatatttattttaagggttaaatcacttttgcttgtgtttattactgcttgaggttgagccttttgagtatttaaaaaatatataccaacagaactactctcccaaggaaaatattgccaccatttgtagaccacgtaaccttcaagtatgtgctacttttttgtccctgtatctaactcaaatcaggaactgtattttttttaatgatttgcttttgaaacttgaagtcttgaaaacagtgtgatgcaattactgctgttctagcccccaaagagttttctgtgcaaaatcttgagaatcaatcaataaagaaagatggaaggaagggagaaattggaatgttttaactgcagccctcagaactttagtaacagcacaacaaattaaaaacaaaaacaactcatgccacagtatgtcgtcttcatgtgtcttgcaatgaactgtttcagtagccaatcctctttcttagtatatgaaaggacagggatttttgttcttgttgttctcgttgttgttttaagtttactggggaaagtgcatttggccaaatgaaatggtagtcaagcctattgcaacaaagttaggaagtttgttgtttgtttattataaacaaaaagcatgtgaaagtgcacttaagatagagtttttattaattacttacttattacctagattttaaatagacaatccaaagtctccccttcgtgttgccatcatcttgttgaatcagccattttatcgaggcacgtgatcagtgttgcaacataatgaaaaagatggctactgtgccttgtgttacttaatcatacagtaagctgacctggaaatgaatgaaactattactcctaagaattacattgtatagccccacagattaaatttaattaattaattcaaaacatgttaaacgttactttcatgtactatggaaaagtacaagtargtttacattactgatttccagaagtaagtagtttcccctttcctagtcttctgtgtatgtgatgttgttaatttcttttattgcattataaaataaaaggattatgtatttttaactaaggtgagacattgatatatccttttgctacaagctatagctaatgtgctgagcttgtgccttggtgattgattgattgattgactgattgttttaactgattactgtagatcaacctgatgatttgtttgtttgaaattggcaggaaaaatgcagctttcaaatcattggggggagaaaaaggatgtctttcaggattattttaattaatttttttcataattgagacagaactgtttgttatgtaccataatgctaaataaaactgtggcacttttcaccataatttaatttagtggaaaaagaagacaatgctttccatattgtgataaggtaacatggggtttttctgggccagcctttagaacactgttagggtacatacgctaccttgatgaaagggaccttcgtgcaactgtagtcatcttaaaggcttctcatccactgtgcttcttaatgtgtaattaaagtgaggagaaattaaatactctgagggcgttttatataataaattcgtgaagaaatgtgtgctcttcagttctcaagttttattattatggtatttattaaagttctacaattgtaata

SEQ ID NO: 2151 - DNA, 2851 bp, Homo sapiens
ccctgactgggaagacatgaccttacacaccttggttctttaacttgaccttgggaagacagggccagccagcaaggtggctggggagaaggccgaggtccccgggccgcagacgggaattgagggtcaggagccgaagtgraactggagccggcgccasgagatgcagccctgaagggcacctccacccagtggccctcccccaccccactcccggggccctcctggcccagcgtcaccctgctgcgctaggacctacaagggcggcctctgggagccctctgctttacctcctctcctgggtcaggctgcagaaagaacaagctcctccaccctgcctgctttcaaatctgtacctgttgatgagagaacctccaggtttgtcccctactaccaatgatgaggcaaacacagagagaggaacccctttgactaaagctgaattgtaaaggactaaagccctaacttctcttcgaatgacctgcattcaaatcaagagcggttgaattctctgttttgctgtgggtgccagcctctatcagcccctgccctggtccatctgtcagcttcagagccgtggagcgagagatgccggccctgggctgggccgtggctgccatcctgatgctgcagayggccatggcggagccctccccggggactctgcccaggaaggcaggggtgttttcagacctaagcaaccaagagctgaaggcagtgcacagcttcctctggtccaagaaggagctgaggctgcagccctccagtaccaccaccatggccaagaacaccgtgtttctcatcgagatgctgctgcccaagaagtaccatgtgctgaggtttctggataaaggtgaaaggcatcctgtgcgggaagcccgtgccgtcatcttctttggtgaccaggagcatcccaatgtcaccgagtttgctgtggggcccctgccagggccctgctacatgcgagcactgtcccccaggcctgggtaccagtcctcctgggcatcgaggcccatctccacagcagagtatgccctcctctaccacaccctgcaggaagccaccaagcccctgcatcagttcttcctcaataccacaggcttctcattccaagactgccatgacagatgcctggccttcaccgatgtggccccccggggtgtggcttctggccagcgccgcagttggcttatcatacagcgctatgtagaaggctactttctgcaccccactgggctggagctcctcgtggatcatgggagcacagatgctgggcactgggccgtggagcaggtgtggtacaacgggaagttctatgggagcccagaggaactggctcggaagtatgcagatggagaggtggacgtggtggtcctggaggacccgctgcctgggggcaaggggcatgacagcacagaggagccgcccctcttctcctcccacaagccccgcggggacttccccagccccatccatgtgagyggcccccgcttggtccagccccacggccctcgcttcaggctggagggcaacgctgtgctctacggcgrctggagctttgccttccggctgcgctcctcctycgggctgcaggtcctgaacgtgcacttcggyggagagcgcattgcctatgaggtcagcgtgcaagaggcagtggcgctgtatggaggacacacacctgcaggcatgcagaccaagtacctcgatgtcggctggggcctgggcagcgtcactcatgagttagcccccggcatcgactgcccggagaccgccaccttcctggacactttccactactatgatgccgatgacccggtccattatccccgagccctctgcctctttgaaatgcccacaggggtgccccttcggcggcactttaattccaactttaaaggtggcttcaacttctatgcrgggctgaagggccaggtgctggtgctgcggacaacttcaactgtctacaattatgattacatttgggactttatcttctaccccaacggggtgatggaggccaagatgcatgccactggctacgtccacgccaccttctacacccccgaggggctgcgccacggcactcgcctgcacacccacctgattggcaacatacacactcacttggtgcactaccgcgtagacctggatgtggcaggcaccaagaacagcttccagacactgcagatgaagctagaaaacatcaccaacccctggagcccragacaccgcgtggtccagccaactctggagcagacgcagtactcctgggagcgccaggcggccttccgcttcaaaaggaagctgccyaagtacctgctctttaccagcccccaggagaacccctggggccacaagcgcagctaccgcctgcagatccactccatggccgaccaggtgctgcccccaggctggcaggaggagcaggccatcacctgggcaagktaccccctggcagtgaccaagtaccgggagtcrgagctgtgcagcagcagcatctaccaccagaacgacccctggsacccgcccgtggtctttgagcagtttcttcacaacaacgagmacattgaaaatgaggacctggtggcctgggtgacggtgggcttcctgcacatcccccactcagaggacccctccctggcatccagagacactgtgatcgtgtggcctcgggacaacggccccaactacgtccagcgctggatccctgaggacagggactgctcgatgcctcccccttttagctacaatgggacctatagacctgtgtgaccagcccccagttcctcccccagttcctcccaggaagcccaggagcctcactggggcagacaataaacyctcagagcct

SEQ ID NO: 2152 - DNA, 2426 bp, Homo sapiens
acttcaagaaggagtcagagatcagcttaagggcaaaggctggaagcagagcgaactgggagcagagcacacagagccgtggagcgagagatgccggccctgggctgggccgtggctgccatcctgatgctgcagayggccatggcggagccctccccggggactctgcccaggaaggcaggggtgttttcagacctaagcaaccaagagctgaaggcagtgcacagcttcctctggtccaagaaggagctgaggctgcagccctccagtaccaccaccatggccaagaacaccgtgtttctcatcgagatgctgctgcccaagaagtaccatgtgctgaggtttctggataaaggtgaaaggcatcctgtgcgggaagcccgtgccgtcatcttctttggtgaccaggagcatcccaatgtcaccgagtttgctgtggggcccctgccagggccctgctacatgcgagcactgtcccccaggcctgggtaccagtcctcctgggcatcgaggcccatctccacagcagagtatgccctcctctaccacaccctgcaggaagccaccaagcccctgcatcagttcttcctcaataccacaggcttctcattccaagactgccatgacagatgcctggccttcaccgatgtggccccccggggtgtggcttctggccagcgccgcagttggcttatcatacagcgctatgtagaaggctactttctgcaccccactgggctggagctcctcgtggatcatgggagcacagatgctgggcactgggccgtggagcaggtgtggtacaacgggaagttctatgggagcccagaggaactggctcggaagtatgcagatggagaggtggacgtggtggtcctggaggacccgctgcctgggggcaaggggcatgacagcacagaggagccgcccctcttctcctcccacaagccccgcggggacttccccagccccatccatgtgagyggcccccgcttggtccagccccacggccctcgcttcaggctggagggcaacgctgtgctctacggcgrctggagctttgccttccggctgcgctcctcctycgggctgcaggtcctgaacgtgcacttcggyggagagcgcattgcctatgaggtcagcgtgcaagaggcagtggcgctgtatggaggacacacacctgcaggcatgcagaccaagtacctcgatgtcggctggggcctgggcagcgtcactcatgagttagcccccggcatcgactgcccggagaccgccaccttcctggacactttccactactatgatgccgatgacccggtccattatccccgagccctctgcctctttgaaatgcccacaggggtgccccttcggcggcactttaattccaactttaaaggtggcttcaacttctatgcrgggctgaagggccaggtgctggtgctgcggacaacttcaactgtctacaattatgattacatttgggactttatcttctaccccaacggggtgatggaggccaagatgcatgccactggctacgtccacgccaccttctacacccccgaggggctgcgccacggcactcgcctgcacacccacctgattggcaacatacacactcacttggtgcactaccgcgtagacctggatgtggcaggcaccaagaacagcttccagacactgcagatgaagctagaaaacatcaccaacccctggagcccragacaccgcgtggtccagccaactctggagcagacgcagtactcctgggagcgccaggcggccttccgcttcaaaaggaagctgccyaagtacctgctctttaccagcccccaggagaacccctggggccacaagcgcagctaccgcctgcagatccactccatggccgaccaggtgctgcccccaggctggcaggaggagcaggccatcacctgggcaagktaccccctggcagtgaccaagtaccgggagtcrgagctgtgcagcagcagcatctaccaccagaacgacccctggsacccgcccgtggtctttgagcagtttcttcacaacaacgagmacattgaaaatgaggacctggtggcctgggtgacggtgggcttcctgcacatcccccactcagaggacattcccaacacagccacacctgggaactccgtgggcttcctgctccggccattcaacttcttcccagaggacccctccctggcatccagagacactgtgatcgtgtggcctcgggacaacggccccaactacgtccagcgctggatccctgaggacagggactgctcgatgcctcccccttttagctacaatgggacctatagacctgtgtgaccagcccccagttcctcccccagttcctcccaggaagcccaggagcctcactggggcagacaataaacyctcagagcctc

SEQ ID NO: 2153 - DNA, 2353 bp, Homo sapiens
acttcaagaaggagtcagagatcagcttaagggcaaaggctggaagcagagcgaactgggagcagagcacacagagccgtggagcgagagatgccggccctgggctgggccgtggctgccatcctgatgctgcagayggccatggcggagccctccccggggactctgcccaggaaggcaggggtgttttcagacctaagcaaccaagagctgaaggcagtgcacagcttcctctggtccaagaaggagctgaggctgcagccctccagtaccaccaccatggccaagaacaccgtgtttctcatcgagatgctgctgcccaagaagtaccatgtgctgaggtttctggataaaggtgaaaggcatcctgtgcgggaagcccgtgccgtcatcttctttggtgaccaggagcatcccaatgtcaccgagtttgctgtggggcccctgccagggccctgctacatgcgagcactgtcccccaggcctgggtaccagtcctcctgggcatcgaggcccatctccacagcagagtatgccctcctctaccacaccctgcaggaagccaccaagcccctgcatcagttcttcctcaataccacaggcttctcattccaagactgccatgacagatgcctggccttcaccgatgtggccccccggggtgtggcttctggccagcgccgcagttggcttatcatacagcgctatgtagaaggctactttctgcaccccactgggctggagctcctcgtggatcatgggagcacagatgctgggcactgggccgtggagcaggtgtggtacaacgggaagttctatgggagcccagaggaactggctcggaagtatgcagatggagaggtggacgtggtggtcctggaggacccgctgcctgggggcaaggggcatgacagcacagaggagccgcccctcttctcctcccacaagccccgcggggacttccccagccccatccatgtgagyggcccccgcttggtccagccccacggccctcgcttcaggctggagggcaacgctgtgctctacggcgrctggagctttgccttccggctgcgctcctcctycgggctgcaggtcctgaacgtgcacttcggyggagagcgcattgcctatgaggtcagcgtgcaagaggcagtggcgctgtatggaggacacacacctgcaggcatgcagaccaagtacctcgatgtcggctggggcctgggcagcgtcactcatgagttagcccccggcatcgactgcccggagaccgccaccttcctggacactttccactactatgatgccgatgacccggtccattatccccgagccctctgcctctttgaaatgcccacaggggtgccccttcggcggcactttaattccaactttaaaggtggcttcaacttctatgcrgggctgaagggccaggtgctggtgctgcggacaacttcaactgtctacaattatgattacatttgggactttatcttctaccccaacggggtgatggaggccaagatgcatgccactggctacgtccacgccaccttctacacccccgaggggctgcgccacggcactcgcctgcacacccacctgattggcaacatacacactcacttggtgcactaccgcgtagacctggatgtggcaggcaccaagaacagcttccagacactgcagatgaagctagaaaacatcaccaacccctggagcccragacaccgcgtggtccagccaactctggagcagacgcagtactcctgggagcgccaggcggccttccgcttcaaaaggaagctgccyaagtacctgctctttaccagcccccaggagaacccctggggccacaagcgcagctaccgcctgcagatccactccatggccgaccaggtgctgcccccaggctggcaggaggagcaggccatcacctgggcaagktaccccctggcagtgaccaagtaccgggagtcrgagctgtgcagcagcagcatctaccaccagaacgacccctggsacccgcccgtggtctttgagcagtttcttcacaacaacgagmacattgaaaatgaggacctggtggcctgggtgacggtgggcttcctgcacatcccccactcagaggacccctccctggcatccagagacactgtgatcgtgtggcctcgggacaacggccccaactacgtccagcgctggatccctgaggacagggactgctcgatgcctcccccttttagctacaatgggacctatagacctgtgtgaccagcccccagttcctcccccagttcctcccaggaagcccaggagcctcactggggcagacaataaacyctcagagcct

SEQ ID NO: 2154 - DNA, 2981 bp, Homo sapiens
ccctgactgggaagacatgaccttacacaccttggttctttaacttgaccttgggaagacagggccagccagcaaggtggctggggagaaggccgaggtccccgggccgcagacgggaattgagggtcaggagccgaagtgraactggagccggcgccasgagatgcagccctgaagggcacctccacccagtggccctcccccaccccactcccggggccctcctggcccagcgtcaccctgctgcgctaggacctacaagggcggcctctgggagccctctgctttacctcctctcctgggtcaggctgcagaaagaacaagctcctccaccctgcctgctttcaaatctgtacctgttgatgagagaacctccaggtttgtcccctactaccaatgatgaggcaaacacagagagaggaacccctttgactaaagctgaattgtaaaggactaaagccctaacttctcttcgaatgacctgcattcaaatcaagagcggttgaattctctgttttgctgtgggtgccagcctctatcagcccctgccctggtccatctgtcagcttcagagccgtggagcgagagatgccggccctgggctgggccgtggctgccatcctgatgctgcagayggccatggcggagccctccccggggactctgcccaggaaggcaggggtgttttcagacctaagcaaccaagagctgaaggcagtgcacagcttcctctggtccaagaaggagctgaggctgcagccctccagtaccaccaccatggccaagaacaccgtgtttctcatcgagatgctgctgcccaagaagtaccatgtgctgaggtttctggataaaggtgaaaggcatcctgtgcgggaagcccgtgccgtcatcttctttggtgaccaggagcatcccaatgtcaccgagtttgctgtggggcccctgccagggccctgctacatgcgagcactgtcccccaggcctgggtaccagtcctcctgggcatcgaggcccatctccacagcagagtatgccctcctctaccacaccctgcaggaagccaccaagcccctgcatcagttcttcctcaataccacaggcttctcattccaagactgccatgacagatgcctggccttcaccgatgtggccccccggggtgtggcttctggccagcgccgcagttggcttatcatacagcgctatgtagaaggctactttctgcaccccactgggctggagctcctcgtggatcatgggagcacagatgctgggcactgggccgtggagcaggtgtggtacaacgggaagttctatgggagcccagaggaactggctcggaagtatgcagatggagaggtggacgtggtggtcctggaggacccgctgcctgggggcaaggggcatgacagcacagaggagccgcccctcttctcctcccacaagccccgcggggacttccccagccccatccatgtgagyggcccccgcttggtccagccccacggccctcgcttcaggctggagggcaacgctgtgctctacggcgrctggagctttgccttccggctgcgctcctcctycgggctgcaggtcctgaacgtgcacttcggyggagagcgcattgcctatgaggtcagcgtgcaagaggcagtggcgctgtatggaggacacacacctgcaggcatgcagaccaagtacctcgatgtcggctggggcctgggcagcgtcactcatgagttagcccccggcatcgactgcccggagaccgccaccttcctggacactttccactactatgatgccgatgacccggtccattatccccgagccctctgcctctttgaaatgcccacaggggtgccccttcggcggcactttaattccaactttaaaggtggcttcaacttctatgcrgggctgaagggccaggtgctggtgctgcggacaacttcaactgtctacaattatgattacatttgggactttatcttctaccccaacggggtgatggaggccaagatgcatgccactggctacgtccacgccaccttctacacccccgaggggctgcgccacggcactcgcctgcacacccacctgattggcaacatacacactcacttggtgcactaccgcgtagacctggatgtggcaggcaccaagaacagcttccagacactgcagatgaagctagaaaacatcaccaacccctggagcccragacaccgcgtggtccagccaactctggagcagacgcagtactcctgggagcgccaggcggccttccgcttcaaaaggaagctgccyaagtacctgctctttaccagcccccaggagaacccctggggccacaagcgcagctaccgcctgcagatccactccatggccgaccaggtgctgcccccaggctggcaggaggagcaggccatcacctgggcaaggactgaggggggccagcccagggccctgagccaagctgcttcgcctrtgcctggcagktaccccctggcagtgaccaagtaccgggagtcrgagctgtgcagcagcagcatctaccaccagaacgacccctggsacccgcccgtggtctttgagcagtttcttcacaacaacgagmacattgaaaatgaggacctggtggcctgggtgacggtgggcttcctgcacatcccccactcagaggacattcccaacacagccacacctgggaactccgtgggcttcctgctccggccattcaacttcttcccagaggacccctccctggcatccagagacactgtgatcgtgtggcctcgggacaacggccccaactacgtccagcgctggatccctgaggacagggactgctcgatgcctcccccttttagctacaatgggacctatagacctgtgtgaccagcccccagttcctcccccagttcctcccaggaagcccaggagcctcactggggcagacaataaacyctcagagcctc

SEQ ID NO: 2155 - DNA, 414 bp, Homo sapiens
acttcaagaaggagtcagagatcagcttaagggcaaaggctggaagcagagcgaactgggagcagagcacacagagccgtggagcgagagatgccggccctgggctgggccgtggctgccatcctgatgctgcagayggccatggcggagccctccccggggactctgcccaggaaggcaggggtgttttcagacctggcatccagagacactgtgatcgtgtggcctcgggacaacggccccaactacgtccagcgctggatccctgaggacagggactgctcgatgcctcccccttttagctacaatgggacctatagacctgtgtgaccagcccccagttcctcccccagttcctcccaggaagcccaggagcctcactggggcagacaataaacyctcagagcctcgctc

SEQ ID NO: 2156 - DNA, 2924 bp, Homo sapiens
ccctgactgggaagacatgaccttacacaccttggttctttaacttgaccttgggaagacagggccagccagcaaggtggctggggagaaggccgaggtccccgggccgcagacgggaattgagggtcaggagccgaagtgraactggagccggcgccasgagatgcagccctgaagggcacctccacccagtggccctcccccaccccactcccggggccctcctggcccagcgtcaccctgctgcgctaggacctacaagggcggcctctgggagccctctgctttacctcctctcctgggtcaggctgcagaaagaacaagctcctccaccctgcctgctttcaaatctgtacctgttgatgagagaacctccaggtttgtcccctactaccaatgatgaggcaaacacagagagaggaacccctttgactaaagctgaattgtaaaggactaaagccctaacttctcttcgaatgacctgcattcaaatcaagagcggttgaattctctgttttgctgtgggtgccagcctctatcagcccctgccctggtccatctgtcagcttcagagccgtggagcgagagatgccggccctgggctgggccgtggctgccatcctgatgctgcagayggccatggcggagccctccccggggactctgcccaggaaggcaggggtgttttcagacctaagcaaccaagagctgaaggcagtgcacagcttcctctggtccaagaaggagctgaggctgcagccctccagtaccaccaccatggccaagaacaccgtgtttctcatcgagatgctgctgcccaagaagtaccatgtgctgaggtttctggataaaggtgaaaggcatcctgtgcgggaagcccgtgccgtcatcttctttggtgaccaggagcatcccaatgtcaccgagtttgctgtggggcccctgccagggccctgctacatgcgagcactgtcccccaggcctgggtaccagtcctcctgggcatcgaggcccatctccacagcagagtatgccctcctctaccacaccctgcaggaagccaccaagcccctgcatcagttcttcctcaataccacaggcttctcattccaagactgccatgacagatgcctggccttcaccgatgtggccccccggggtgtggcttctggccagcgccgcagttggcttatcatacagcgctatgtagaaggctactttctgcaccccactgggctggagctcctcgtggatcatgggagcacagatgctgggcactgggccgtggagcaggtgtggtacaacgggaagttctatgggagcccagaggaactggctcggaagtatgcagatggagaggtggacgtggtggtcctggaggacccgctgcctgggggcaaggggcatgacagcacagaggagccgcccctcttctcctcccacaagccccgcggggacttccccagccccatccatgtgagyggcccccgcttggtccagccccacggccctcgcttcaggctggagggcaacgctgtgctctacggcgrctggagctttgccttccggctgcgctcctcctycgggctgcaggtcctgaacgtgcacttcggyggagagcgcattgcctatgaggtcagcgtgcaagaggcagtggcgctgtatggaggacacacacctgcaggcatgcagaccaagtacctcgatgtcggctggggcctgggcagcgtcactcatgagttagcccccggcatcgactgcccggagaccgccaccttcctggacactttccactactatgatgccgatgacccggtccattatccccgagccctctgcctctttgaaatgcccacaggggtgccccttcggcggcactttaattccaactttaaaggtggcttcaacttctatgcrgggctgaagggccaggtgctggtgctgcggacaacttcaactgtctacaattatgattacatttgggactttatcttctaccccaacggggtgatggaggccaagatgcatgccactggctacgtccacgccaccttctacacccccgaggggctgcgccacggcactcgcctgcacacccacctgattggcaacatacacactcacttggtgcactaccgcgtagacctggatgtggcaggcaccaagaacagcttccagacactgcagatgaagctagaaaacatcaccaacccctggagcccragacaccgcgtggtccagccaactctggagcagacgcagtactcctgggagcgccaggcggccttccgcttcaaaaggaagctgccyaagtacctgctctttaccagcccccaggagaacccctggggccacaagcgcagctaccgcctgcagatccactccatggccgaccaggtgctgcccccaggctggcaggaggagcaggccatcacctgggcaagktaccccctggcagtgaccaagtaccgggagtcrgagctgtgcagcagcagcatctaccaccagaacgacccctggsacccgcccgtggtctttgagcagtttcttcacaacaacgagmacattgaaaatgaggacctggtggcctgggtgacggtgggcttcctgcacatcccccactcagaggacattcccaacacagccacacctgggaactccgtgggcttcctgctccggccattcaacttcttcccagaggacccctccctggcatccagagacactgtgatcgtgtggcctcgggacaacggccccaactacgtccagcgctggatccctgaggacagggactgctcgatgcctcccccttttagctacaatgggacctatagacctgtgtgaccagcccccagttcctcccccagttcctcccaggaagcccaggagcctcactggggcagacaataaacyctcagagcctc

SEQ ID NO: 2157 - DNA, 4099 bp, Homo sapiens
cagagtggacgcacagtaacatgggcaacttgaagagcgtggcccaggagcctgggccaccctgcggcctggggctggggctgggccttgggctgtgcggcaagcagggcccagccaccccggcccctgagcccagccgggccccagcatccctactcccaccagcgccagaacacagccccccgagctccccgctaacccagcccccagaggggcccaagttccctcgtgtgaagaactgggaggtggggagcatcacctatgacaccctcagcgcccaggcgcagcaggatgggccctgcaccccaagacgctgcctgggctccctggtatttccacggaaactacagggccggccctcccccggccccccggcccctgagcagctgctgagtcaggcccgggacttcatcaaccagtactacagctccattaagaggagcggctcccaggcccacgaacagcggcttcaagaggtggaagccgaggtggcagccacaggcacctaccagcttagggagagcgagctggtgttcggggctaagcaggcctggcgcaacgctccccgctgcgtgggccggatccagtgggggaagctgcaggtgttcgatgcccgggactgcaggtctgcacaggaaatgttcacctacatctgcaaccacatcaagtatgccaccaaccggggcaaccttcgctcggccatcacagtgttcccgcagcgctgccctggccgaggagacttccgaatctggaacagccagctggtgcgctacgcgggctaccggcagcaggayggctctgtgcggggggacccagccaacgtggagatcaccgagctctgcattcagcacggctggaccccaggaaayggtcgcttcgacgtgctgcccctgctgctgcaggccccagatgakcccccagaactcttccttctgccccccgagctggtccttgaggtgcccctggagcaccccacgctggagtggtttgcagccctgggcctgcgctggtacgccctcccggcagtgtccaacatgctgctggaaattgggggcctggagttccccgcagcccccttcagtggctggtacatgagcactgagatcggcacgaggaacctgtgtgaccctcaccgctacaacatcctggaggatgtggctgtctgcatggacctggatacccggaccacctcgtccctgtggaaagacaaggcagcagtggaaatcaacgtggccgtgctgcacagttaccagctagccaaagtcaccatcgtggaccaccacgccgccacggcctctttcatgaagcacctggagaatgagcagaaggccagggggggctgccctgcagactgggcctggatcgtgccccccatctcgggcagcctcactcctgttttccatcaggagatggtcaactatttcctgtccccggccttccgctaccagccagacccctggaaggggagtgccgccaagggcaccggcatcaccaggaagaagacctttaaagaagtggccaacgccgtgaagatctccgcctckctcatgggcacggtgatggcgaagcgagtgaaggcgacaatcctgtatggctccgagaccggccgggcccagagctacgcacagcagctggggagactcttccggaaggcttttgatccccgggtcctgtgtatggatgagtatgacgtggtgtccctcgaacacgagacgctggtgctggtggtaaccagcacatttgggaatggggatcccccggagaatggagagagctttgcagctgccctgatggagatgtccggcccctacaacagctcccctcggccggaacagcacaagagttataagatccgcttcaacagcatctcctgctcagacccactggtgtcctcttggcggcggaagaggaaggagtccagtaacacagacagtgcaggggccctgggcaccctcaggttctgtgtgttcgggctcggctcccgggcatacccccacttctgcgcctttgctcgtgcsgtggacacacggctggaggaactgggcggggagcggctgctgcagctgggccagggcgacgagctgtgcggccaggaggaggccttccgaggctgggcccaggctgccttccaggccgcctgtgagaccttctgtgtgggagaggatgccaaggccgccgcccgagacatcttcagccccaaacggagctggaagcgccagaggtaccggctgagcgcccaggccgagggcctgcagttgctgccaggtctgatccacgtgcacaggcggaagatgttccaggctacaatccgctcagtggaaaacctgcaaagcagcaagtccacgagggccaccatcctggtgcgcctggacaccggaggccaggaggggctgcagtaccagccgggggaccacataggtgtctgcccgcccaaccggcccggccttgtggaggcgctgctgagccgcgtggaggacccgccggcgcccactgagcccgtggcagtagagcagctggagaagggcagccctggtggccctccccccggctgggtgcgggacccccggctgcccccgtgcacgctgcgccaggctctcaccttcttcctggacatcacctccccacccagccctcagctcttgcggctgctcagcaccttggcagaagagcccakggaacagcaggagctggaggccctcagccaggatccccgacgctacgaggagtggaagtggttccgctgccccacgctgctggaggtgctggagcagttcccgtcggtggcgctgcctgccccactgctcctcacccagctgcctctgctccagccccggtactactcagtcagctyggcacccagcacccacccaggagagatccacctcactgtagctgtgctggcatacaggactcaggatgggctgggccccctgcactatggagtctgctccacgtggctaagccagctcaagcccggagaccctgtgccctgcttcatccggggggctccctccttccggctgccacccgatcccagcttgccctgcatyctggtgggtccaggcactggcattgcccccttccggggattctggcaggagcggctgcatgacattgagagcaaagggctgcagcccactcccatgactttggtgttcggctgccgatgctcccaacttgaccatctctaccgcgacgargtgcagaacgcccagcagcgcggggtgtttggccgagtcctcaccgccttctcccgggaacctgacaaccccaagacctacgtgcaggacatcctgaggacggagctggctgcggaggtgcaccgcgtgctgtgcctcgagcggggccacatgtttgtctgcggcgatgtyaccatggcaaccaacgtcctgcagaccgtgcagcgcatcctggcgacggagggcgacatggagctggacgaggccggcgacgtcatcggcgtgctgcgggatcagcaacgctaccacgaagacattttcgggctcacgctgcgcacccaggaggtgacaagccgcatacgcacccagagcttttccttgcaggagcgtcagttgcggggcgcagtgccctgggcgttcgaccctcccggctcagacaccaacagcccctgagagccrcctggctttcccttccagttccgggagagcggctgcccgactcaggtccgcccgaccaggatcagccccgctcctcccctcttgaggtggtgccttctcacatctgtccagaggctgcaaggattcagcattattcctccaggaaggagcaaaacgcctcttttccctctctaggcctgttgcctcgggcctgggtccgccttaatctggaaggcccctcccagcagcggtaccccagggcctactgccacccgcttcctgtttcttagtcgaatgttagattcctcttgcctctctcaggagtatcttacctgtaaagtctaatctctaaatcaagtatttattattgaagatttaccataagggactgtgccagatgttaggagaactactaaagtgcctaccccagctcatgtggattacagttttttttttttgtttttttttttttgaaacggagt

SEQ ID NO: 2158 - DNA, 1928 bp, Homo sapiens
gacgccatcccggccagaaaagccctggccagtggcgggcgcgacactatccgtgcggccaggcggagacccggaggaccgaagcttccggacgacgaggaaccgcccaacatggcctcggagagtgggaagctttggggtggccggtttgtgggtgcagtggaccccatcatggagaagttcaacgcgtccattgcctacgaccggcacctttgggaggtggatgttcaaggcagcaaagcctacagcaggggcctggagaaggcagggctcctcaccaaggccgagatggaccagatactccatggcctagacaaggtggctgaggagtgggcccagggcaccttcaaactgaactccaatgatgaggacatccacacagccaatgagcgcygcctgaaggagctcaytggtgcaacggcagggaagctgcacacgggayggagcyggaatgacyaggtggtcacagacctcaggctgtggatgcggcagacctgctccaygctctcgggcctcctctgggagctcattaggaccatggtggatcgggcagaggcggaacgtgatgttcycttcccggggtacacccatttgcagagggcccagcccatccgctggagccactggattctgagccacgccrtggcactgacccragactctgagcggctgctggaggtgcggaagcggatcaatgtcctgcccctggggagtggggccattgcaggcaatcccctgggtgtggaccgagagctgctccgagcagaactcaactttggggccatcactctcaacagcatggatgccactagtgagcgggactttgtggccgagttcctgttctggssttcgctgtgcatgacccatctcagcaggatggccgaggacctcatcctctactgcaccaaggaattcagcttcgtgcagctctcagatgcctacagcacgggaagcagcctgatgccccagaagaaaaaccccgacagtttggagctgatccggagcaaggctgggcgtgtgtttgggcggtgtgccrggctcctgatgaccctcaagggacttcccagcacctacaacaaagacttacaggaggacaaggaagctgtgtttgaagtgtcagacactatgagtgccgtgctccaggtggccactggcgtcatctctacgctgcagattcaccaagagaacatgggacaggctctcagccccgacatgctggccactgaccttgcctattacctggtcygcaaagggatgccattcygccaggcccacgaggcctccgggaaagctgtgttcatggmcgagaccaagggggtcgccctcaaccagctgtcactgcaggagctgcagaccatcagccccctgttctcgggcgacgtgatctgcgtgtgggactacgggcacagtgtggagcagtatggtgccctgggcggcactgygcgctccagcgtcgactggcagatccgcyaggtgcgggcgctactgcaggcacagcaggcctaggtcctcccacacctgccccctaataaagtgggcgcgagaggaggctgctgtgtgtttcctgccccagcctggctccctcgttgctgggctttcggggctggccagtggggacagtcagggactggagaggcagggcagggtggcctgtaatcccagcactttggaagggcaaggtgcgaggatgcttgaggccaggagtttgacacagcctgggcaacacagggagacccccatctctactcaataataaaacaaatagcctggygtsgtggcccatgcatatagtyccagctacttgtaaggctgaggtgagaggacacttrtgcccaggagtggaggctgcagtgagctatgatcacgccactgcattccagcctggataacagagtgagaacctatctctaaaaataaataaataaacg

SEQ ID NO: 2159 - DNA, 1764 bp, Homo sapiens
agacccggaggaccgaagcttccggacgacgaggaaccgcccaacatggccagagtgggaagctttggggtggccggtttgtgggtgcagtggaccccatcatggagaagttcaacgcgtccattgcctacgaccggcacctttgggaggtggatgttcaaggcagcaaagcctacagcaggggcctggagaaggcagggctcctcaccaaggccgagatggaccagatactccatggcctagacaaggtggctgaggagtgggcccagggcaccttcaaactgaactccaatgatgaggacatccacacagccaatgagcgcygcctgaaggagctcaytggtgcaacggcagggaagctgcacacgggayggagcyggaatgacyaggtggtcacagacctcaggctgtggatgcggcagacctgctccaygctctcgggcctcctctgggagctcattaggaccatggtggatcgggcagaggcggaacgtgatgttcycttcccggggtacacccatttgcagagggcccagcccatccgctggagccactggattctgagccacgccrtggcactgacccragactctgagcggctgctggaggtgcggaagcggatcaatgtcctgcccctggggagtggggccattgcaggcaatcccctgggtgtggaccgagagctgctccgagcagaactcaactttggggccatcactctcaacagcatggatgccactagtgagcgggactttgtggccgagttcctgttctggssttcgctgtgcatgacccatctcagcaggatggccgaggacctcatcctctactgcaccaaggaattcagcttcgtgcagctctcagatgcctacagcacgggaagcagcctgatgccccagaagaaaaaccccgacagtttggagctgatccggagcaaggctgggcgtgtgtttgggcggtgtgccrggctcctgatgaccctcaagggacttcccagcacctacaacaaagacttacagagaacatgggacaggctctcagccccgacatgctggccactgaccttgcctattacctggtcygcaaagggatgccattcygccaggcccacgaggcctccgggaaagctgtgttcatggmcgagaccaagggggtcgccctcaaccagctgtcactgcaggagctgcagaccatcagccccctgttctcgggcgacgtgatctgcgtgtgggactacgggcacagtgtggagcagtatggtgccctgggcggcactgygcgctccagcgtcgactggcagatccgcyaggtgcgggcgctactgcaggcacagcaggcctaggtcctcccacacctgccccctaataaagtgggcgcgagaggaggctgctgtgtgtttcctgccccagcctggctccctcgttgctgggctttcggggctggccagtggggacagtcagggactggagaggcagggcagggtggcctgtaatcccagcactttggaagggcaaggtgcgaggatgcttgaggccaggagtttgacacagcctgggcaacacagggagacccccatctctactcaataataaaacaaatagcctggygtsgtggcccatgcatatagtyccagctacttgtaaggctgaggtgagaggacacttrtgcccaggagtggaggctgcagtgagctatgatcacgccactgcattccagcctggataacagagtgagaacctatctctaaaaataaataaataaacg

SEQ ID NO: 2160 - DNA, 2069 bp, Homo sapiens
cgacactatccgtgcggccaggcggaggtgagtgcgcggcggccggatgggcgggacgggcgtggaggacgccgagcaccgtggcgcgcgctcacgtccgcgtccccaagggctgcgctccctcaagcgcagtgcccagaactcggagccagcccggcccgggggaccctgctggccaaggaggtcgtcagtccggtcttgtcttccagacccggaggaccgaagcttccggacgacgaggaaccgcccaacatggcctcggagagtgggaagctttggggtggccggtttgtgggtgcagtggaccccatcatggagaagttcaacgcgtccattgcctacgaccggcacctttgggaggtggatgttcaaggcagcaaagcctacagcaggggcctggagaaggcagggctcctcaccaaggccgagatggaccagatactccatggcctagacaaggtggctgaggagtgggcccagggcaccttcaaactgaactccaatgatgaggacatccacacagccaatgagcgcygcctgaaggagctcaytggtgcaacggcagggaagctgcacacgggayggagcyggaatgacyaggtggtcacagacctcaggctgtggatgcggcagacctgctccaygctctcgggcctcctctgggagctcattaggaccatggtggatcgggcagaggcggaacgtgatgttcycttcccggggtacacccatttgcagagggcccagcccatccgctggagccactggattctgagccacgccrtggcactgacccragactctgagcggctgctggaggtgcggaagcggatcaatgtcctgcccctggggagtggggccattgcaggcaatcccctgggtgtggaccgagagctgctccgagcagaactcaactttggggccatcactctcaacagcatggatgccactagtgagcgggactttgtggccgagttcctgttctggssttcgctgtgcatgacccatctcagcaggatggccgaggacctcatcctctactgcaccaaggaattcagcttcgtgcagctctcagatgcctacagcacgggaagcagcctgatgccccagaagaaaaaccccgacagtttggagctgatccggagcaaggctgggcgtgtgtttgggcggtgtgccrggctcctgatgaccctcaagggacttcccagcacctacaacaaagacttacaggaggacaaggaagctgtgtttgaagtgtcagacactatgagtgccgtgctccaggtggccactggcgtcatctctacgctgcagattcaccaagagaacatgggacaggctctcagccccgacatgctggccactgaccttgcctattacctggtcygcaaagggatgccattcygccaggcccacgaggcctccgggaaagctgtgttcatggmcgagaccaagggggtcgccctcaaccagctgtcactgcaggagctgcagaccatcagccccctgttctcgggcgacgtgatctgcgtgtgggactacgggcacagtgtggagcagtatggtgccctgggcggcactgygcgctccagcgtcgactggcagatccgcyaggtgcgggcgctactgcaggcacagcaggcctaggtcctcccacacctgccccctaataaagtgggcgcgagaggaggctgctgtgtgtttcctgccccagcctggctccctcgttgctgggctttcggggctggccagtggggacagtcagggactggagaggcagggcagggtggcctgtaatcccagcactttggaagggcaaggtgcgaggatgcttgaggccaggagtttgacacagcctgggcaacacagggagacccccatctctactcaataataaaacaaatagcctggygtsgtggcccatgcatatagtyccagctacttgtaaggctgaggtgagaggacacttrtgcccaggagtggaggctgcagtgagctatgatcacgccactgcattccagcctggataacagagtgagaacctatctctaaaaataaataaataaacg

SEQ ID NO: 2161 - DNA, 672 bp, Homo sapiens
ggtcaaaatggctggcaagcaggccatttcagcatcaggcaagtggctggatggtattcgaaaatggtattacaatactgyaggattcaataaactggggtwaatgagagatgatacaatatatgaggatgaagacataaaagaagccataagaaggcttcctgagaaccttyataatgacaggatgtgtcacattaagagtgcattggacctgaccatgaagcatcagatcttgcctaaagagcagtggaccaaatatgaagaggaaaatttctaccttgaactgtatgtgcaagaggttattcgggaaagaaaagaaagagaagaatgggcaaagaagtaatcatgtagttgaagtctgtggatgcagctgttatgaagatggttaaacttgaaacaaacaattttaagaattatttggtctgcagatgttttactttaaataaatgtctattgtaatggctggagttattccaaaccttatactgaataactactgaatccatttactgttaaatttttttccaaattttcaagatgtttttagtagtgtttaactacttcctggagctcagaggccactttatcagttttcctcactggttggatagcccatcagtttatgtaaggatgtaacttccatgagttatagccttatggaagctactaaat

SEQ ID NO: 2162 - DNA, 2245 bp, Homo sapiens
gaggtgggagggagcgacaatggaaaaatcacctgaaaactgggacagaggaaggaagctacagttacgaaggagagctgsaaaagttgcagcagaaaggttgggagtcccgacaggttccgtagcccacagaaaagaagcaagggacggcaggactgtttcacacttttctgcttctggaaggtgctggacaaaaacatggaactaatttccccaacagtgattataatcctgggttgccttgctstgttcttactccttcagcsgaagaatttgcgtagacccccgtgcatcaagggctggattccttggattggagttggatttgagtttgggaaagcccctctagaatttatagagaaagcaagaatcaagtatggaccaatatttacagtctttgctatgggaaaccgaatgacctttgttactgaagaagaaggaattaatgtgtttctaaaatccaaaaaagtagattttgaactagcagtgcaaaatatcgtttatcrtacagcatcaattccaaagaatgtctttttagcactgcatgaaaaactctatattatgttgaaagggaaaatggggactgtcaatctccatcagtttactgggcaactgactgaagaattacatgaacaactggagaatttaggcactcatgggacaatggacctgaacaacttagtaagacatctcctttatccagtcacagtgaatatgctctttaataaaagtttgttttccacaaacaagaaaaaaatcaaggagttccatcagtattttcaagtttatgatgaagatkttgagtatgggtcccagttgccagagtgtcttctaagsaactggtcaaaatccaaaaagtggttcctggaactgtttgagaaaaacattccagatataaaagcatgtaaatctgcaaaagataattccatgacattattgcaagctacgctggatattgtagagacggaaacaagtaaggaaaactcacccaattatgggctcttactgctttgggcttctctgtctaatgctgttcctgttgcattttggacacttgcatacgtcctttctcatcctgatatccacaaggccattatggaaggcatatcttctgtgtttggcaaagcaggcaaagataagattaaagtgtctgaggatgacctggagaawctccttctaattmaatggtgtgttttggaaaccattcgtttaaaagctcctggtgtcattactagaaaagtggtgaagcctgtggaaattttgaattacatcattccttctggtgacttgttgatgttgtctccattttggctgcatagaaatccaaagtattttcctgagcctgaattgttcaaacctgaacgttggaaaaaggcaaatttagagaagcactctttcttggactgcttcatggcatttggaagcgggaagttccagtgtyctgcaaggtggtttgctctgttagaggttcagatgtgtattattttaatactttataaatatgactgtagtcttctggacccattacccaaacagagttatctccatttggtgggtgtcccccagccggaagggcaatgccgaattgaatataaacaaagaatatgacatctgttgggcctcacaakgaccagggccttctggaggagtggcactaccccacctggcagcacctagacctgagctctacaaaaacacactgcttcactttgttttaggacttagttcaagaacacattcaaatggtgcatgtgtttggtatcttcaacagtagaccaagaatctaacatcactctcagtaatatagagaccggaatacatggtttataggaaatgatcaaatgatccaaaaaaactccacattttttaagaagttggaatttgatttcatgcrtaactgtattaaaacattaaatagaaataatgtcatttgaatgaaaatcttatcacattaaattcactgtgaaggcagcatacttaaatttttattttgaaaagtctaaaaggcttagatttttaaaatttaataattatttctacaaattttctatttttcttgaggtgattctcaactagcaattggaactcctaggctctattaacataattctttattgtaaacgtatctaatgctaaaagtaataaaatggtagttttctgagacctgtgaggacaggaatggtgtcttacattcatttctacactttattatgctcaggattgcaccttctttacagagtatatt

SEQ ID NO: 2163 - DNA, 3380 bp, Homo sapiens
cgcgattctcagggattgatcgcctcttcaggtaagttatcttccggccccgtaccactgtgccacaggcgcagcccgcttcctcaggtgccctatcccgcgcaagaagaccacggcttcacagagtgttatttaaggggcgtggccagcggaacatcccgccccattctgtgacgcacggggtggcgcgcgtgggacccgaggggtggggctgggtttagtaggagacctggggcaaggccccctgtggacgaccatctgccagcttctctcgttccgtcgattgggaggagcggtggcgacctcggccttcagtgtttccgacggagtgaatggcggcggcggctgggatgctgctgctgggcttgctgcaggcgggtgggtcggygctgggccaggcgatggagaaggtgacaggcggcaacctcttgtccatgctgctgatcgcctgcgccttcaccctcagcctggtctacctgatccgtctggccgccggccacctggtccagctgcccgcaggggtgaaaagtcctccatacattttctccccaattccattccttgggcatgccatagcatttgggaaaagtccaattgaatttctagaaaatgcatatgagaagtatggacctgtatttagttttaccatggtaggcaagacatttacttaccttctggggagtgatgctgctgcactgctttttaatagtaaaaatgaagacctgaatgcagaagatgtctacagtcgcctgacaacacctgtgtttgggaagggagttgcatacgatgtgcctaatccagttttcttggagcagaagaaaatgttaaaaagtggccttaacatagcccactttaaacagcatgtttctataattgaaaaagaaacaaaggaatactttgagagttggggagaaagtggagaaaaaaatgtgtttgaagctctttctgagctcataattttaacagctagccattgtttgcatggaaaggaaatcagaagtcaactcaatgaaaaggtagcacagctgtatgcagatttggatggaggtttcagccatgcagcctggctcttaccaggttggctgcctttgcctagtttcagacgcagggacagagctcatcgggaaatcaaggatattttctataaggcaatccagaaacgcagacagtctcaagaaaaaattgatgacattctccaaactttactagatgctacatayaaggatgggcgtcctttgactgatgatgaagtagcagggatgcttattggattactcttggcagggcagcatacatcctcaactactagtgcttggatgggcttctttttggccagagacaaaacacttcaaaaaaaatgttatttagaacagaaaacagtctgtggagagaatctgcctcctttaacttatgaccagctcaaggatctaaatttacttgatcgctgtataaaagaaacattaagacttagacctcctataatgatcatgatgagaatggccagaactcctcagactgtggcagggtataccattcctccaggacatcaggtgtgtgtttctcccactgtcaatcaaagacttaaagactcatgggtagaacgcctggactttaatcctgatcgctacttacaggataacycagcatcaggggaaaagtttgcctatgtgccatttggagctgggcgtcatcgttgtattggggaaaattttgcctatgttcaaattaagacaatttggtccactatgcttcgtttatatgaatttgatctcattgatggatactttcccactgtgaattatacaactatgattcacacccctgaaaacccagttatccgttacaaacgaagatcaaaatgaaaaaggttgcaaggaacgaatatatgtgattatcactgtaagccacaaaggcattcgaagagaatgaagtgtacaaaacaactcttgtagtttactgtttttttaagtgtgtaattctaaaagccagtttatgatttaggattttgttaactgaatggttctatcaaatataatagcatttgaaacattttctaatagttatgatacttatacatgtgctttcaggaagttccttggtgaaacaattgttsaggggggatctaggtaattggcagattctaaataatataatttccagatagtaattttaagagtactcatcgctcttgccaaataagttcagggtattcaaatcttggactagtcctgcaaggtayaaagaataaaaatcccagtgagatacttggaaaccacagtttattattatttatctgggcaattattgtgtgtgtgaggatggaagggtagggaataatcgaacatctaaagccttgaataagagaatactaattgttttggtatgatgatactcagaaatggagatattataggaaaaagaaatcctttggaattttaactaaaatcactgcatatgggaaattaagagatccaggaccatatttgataagakttcctaaaaataatgtaattattaatgctaaagactgctcatgtatcttgatctaattactaaataattacatatttatttacctgataaatatgtatctagttctacaaggtcacatttatgtggaagtccaaagtcaagtccttaggggataattttgytttggctcagttgttccctgcttcctttttttttttttttttttgagatggagtctcgctctgttgcccaggctggagtgcagtggtgcgatctcagctcactgcatcctctgcctcccgggttcaagcaattctctgcctcagcctcccaagtagttgggattacaggcacctgccaccatgcctggctaattttttgtatttttagtagagacrggggtttcactatgttggctaggctggtcttgaactcctgacctcgtgatccacccgccttggcctcccaaagtgctgggattacaggcatgagccaccgcacctggccttccctgcttcctctctagaatccaattagggatgtttgttactactcatattgattaaaacagttaacaaacttttttctttttaaaatgtgagatcagtgaactctggttttaagataatctgaaacaaggtccttgggagtaataaaattggtcacattctgtaaagcacattctgtttaggaatcaacttatctcaaattgtaactcggggcctaactatatgagatggctgaaaaaataccacatcgtctgttttcactaggtgatgccaaaatattttgctttatgtatattacagttctttttaaaacactggaagactcatgttaaactctaattgtgaaggcagaatctctgctaatttttcagattaaaattctctttgaaaaaatacagt

SEQ ID NO: 2164 - DNA, 3181 bp, Homo sapiens
cgcgattctcagggattgatcgcctcttcaggtaagttatcttccggccccgtaccactgtgccacaggcgcagcccgcttcctcaggtgccctatcccgcgcaagaagaccacggcttcacagagtgttatttaaggggcgtggccagcggaacatcccgccccattctgtgacgcacggggtggcgcgcgtgggacccgaggggtggggctgggtttagtaggagacctggggcaaggccccctgtggacgaccatctgccagcttctctcgttccgtcgattgggaggagcggtggcgacctcggccttcagtgtttccgacggagtgaatggcggcggcggctgggatgctgctgctgggcttgctgcaggcgggtgggtcggygctgggccaggcgatggagaaggtgacaggcggcaacctcttgtccatgctgctgatcgcctgcgccttcaccctcagcctggtctacctgatccgtctggccgccggccacctggtccagctgcccgcaggggtgaaaagtcctccatacattttctccccaattccattccttgggcatgccatagcatttgggaaaagtccaattgaatttctagaaaatgcatatgagaagtatggacctgtatttagttttaccatggtaggcaagacatttacttaccttctggggagtgatgctgctgcactgctttttaatagtaaaaatgaagacctgaatgcagaagatgtctacagtcgcctgacaacacctgtgtttgggaagggagttgcatacgatgtgcctaatccagttttcttggagcagaagaaaatgttaaaaagtggccttaacatagcccactttaaacagcatgtttctataattgaaaaagaaacaaaggaatactttgagagttggggagaaagtggagaaaaaaatgtgtttgaagctctttctgagctcataattttaacagctagccattgtttgcatggaaaggaaatcagaagtcaactcaatgaaaaggtagcacagctgtatgcagatttggatggaggtttcagccatgcagcctggctcttaccaggttggctgcctttgcctagtttcagacgcagggacagagctcatcgggaaatcaaggatattttctataaggcaatccagaaacgcagacagtctcaagaaaaaattgatgacattctccaaactttactagatgctacatayaaggatgggcgtcctttgactgatgatgaagtagcagggatgcttattggattactcttggcagggcagcatacatcctcaactactagtgcttggatgggcttctttttggccagagacaaaacacttcaaaaaaaatgttatttagaacagaaaacagtctgtggagagaatctgcctcctttaacttatgaccagctcaaggatctaaatttacttgatcgctgtataaaagaaacattaagacttagacctcctataatgatcatgatgagaatggccagaactcctcagactgtggcagggtataccattcctccaggacatcaggtgtgtgtttctcccactgtcaatcaaagacttaaagactcatgggtagaacgcctggactttaatcctgatcgctacttacaggataacycagcatcaggggaaaagtttgcctatgtgccatttggagctgggcgtcatcgttgtattggggaaaattttgcctatgttcaaattaagacaatttggtccactatgcttcgtttatatgaatttgatctcattgatggatactttcccactgtgaattatacaactatgattcacacccctgaaaacccagttatccgttacaaacgaagatcaaaatgaaaaaggttgcaaggaacgaatatatgtgattatcactgtaagccacaaaggcattcgaagagaatgaagtgtacaaaacaactcttgtagtttactgtttttttaagtgtgtaattctaaaagccagtttatgatttaggattttgttaactgaatggttctatcaaatataatagcatttgaaacattttctaatagttatgatacttatacatgtgctttcaggaagttccttggtgaaacaattgttsaggggggcagatagtaattttaagagtactcatcgctcttgccaaataagttcagggtattcaaatcttggactagtcctgcaaggtayaaagaataaaaatcccagtgagatacttggaaaccacagtttattattatttatctgggcaattattgtgtgtgtgaggatggaagggtagggaataatcgaacatctaaagccttgaataagagaatactaattgttttggtatgatgatactcagaaatggagatattataggaaaaagaaatcctttggaattttaactaaaatcactgcatatgggaaattaagagatccaggaccatatttgataagakttcctaaaaataatgtaattattaatgctaaagactgctcatgtatcttgatctaattactaaataattacatatttatttacctgataaatatgtatctagttctacaaggtcacatttatgtggaagtccaaagtcaagtccttaggggataattttgytttggctcagttgttccctgcttcctttttttttttttttttttgtagtagagacrggggtttcactatgttggctaggctggtcttgaactcctgacctcgtgatccacccgccttggcctcccaaagtgctgggattacaggcatgagccaccgcacctggccttccctgcttcctctctagaatccaattagggatgtttgttactactcatattgattaaaacagttaacaaacttttttctttttaaaatgtgagatcagtgaactctggttttaagataatctgaaacaaggtccttgggagtaataaaattggtcacattctgtaaagcacattctgtttaggaatcaacttatctcaaattgtaactcggggcctaactatatgagatggctgaaaaaataccacatcgtctgttttcactaggtgatgccaaaatattttgctttatgtatattacagttctttttaaaacactggaagactcatgttaaactctaattgtgaaggcagaatctctgctaatttttcagattaaaattctctttgaaaaaataca

SEQ ID NO: 2165 - DNA, 4808 bp, Homo sapiens
cactttgagagagacacgacacggagctgcgccctccatggrtggcttggggggattctgcgagccggagctgtccccctactctcctcagggactcgttggttcgcgccagcgccttttaagggcaccgtggggcgaaccgagcgctsagagctgctccggccgcggccctgggagytggaggaaccgcgactcagcaggcatgactggagagggaagtcccaatggtgctagaatggtgctgcagtggcagaagacggctcacaagtgaggtctggaagaacaacagggaagacatccatcatttgctccaaagtgtgcaagtcaaatcctggggagaatcatgataaccctgatcactgagcagctacagaagcagactctggatgagctgaaatgcacacgcttcagcatcagtctgcctttgcctgatcatgcagacatctccaactgtgggaactctttccagcttgtgtctgaaggtgcttcctggaggggcctgccccactgttcctgtgctgagttccaggacagcctcmacttcagctaccatccctcaggcctgagcctgcacctcagaccacccaktcggggaaactcccccaaggagcagcccttctcccaagtcctaagacctgagcccccagatccagagaagcttcctgtgccccctgcccctccatccaagaggcactgccgctcactctcagtgcccgtggacctgtctcgctggcagccggtgtggcggcccgccccctccaagctgtggactcccataaagcaccggggcagtggtggagggggtgggccgcaggtgcctcaccagagccccccaaagcgggtctccagcctcaggttcctccaagctcccagtgcctcttctcaatgtgccccagctcacagaccctacagccctcctttcttcagcctggccctggcccaagattcctctcgaccctgcgccgcctcccctcaaagtggctcctgggagagtgatgctgagtccttgtcaccttgcccacctcagcgccgcttctccctgtcacccagtctgggcccgcaggcaagcckcttcttgccctctgcccggagctctcccgcatcctccccagagctgccctggcgacctcgaggtctccgcaaccttccccgaagccgctcacagccttgtgatctggatgcccgcaaaactggggtcaagcggcgccacgaggaagacccccggcgtctgcggccttcgttggactttgacaagatgaatcagaaaccatactcaggaggtctttgtctccaagaaacagcccgggaaggcagcagcatctctccaccatggttcatggcctgtagccccccacccctctctgcttcctgcagccccactgggggttcctcccaggtgctgagtgaaagcgaagaggaggaggagggggctgtgcggtggggtcggcaggcgctgagcaagcggacactgtgccagcgggactttggggacctggacttgaatttgattgaggaaaactaaaactgagaggctacttcctggggccacacagactgactctctcatggctactaacaagtgtcgagkccccaaggctgggggccgagcctgggaatgggggtgagtggagggctccgactcarggcagctggaaatcttctcgctccagcaagctcgaccatgccaagagactggccgggacaagataaacggagctggtggcgggagggacagccccagagcagacccttcctatggcggccctgagtgtgagtatccctgccaccaagagagcaatgggcagggaaggaaggggtctgccgaccccagctcggggaatttcactagcccctttgcttcaaagggcacttgtgtcttagaatttggccagggtggggggttgagtcagcctcctcagagaaactgcgtgagagtgtgtgcgtgcatgggagtgtacttgtggaaaggtgtgtttgcgtagccttagggaaggaaggcaattgctccttaacagcagagtatcatgatacccccaggatcttgagttttttacaggatgttgggtttgctcaaggagtcaagaggagggcaccaagttttccttttttctaaatagctctggaaccaggcttgtaatccatagcatcaccgactctgcaaaggatttcattttggggyacagcagggtgttttaagtgctgtgacttcagctaatgatcttttcttcagccccaccccctccccactagctcgatctagtatattggggaatgcaggtggggggtgtcaccatattttttctgagctggcctttttttctcatcagattgtccaggctatattccacctgcctcttttgccctcttgagtagagttgcacacagcacatgggcaactgaagcagggttgaggggctctatctctctctctcctctgctgatgggacccttttcccctcaccctctgcccttctaagtcatagactaggtaggaaggccctatattggtccccagcatctactgaggcagacctgcaacagaagtggcattcagtccccagcagacatgggtgagctcaccccagcactgctgttgggaaggtgactgcaggaaaccaattcttacaagatccaggcccagcctttttgacctgcttgagagggaagaaggggtgtttagcatttaatagtttgcttgtcttccactcctgccaggaagtgtttatttgcctctaattgggcctgagagaccatagggaggttggggctcactgagggattggctgaggatgtataaagcaaaggctgtgagaagcagttgggagtttggttgtcattggattgaatttacttttttgtttctcacccgcaacttgagccaggacagctggtccaagtggccacagtgatgggtttaagtaccttggtagggctggcaccagtggaaacacatactgaagctgccaccacaatagcttgtgaggttttatccagctktggttagaccctgcatgaccaaatttgacctgcccttgtttatggcaagaagggcatttttctcttcaatttccagggtttcctaggacccagttcctcatgtaagggaggaagaccaaggtctttgtgttttcttcctcatggaattgaacctgacattttctggatctcctgcatgtcaggagcatcagtgaggcttcagcctcctygtctccactccagagaggaggtggctatgtcttcttaagcctctggccctcagaggctcctccctatctcctggctagttaccactaggctaccaggtctctaggggcctgagagaggccctctagagaatccagggaaactgtgagcccaggagttgcccatctatggtttcattcctcccctggctcttctccctcttcaggccataatttccctggtgccaatttcttttcctcctggggcatcctcatcccagggctctctgctgtagattggctgtgccagcttccaacaggttactggcaatgccagtgagtttctgtaggccctragctgaagaagtgaggcagtgattctgcctccatcctggtttccccaaagccccagggcaccatccttargggagaaggtctacagttatcattattttaattccattactttcagtctggaaaactaagctagtcagaactgtcatcttgcttcccaatctaagaacctgtggccctggaacacttttcaagaattggttcattttgctttacacagtagatctgttccaacagttctgtgtaaaccaaatgctatttttcaatgcatttggactgctgaccatttaaaagcagcctatgattgcttctttttgtaaagcaagcaacctccctccactttagctgttttgactatttgaattttcacatattgggcttacccagagtggagcacacctccagggcatgtggctgacactgggtcaatgtctgcatctgtgctgtgtgtgtagtgtggttggccagtaggtgagtatccctgtgtgtgtgagtgaagccactccccaggctggtgctctcctcctgtgcccagtgactgcccagtggcagctcagctgcccttcactcccacctgctgccaaagtccctgtgctaatgggattacaaatacaaaaagtggaaaaaaattttcgtaaactttgttttatattaaaagaaaaatccataagtctgtgtgtgttaaacatgaggttctgcctctgtggctgtgtttgaaaaaataaagttttattagaataatccattttcccaagcaaccttgtgtactacagtgtcttcttcccttccccacaaagacaaggaagaagcagggtagaaggccacctaactgttccagccccttcatctaagatgtgggtcaacctttcaaaaaggggcagtatttggaccctaggccctttgccggccatggcaggatgttatactgtggcccaggcttctgctaaggccttggttatttttggcagtctggtttggtctctctttccctggcagttatacttgtctcctcctgcctgctgtcactctmacttccagcaagttgaagtcaagtatgaatgcattccagctccctgagaaatggtttatggtacagtcaggaacttgtctagattggtttgtaggctttgggaagtagggagaaggcagggtgggagacagccagggatctttcttaagttttcacatgttacatcctggagagatagaggtttagtcatcagaattcagattccatagacctaggcaatttttccatcctaaaaatactgc

SEQ ID NO: 2166 - DNA, 6487 bp, Homo sapiens
  misc_feature (1)...(6487): n = A,T,C or G
cgaaattgaaccggagccatcttgggcccggcgcgcagacccgcggagtttcccgtgccgacgccccggggccacttccagtgcggagtagcggaggcgtgggggcctcgaggggctggcgcggcccagcggtcgggccagggtcgtgccgccggcgggtcgggccgggcaatgcctcgcgggcgcaatgaatccgcggcaggggtattccctcagcggatactacacccatccatttcaaggctatgagcacagacagctcagrtaccagcagcctgggccaggatcttcccccagtagtttcctgcttaagcaaatagaatttctcaaggggcagctcccagaagcaccggtgattggaaagcagacaccgtcactrccaccttccctcccaggactccggccaaggtttccagtactacttgcctccagtaccagaggcaggcaagtggacatcaggggtgtccccaggggcgtgcatctcrgaagtcaggggctccagagagggttccagcatccttcaccacgtggcaggagtctgccacagagaggtgttgattgcctttcctcacatttccaggaactgagtatctaccaagatcaggaacaaaggatcttaaagttcctggaagagcttggggaagggaaggccaccacagcacatgatctgtctgggaaacttgggactccgaagaaagaaatcaatcgagttttatactccctggcaaagaagggcaagctacagaaagaggcaggaacaccccctttgtggaaaatcgcggtctccactcaggcttggaaccagcacagcggagtggtaagaccagacggtcatagccaaggagccccaaactcagacccgagtttggaaccggaagacagaaactccacatctgtctcagaagatcttcttgagccttttattgcagtctcagctcaggcttggaaccagcacagcggagtggtaagaccagacagtcatagccaaggatccccaaactcagacccaggtttggaacctgaagacagcaactccacatctgccttggaagatcctcttgagtttttagacatggccgagatcaaggagaaaatctgcgactatctcttcaatgtgtctgactcctctgccctgaatttggctaaaaatattggccttaccaaggcccgagatataaatgctgtgctawttgacatggaaaggcagggggatgtctatagacaagggacaacccctcccatatggcatttgacagacaagaagcgagagaggatgcaaatcaagagaaatacgaacagtgttcctgaaaccgctccagctgcaatccctgagaccanaagaaacgcagagttcctcacctgtaatatacccacatcaaatgcctcaaataacatggtaaccacagaaaaagtggagaatgggcaggaacctgtcataaagttagaaaacaggcaagaggccagaccagaaccagcaagactgaaaccacctgttcattacaatggcccctcaaaagcagggtatgttgactttgaaaatggccagtgggccacagatgacatcccagatgacttgaatagtatccgcgcagcaccaggtgagtttcgagccatcatggagatgccctccttctacagtcatggcttgccacggtgttcaccctacaagaaactgacagagtgccagctgaagaaccccatcagcgggctgttagaatatgcccagttcgctagtcaaacctgtgagttcaacatgatagagcagagtggaccaccccatgaacctcgatttaaattccaggttgtcatcaatggccgagagtttcccccagctgaagctggaagcaagaaagtggccaagcaggatgcagctatgaaagccatgacaattctgctagaggaagccaaagccaaggacagtggaaaatcagaagaatcatcccactrttccacagagaaagaatcagagaagactgcagagtcccagacccccaccccttcagccacatccttcttttstgggaagagccccgtcaccacactgcttgagtgtatgcacaaattggggaactcctgcgaattccgtctcctgtccaaagaaggccctgcccatgaacccaagttccaatactgtgttgcagtgggagcccaaactttccccagtgtgagtgctcccagcaagaaagtggcaaagcagatggccgcagaggaagccatgaaggccctgcatggggaggcgaccaactccatggcttctgataaccaggtcaggaagattggcgagctygtgagatacctgaacaccaaccctgtgggtggccttttggagtacgcccgctcccatggctttgctgctgaattcaagttggtcgaccagtccggacctcctcacgagcccaagttcgtttaccaagcaaaagttgggggtcgctggttcccagccgtctgcgcacacagcaagaagcaaggcaagcaggaagcagcagatgcggctctccgtgtcttgattggggagaacgagaaggcagaacgcatgggtttcacagagctccctctcactggcagcaccttccatgaccagatagccatgctgagccaccggtgcttcaacactctgactaacagcttccagccctccttgctcggccgcaagattctggccgccatcattatgaaaaaagactctgaggacatgggtgtcgtcgtcagcttgggaacagggaatcgctgtgtraaaggagattctctcagcctaaaaggagaaactgtcaatgactgccatgcagaaataatctcccggagaggcttcatcaggtttctctacagtgagttaatgaaatacaactcccagactgcgaaggatagtatatttgaacctgctaagggaggagaaaagctccaaataaaaaagactgtgtcattccatctgtatatcagcactgctccgtgtggagatggcgccctctttgacaagtcctgcagcgaccgtgctatggaaagcacagaatcccgccactaccctgtcttcgagaatcccaaacaaggaaagctccgcaccaaggtggagaacggagaaggcacaatccctgtggaatccagtgacattgtgcctacgtgggatggcattcggctcggggagagactccgtaccatgtcctgtagtgacaaaatcctacgctggaacgtgctgggcctgcaaggggcactgttgacccacttcctgcagcccatttatctcaaatctgtcacattgggttaccttttcagccaagggcatctgacccgtgctatttgctgtcgtgtgacaagagatgggagtgcatttgaggatggactacgacatccctttattgtcaaccaccccaaggttggcagagtcagcatatatgattccaaaaggcaatccgggaagactaaggagacaagcgtcaactggtgtctggctgatggctatgacctggagatcctggacggtaccagaggcactgtggatgggccacggaatgaattgtcccgggtctccaaaaagaacatttttcttctatttaagaagctctgctccttccgttaccgcagggatctactgagactctcctatggtgaggccaagaaagctgcccgtgactacgagacggccaagaactacttcaaaaaaggcctgaaggatatgggctatgggaactggattagcaaaccccaggaggaaaagaacttttatctctgcccagtatagtatgctccagtgacagatggattagggtgtgtcatactagggtgtgagagaggtaggtcgtagcattcctcatcacatggtcaggggatttttttttctcctttttttttytttttaagccataattggtgatactgaaaactttgggttcccatttatcctgctttctttgggattgctaggcaaggtctggccaggccccccttttttcccccaagtgaagaggcagaaacctaagaagttatcttttctttctacccaaagcatacatagtcactgagcacctgcggtccatttcctcttaaaagttttgttttgatttgtttccatttcctttccctttgtgtttgctacactgacctcttgcggtcttgattaggtttcagtcaactctggatcatgtcagggactgataatttcatttgtggattacgcagacccctctacttcccctctttcccttctgagattctttccttgtgatctgaatgtctccttttccccctcagagggcaaagaggtgaacataaaggatttggtgaaacatttgtaagggtaggagttgaaaactgcagttcccagtgccacggaagtgtgattggagcctgcagataatgcycagccatcctcccatcctgcactttagccagctgcagggcgggcaaggcaaggaaagctgcttccctggaagtgtatcactttctccggcagctgggaagtctagaaccagccagactgggttaagggagctgctcaagcaatagcagaggtttcacccggcaggatgacacagaccacttcccagggagcacgggcatgccttggaatattgccaagcttccagctgcctcttctcytaaagcattcctaggaatattttccccgccaatgctgggcgtacaccctagccaacgggacaaatcctagagggtataaaatcatctctgctcagataatcatgacttagcaagaataagggcaaaaaatcctgttggcttaacgtcactgttccaccyggtgtaatatctctcatgacagtgacaccaagggaagttgactaagtcacatgtaaattaggagtgttttaaagaatgccatagatgttgattcttaactgctacagataacctgtaattgagcagatttaaaattcaggcatacttttccatttatccaagtgctttcatttttccagatggcttcagaagtaggctcgtgggcagggcgcagacctgatctttmtagggttgacatagaaagcagtagttgtgggtgaaagggcaggttgtcttcaaactctgtgaggtagaatcctttgtctatacctccatgaacattgactcgtgtgttcagagcctttggcctctctgtggagtctggctctctggctcctgtgcattctttgaatagtcactcgtaaaaactgtcagtgcttgaarctgtttcctttactcatgttgaagggactttgttggcttttagagtgttggtcatgactccaagagcagagcagggaagagcccaagcatagacttggtgccgtggtgawggctgcagtccagttttgtgatgctgcttttacgtgtccctcgataacagtcagctagacacactcaggaggactactgaggctctgcgaccttcaggagctgagcctgcctctctcctttagatgacagaccttcatctgggaacgtgctgagccagcaccctcagatgatttccctccaaactgctgactaggtcatcctctgtctggtagagacattcacatctttgcttttattctrtgctctctgtacttttgaccaaaaattgaccaaagtaagaaaatgcaagttctaaaaatagactaaggatgcctttgcagaacaccaaagcatcccaaggaactggtagggaagtggcgcctgtctcctggagtggaagaggcctgctccctggctctgggtctgctgggggcacagtaaatcagtcttggcacccacatccagggcagagaggtctgtggttctcagcatcagaaggcagcgcagcccctctcctcttcaggctacagggttgtcacctgctgagtcctcaggttgtttggcctctctggtccatcttgggcattaggttctccagcagagctctggccagctgcctcttctttaactgggaacacaggctctcacaagatcagaacccccactcacccccaagatcttatctagcaagcctgtagtattcagtttctgttgtaggaagagagcgaggcatccctgaattccacgcatctgctggaaacgagccgtgtcagatcgcacatccctgcgcccccatgcccccatgcccctytgagtcacacaggacagaggaggcagagcttctgcccactgttatcttcactttctttgtccagtcttttktttttaataagcagtgaccctccctactcttctttttaatgatttttgtagttgatttgtctgaactgtggctactgtgcattccttgaataatcacttgtaaaaattgtcagtgcttgaagctgtttcctttactcacattgaagggacttcgttggttttttggagtyttggttgtgactccaagagcagagtgaggaagacccccaagcrtagactcgggtactgtgatgatggctgcagtccagttttatgattctgcttttatgtgtcccttgataacagtgacttaacaatatacattcctcataaataaaaaaaaaacaagaatctgaattcttag

SEQ ID NO: 2167 - DNA, 6152 bp, Homo sapiens
  misc_feature (1)...(6152): n = A,T,C or G
gcggccgcactggcagcctccgggtgtccggccgtgtcccgaggaagtgcaagacccggggtattccctcagcggatactacacccatccatttcaaggctatgagcacagacagctcagrtaccagcagcctgggccaggatcttcccccagtagtttcctgcttaagcaaatagaatttctcaaggggcagctcccagaagcaccggtgattggaaagcagacaccgtcactrccaccttccctcccaggactccggccaaggtttccagtactacttgcctccagtaccagaggcaggcaagtggacatcaggggtgtccccaggggcgtgcatctcrgaagtcaggggctccagagagggttccagcatccttcaccacgtggcaggagtctgccacagagaggtgttgattgcctttcctcacatttccaggaactgagtatctaccaagatcaggaacaaaggatcttaaagttcctggaagagcttggggaagggaaggccaccacagcacatgatctgtctgggaaacttgggactccgaagaaagaaatcaatcgagttttatactccctggcaaagaagggcaagctacagaaagaggcaggaacaccccctttgtggaaaatcgcggtctccactcaggcttggaaccagcacagcggagtggtaagaccagacggtcatagccaaggagccccaaactcagacccgagtttggaaccggaagacagaaactccacatctgtctcagaagatcttcttgagccttttattgcagtctcagctcaggcttggaaccagcacagcggagtggtaagaccagacagtcatagccaaggatccccaaactcagacccaggtttggaacctgaagacagcaactccacatctgccttggaagatcctcttgagtttttagacatggccgagatcaaggagaaaatctgcgactatctcttcaatgtgtctgactcctctgccctgaatttggctaaaaatattggccttaccaaggcccgagatataaatgctgtgctawttgacatggaaaggcagggggatgtctatagacaagggacaacccctcccatatggcatttgacagacaagaagcgagagaggatgcaaatcaagagaaatacgaacagtgttcctgaaaccgctccagctgcaatccctgagaccanaagaaacgcagagttcctcacctgtaatatacccacatcaaatgcctcaaataacatggtaaccacagaaaaagtggagaatgggcaggaacctgtcataaagttagaaaacaggcaagaggccagaccagaaccagcaagactgaaaccacctgttcattacaatggcccctcaaaagcagggtatgttgactttgaaaatggccagtgggccacagatgacatcccagatgacttgaatagtatccgcgcagcaccaggtgagtttcgagccatcatggagatgccctccttctacagtcatggcttgccacggtgttcaccctacaagaaactgacagagtgccagctgaagaaccccatcagcgggctgttagaatatgcccagttcgctagtcaaacctgtgagttcaacatgatagagcagagtggaccaccccatgaacctcgatttaaattccaggttgtcatcaatggccgagagtttcccccagctgaagctggaagcaagaaagtggccaagcaggatgcagctatgaaagccatgacaattctgctagaggaagccaaagccaaggacagtggaaaatcagaagaatcatcccactrttccacagagaaagaatcagagaagactgcagagtcccagacccccaccccttcagccacatccttcttttstgggaagagccccgtcaccacactgcttgagtgtatgcacaaattggggaactcctgcgaattccgtctcctgtccaaagaaggccctgcccatgaacccaagttccaatactgtgttgcagtgggagcccaaactttccccagtgtgagtgctcccagcaagaaagtggcaaagcagatggccgcagaggaagccatgaaggccctgcatggggaggcgaccaactccatggcttctgataaccaggtcaggaagattggcgagctygtgagatacctgaacaccaaccctgtgggtggccttttggagtacgcccgctcccatggctttgctgctgaattcaagttggtcgaccagtccggacctcctcacgagcccaagttcgtttaccaagcaaaagttgggggtcgctggttcccagccgtctgcgcacacagcaagaagcaaggcaagcaggaagcagcagatgcggctctccgtgtcttgattggggagaacgagaaggcagaacgcatgggtttcacagagctccctctcactggcagcaccttccatgaccagatagccatgctgagccaccggtgcttcaacactctgactaacagcttccagccctccttgctcggccgcaagattctggccgccatcattatgaaaaaagactctgaggacatgggtgtcgtcgtcagcttgggaacagggaatcgctgtgtraaaggagattctctcagcctaaaaggagaaactgtcaatgactgccatgcagaaataatctcccggagaggcttcatcaggtttctctacagtgagttaatgaaatacaactcccagactgcgaaggatagtatatttgaacctgctaagggaggagaaaagctccaaataaaaaagactgtgtcattccatctgtatatcagcactgctccgtgtggagatggcgccctctttgacaagtcctgcagcgaccgtgctatggaaagcacagaatcccgccactaccctgtcttcgagaatcccaaacaaggaaagctccgcaccaaggtggagaacggagaaggcacaatccctgtggaatccagtgacattgtgcctacgtgggatggcattcggctcggggagagactccgtaccatgtcctgtagtgacaaaatcctacgctggaacgtgctgggcctgcaaggggcactgttgacccacttcctgcagcccatttatctcaaatctgtcacattgggttaccttttcagccaagggcatctgacccgtgctatttgctgtcgtgtgacaagagatgggagtgcatttgaggatggactacgacatccctttattgtcaaccaccccaaggttggcagagtcagcatatatgattccaaaaggcaatccgggaagactaaggagacaagcgtcaactggtgtctggctgatggctatgacctggagatcctggacggtaccagaggcactgtggatgggccacggaatgaattgtcccgggtctccaaaaagaacatttttcttctatttaagaagctctgctccttccgttaccgcagggatctactgagactctcctatggtgaggccaagaaagctgcccgtgactacgagacggccaagaactacttcaaaaaaggcctgaaggatatgggctatgggaactggattagcaaaccccaggaggaaaagaacttttatctctgcccagtatagtatgctccagtgacagatggattagggtgtgtcatactagggtgtgagagaggtaggtcgtagcattcctcatcacatggtcaggggatttttttttctcctttttttttytttttaagccataattggtgatactgaaaactttgggttcccatttatcctgctttctttgggattgctaggcaaggtctggccaggccccccttttttcccccaagtgaagaggcagaaacctaagaagttatcttttctttctacccaaagcatacatagtcactgagcacctgcggtccatttcctcttaaaagttttgttttgatttgtttccatttcctttccctttgtgtttgctacactgacctcttgcggtcttgattaggtttcagtcaactctggatcatgtcagggactgataatttcatttgtggattacgcagacccctctacttcccctctttcccttctgagattctttccttgtgatctgaatgtctccttttccccctcagagggcaaagaggtgaacataaaggatttggtgaaacatttgtaagggtaggagttgaaaactgcagttcccagtgccacggaagtgtgattggagcctgcagataatgcycagccatcctcccatcctgcactttagccagctgcagggcgggcaaggcaaggaaagctgcttccctggaagtgtatcactttctccggcagctgggaagtctagaaccagccagactgggttaagggagctgctcaagcaatagcagaggtttcacccggcaggatgacacagaccacttcccagggagcacgggcatgccttggaatattgccaagcttccagctgcctcttctcytaaagcattcctaggaatattttccccgccaatgctgggcgtacaccctagccaacgggacaaatcctagagggtataaaatcatctctgctcagataatcatgacttagcaagaataagggcaaaaaatcctgttggcttaacgtcactgttccaccyggtgtaatatctctcatgacagtgacaccaagggaagttgactaagtcacatgtaaattaggagtgttttaaagaatgccatagatgttgtcttcaaactctgtgaggtagaatcctttgtctatacctccatgaacattgactcgtgtgttcagagcctttggcctctctgtggagtctggctctctggctcctgtgcattctttgaatagtcactcgtaaaaactgtcagtgcttgaarctgtttcctttactcatgttgaagggactttgttggcttttagagtgttggtcatgactccaagagcagagcagggaagagcccaagcatagacttggtgccgtggtgawggctgcagtccagttttgtgatgctgcttttacgtgtccctcgataacagtcagctagacacactcaggaggactactgaggctctgcgaccttcaggagctgagcctgcctctctcctttagatgacagaccttcatctgggaacgtgctgagccagcaccctcagatgatttccctccaaactgctgactaggtcatcctctgtctggtagagacattcacatctttgcttttattctrtgctctctgtacttttgaccaaaaattgaccaaagtaagaaaatgcaagttctaaaaatagactaaggatgcctttgcagaacaccaaagcatcccaaggaactggtagggaagtggcgcctgtctcctggagtggaagaggcctgctccctggctctgggtctgctgggggcacagtaaatcagtcttggcacccacatccagggcagagaggtctgtggttctcagcatcagaaggcagcgcagcccctctcctcttcaggctacagggttgtcacctgctgagtcctcaggttgtttggcctctctggtccatcttgggcattaggttctccagcagagctctggccagctgcctcttctttaactgggaacacaggctctcacaagatcagaacccccactcacccccaagatcttatctagcaagcctgtagtattcagtttctgttgtaggaagagagcgaggcatccctgaattccacgcatctgctggaaacgagccgtgtcagatcgcacatccctgcgcccccatgcccccatgcccctytgagtcacacaggacagaggaggcagagcttctgcccactgttatcttcactttctttgtccagtcttttktttttaataagcagtgaccctccctactcttctttttaatgatttttgtagttgatttgtctgaactgtggctactgtgcattccttgaataatcacttgtaaaaattgtcagtgcttgaagctgtttcctttactcacattgaagggacttcgttggttttttggagtyttggttgtgactccaagagcagagtgaggaagacccccaagcrtagactcgggtactgtgatgatggctgcagtccagttttatgattctgcttttatgtgtcccttgataacagtgacttaacaatatacattcctcataaataaaaaaaaaacaagaatctg

SEQ ID NO: 2168 - DNA, 6343 bp, Homo sapiens
  misc_feature (1)...(6343): n = A,T,C or G
gcggccgcactggcagcctccgggtgtccggccgtgtcccgaggaagtgcaagacccggggtattccctcagcggatactacacccatccatttcaaggctatgagcacagacagctcagrtaccagcagcctgggccaggatcttcccccagtagtttcctgcttaagcaaatagaatttctcaaggggcagctcccagaagcaccggtgattggaaagcagacaccgtcactrccaccttccctcccaggactccggccaaggtttccagtactacttgcctccagtaccagaggcaggcaagtggacatcaggggtgtccccaggggcgtgcatctcrgaagtcaggggctccagagagggttccagcatccttcaccacgtggcaggagtctgccacagagaggtgttgattgcctttcctcacatttccaggaactgagtatctaccaagatcaggaacaaaggatcttaaagttcctggaagagcttggggaagggaaggccaccacagcacatgatctgtctgggaaacttgggactccgaagaaagaaatcaatcgagttttatactccctggcaaagaagggcaagctacagaaagaggcaggaacaccccctttgtggaaaatcgcggtctccactcaggcttggaaccagcacagcggagtggtaagaccagacggtcatagccaaggagccccaaactcagacccgagtttggaaccggaagacagaaactccacatctgtctcagaagatcttcttgagccttttattgcagtctcagctcaggcttggaaccagcacagcggagtggtaagaccagacagtcatagccaaggatccccaaactcagacccaggtttggaacctgaagacagcaactccacatctgccttggaagatcctcttgagtttttagacatggccgagatcaaggagaaaatctgcgactatctcttcaatgtgtctgactcctctgccctgaatttggctaaaaatattggccttaccaaggcccgagatataaatgctgtgctawttgacatggaaaggcagggggatgtctatagacaagggacaacccctcccatatggcatttgacagacaagaagcgagagaggatgcaaatcaagagaaatacgaacagtgttcctgaaaccgctccagctgcaatccctgagaccanaagaaacgcagagttcctcacctgtaatatacccacatcaaatgcctcaaataacatggtaaccacagaaaaagtggagaatgggcaggaacctgtcataaagttagaaaacaggcaagaggccagaccagaaccagcaagactgaaaccacctgttcattacaatggcccctcaaaagcagggtatgttgactttgaaaatggccagtgggccacagatgacatcccagatgacttgaatagtatccgcgcagcaccaggtgagtttcgagccatcatggagatgccctccttctacagtcatggcttgccacggtgttcaccctacaagaaactgacagagtgccagctgaagaaccccatcagcgggctgttagaatatgcccagttcgctagtcaaacctgtgagttcaacatgatagagcagagtggaccaccccatgaacctcgatttaaattccaggttgtcatcaatggccgagagtttcccccagctgaagctggaagcaagaaagtggccaagcaggatgcagctatgaaagccatgacaattctgctagaggaagccaaagccaaggacagtggaaaatcagaagaatcatcccactrttccacagagaaagaatcagagaagactgcagagtcccagacccccaccccttcagccacatccttcttttstgggaagagccccgtcaccacactgcttgagtgtatgcacaaattggggaactcctgcgaattccgtctcctgtccaaagaaggccctgcccatgaacccaagttccaatactgtgttgcagtgggagcccaaactttccccagtgtgagtgctcccagcaagaaagtggcaaagcagatggccgcagaggaagccatgaaggccctgcatggggaggcgaccaactccatggcttctgataaccaggtcaggaagattggcgagctygtgagatacctgaacaccaaccctgtgggtggccttttggagtacgcccgctcccatggctttgctgctgaattcaagttggtcgaccagtccggacctcctcacgagcccaagttcgtttaccaagcaaaagttgggggtcgctggttcccagccgtctgcgcacacagcaagaagcaaggcaagcaggaagcagcagatgcggctctccgtgtcttgattggggagaacgagaaggcagaacgcatgggtttcacagagctccctctcactggcagcaccttccatgaccagatagccatgctgagccaccggtgcttcaacactctgactaacagcttccagccctccttgctcggccgcaagattctggccgccatcattatgaaaaaagactctgaggacatgggtgtcgtcgtcagcttgggaacagggaatcgctgtgtraaaggagattctctcagcctaaaaggagaaactgtcaatgactgccatgcagaaataatctcccggagaggcttcatcaggtttctctacagtgagttaatgaaatacaactcccagactgcgaaggatagtatatttgaacctgctaagggaggagaaaagctccaaataaaaaagactgtgtcattccatctgtatatcagcactgctccgtgtggagatggcgccctctttgacaagtcctgcagcgaccgtgctatggaaagcacagaatcccgccactaccctgtcttcgagaatcccaaacaaggaaagctccgcaccaaggtggagaacggagaaggcacaatccctgtggaatccagtgacattgtgcctacgtgggatggcattcggctcggggagagactccgtaccatgtcctgtagtgacaaaatcctacgctggaacgtgctgggcctgcaaggggcactgttgacccacttcctgcagcccatttatctcaaatctgtcacattgggttaccttttcagccaagggcatctgacccgtgctatttgctgtcgtgtgacaagagatgggagtgcatttgaggatggactacgacatccctttattgtcaaccaccccaaggttggcagagtcagcatatatgattccaaaaggcaatccgggaagactaaggagacaagcgtcaactggtgtctggctgatggctatgacctggagatcctggacggtaccagaggcactgtggatgggccacggaatgaattgtcccgggtctccaaaaagaacatttttcttctatttaagaagctctgctccttccgttaccgcagggatctactgagactctcctatggtgaggccaagaaagctgcccgtgactacgagacggccaagaactacttcaaaaaaggcctgaaggatatgggctatgggaactggattagcaaaccccaggaggaaaagaacttttatctctgcccagtatagtatgctccagtgacagatggattagggtgtgtcatactagggtgtgagagaggtaggtcgtagcattcctcatcacatggtcaggggatttttttttctcctttttttttytttttaagccataattggtgatactgaaaactttgggttcccatttatcctgctttctttgggattgctaggcaaggtctggccaggccccccttttttcccccaagtgaagaggcagaaacctaagaagttatcttttctttctacccaaagcatacatagtcactgagcacctgcggtccatttcctcttaaaagttttgttttgatttgtttccatttcctttccctttgtgtttgctacactgacctcttgcggtcttgattaggtttcagtcaactctggatcatgtcagggactgataatttcatttgtggattacgcagacccctctacttcccctctttcccttctgagattctttccttgtgatctgaatgtctccttttccccctcagagggcaaagaggtgaacataaaggatttggtgaaacatttgtaagggtaggagttgaaaactgcagttcccagtgccacggaagtgtgattggagcctgcagataatgcycagccatcctcccatcctgcactttagccagctgcagggcgggcaaggcaaggaaagctgcttccctggaagtgtatcactttctccggcagctgggaagtctagaaccagccagactgggttaagggagctgctcaagcaatagcagaggtttcacccggcaggatgacacagaccacttcccagggagcacgggcatgccttggaatattgccaagcttccagctgcctcttctcytaaagcattcctaggaatattttccccgccaatgctgggcgtacaccctagccaacgggacaaatcctagagggtataaaatcatctctgctcagataatcatgacttagcaagaataagggcaaaaaatcctgttggcttaacgtcactgttccaccyggtgtaatatctctcatgacagtgacaccaagggaagttgactaagtcacatgtaaattaggagtgttttaaagaatgccatagatgttgattcttaactgctacagataacctgtaattgagcagatttaaaattcaggcatacttttccatttatccaagtgctttcatttttccagatggcttcagaagtaggctcgtgggcagggcgcagacctgatctttmtagggttgacatagaaagcagtagttgtgggtgaaagggcaggttgtcttcaaactctgtgaggtagaatcctttgtctatacctccatgaacattgactcgtgtgttcagagcctttggcctctctgtggagtctggctctctggctcctgtgcattctttgaatagtcactcgtaaaaactgtcagtgcttgaarctgtttcctttactcatgttgaagggactttgttggcttttagagtgttggtcatgactccaagagcagagcagggaagagcccaagcatagacttggtgccgtggtgawggctgcagtccagttttgtgatgctgcttttacgtgtccctcgataacagtcagctagacacactcaggaggactactgaggctctgcgaccttcaggagctgagcctgcctctctcctttagatgacagaccttcatctgggaacgtgctgagccagcaccctcagatgatttccctccaaactgctgactaggtcatcctctgtctggtagagacattcacatctttgcttttattctrtgctctctgtacttttgaccaaaaattgaccaaagtaagaaaatgcaagttctaaaaatagactaaggatgcctttgcagaacaccaaagcatcccaaggaactggtagggaagtggcgcctgtctcctggagtggaagaggcctgctccctggctctgggtctgctgggggcacagtaaatcagtcttggcacccacatccagggcagagaggtctgtggttctcagcatcagaaggcagcgcagcccctctcctcttcaggctacagggttgtcacctgctgagtcctcaggttgtttggcctctctggtccatcttgggcattaggttctccagcagagctctggccagctgcctcttctttaactgggaacacaggctctcacaagatcagaacccccactcacccccaagatcttatctagcaagcctgtagtattcagtttctgttgtaggaagagagcgaggcatccctgaattccacgcatctgctggaaacgagccgtgtcagatcgcacatccctgcgcccccatgcccccatgcccctytgagtcacacaggacagaggaggcagagcttctgcccactgttatcttcactttctttgtccagtcttttktttttaataagcagtgaccctccctactcttctttttaatgatttttgtagttgatttgtctgaactgtggctactgtgcattccttgaataatcacttgtaaaaattgtcagtgcttgaagctgtttcctttactcacattgaagggacttcgttggttttttggagtyttggttgtgactccaagagcagagtgaggaagacccccaagcrtagactcgggtactgtgatgatggctgcagtccagttttatgattctgcttttatgtgtcccttgataacagtgacttaacaatatacattcctcataaataaaaaaaaaacaagaatctgaattcttag

SEQ ID NO: 2169 - DNA, 6622 bp, Homo sapiens
  misc_feature (1)...(6622): n = A,T,C or G
cgaaattgaaccggagccatcttgggcccggcgcgcagacccgcggagtttcccgtgccgacgccccggggccacttccagtgcggagtagcggaggcgtgggggcctcgaggggctggcgcggcccagcggtcgggccagggtcgtgccgccggcgggtcgggccgggcaatgcctcgcgggcgcaatgaatccgcggcaggggtattccctcagcggatactacacccatccatttcaaggctatgagcacagacagctcagrtaccagcagcctgggccaggatcttcccccagtagtttcctgcttaagcaaatagaatttctcaaggggcagctcccagaagcaccggtgattggaaagcagacaccgtcactrccaccttccctcccaggactccggccaaggtttccagtactacttgcctccagtaccagaggcaggcaagtggacatcaggggtgtccccaggggcgtgcatctcrgaagtcaggggctccagagagggttccagcatccttcaccacgtggcaggagtctgccacagagaggtgttgattgcctttcctcacatttccaggaactgagtatctaccaagatcaggaacaaaggatcttaaagttcctggaagagcttggggaagggaaggccaccacagcacatgatctgtctgggaaacttgggactccgaagaaagaaatcaatcgagttttatactccctggcaaagaagggcaagctacagaaagaggcaggaacaccccctttgtggaaaatcgcggtctccactcaggcttggaaccagcacagcggagtggtaagaccagacggtcatagccaaggagccccaaactcagacccgagtttggaaccggaagacagaaactccacatctgtctcagaagatcttcttgagccttttattgcagtctcagctcaggcttggaaccagcacagcggagtggtaagaccagacagtcatagccaaggatccccaaactcagacccaggtttggaacctgaagacagcaactccacatctgccttggaagatcctcttgagtttttagacatggccgagatcaaggagaaaatctgcgactatctcttcaatgtgtctgactcctctgccctgaatttggctaaaaatattggccttaccaaggcccgagatataaatgctgtgctawttgacatggaaaggcagggggatgtctatagacaagggacaacccctcccatatggcatttgacagacaagaagcgagagaggatgcaaatcaagagaaatacgaacagtgttcctgaaaccgctccagctgcaatccctgagaccanaagaaacgcagagttcctcacctgtaatatacccacatcaaatgcctcaaataacatggtaaccacagaaaaagtggagaatgggcaggaacctgtcataaagttagaaaacaggcaagaggccagaccagaaccagcaagactgaaaccacctgttcattacaatggcccctcaaaagcagggtatgttgactttgaaaatggccagtgggccacagatgacatcccagatgacttgaatagtatccgcgcagcaccaggtgagtttcgagccatcatggagatgccctccttctacagtcatggcttgccacggtgttcaccctacaagaaactgacagagtgccagctgaagaaccccatcagcgggctgttagaatatgcccagttcgctagtcaaacctgtgagttcaacatgatagagcagagtggaccaccccatgaacctcgatttaaattccaggttgtcatcaatggccgagagtttcccccagctgaagctggaagcaagaaagtggccaagcaggatgcagctatgaaagccatgacaattctgctagaggaagccaaagccaaggacagtggaaaatcagaagaatcatcccactrttccacagagaaagaatcagagaagactgcagagtcccagacccccaccccttcagccacatccttcttttstgggaagagccccgtcaccacactgcttgagtgtatgcacaaattggggaactcctgcgaattccgtctcctgtccaaagaaggccctgcccatgaacccaagttccaatactgtgttgcagtgggagcccaaactttccccagtgtgagtgctcccagcaagaaagtggcaaagcagatggccgcagaggaagccatgaaggccctgcatggggaggcgaccaactccatggcttctgataaccagyctgaaggtatgatctcagagtcacttgataacttggaatccatgatgcccaacaaggtcaggaagattggcgagctygtgagatacctgaacaccaaccctgtgggtggccttttggagtacgcccgctcccatggctttgctgctgaattcaagttggtcgaccagtccggacctcctcacgagcccaagttcgtttaccaagcaaaagttgggggtcgctggttcccagccgtctgcgcacacagcaagaagcaaggcaagcaggaagcagcagatgcggctctccgtgtcttgattggggagaacgagaaggcagaacgcatgggtttcacagaggtaaccccagtgacaggggccagtctcagaagaactatgctcctcctctcaaggtccccagaagcacagccaaagacactccctctcactggcagcaccttccatgaccagatagccatgctgagccaccggtgcttcaacactctgactaacagcttccagccctccttgctcggccgcaagattctggccgccatcattatgaaaaaagactctgaggacatgggtgtcgtcgtcagcttgggaacagggaatcgctgtgtraaaggagattctctcagcctaaaaggagaaactgtcaatgactgccatgcagaaataatctcccggagaggcttcatcaggtttctctacagtgagttaatgaaatacaactcccagactgcgaaggatagtatatttgaacctgctaagggaggagaaaagctccaaataaaaaagactgtgtcattccatctgtatatcagcactgctccgtgtggagatggcgccctctttgacaagtcctgcagcgaccgtgctatggaaagcacagaatcccgccactaccctgtcttcgagaatcccaaacaaggaaagctccgcaccaaggtggagaacggagaaggcacaatccctgtggaatccagtgacattgtgcctacgtgggatggcattcggctcggggagagactccgtaccatgtcctgtagtgacaaaatcctacgctggaacgtgctgggcctgcaaggggcactgttgacccacttcctgcagcccatttatctcaaatctgtcacattgggttaccttttcagccaagggcatctgacccgtgctatttgctgtcgtgtgacaagagatgggagtgcatttgaggatggactacgacatccctttattgtcaaccaccccaaggttggcagagtcagcatatatgattccaaaaggcaatccgggaagactaaggagacaagcgtcaactggtgtctggctgatggctatgacctggagatcctggacggtaccagaggcactgtggatgggccacggaatgaattgtcccgggtctccaaaaagaacatttttcttctatttaagaagctctgctccttccgttaccgcagggatctactgagactctcctatggtgaggccaagaaagctgcccgtgactacgagacggccaagaactacttcaaaaaaggcctgaaggatatgggctatgggaactggattagcaaaccccaggaggaaaagaacttttatctctgcccagtatagtatgctccagtgacagatggattagggtgtgtcatactagggtgtgagagaggtaggtcgtagcattcctcatcacatggtcaggggatttttttttctcctttttttttytttttaagccataattggtgatactgaaaactttgggttcccatttatcctgctttctttgggattgctaggcaaggtctggccaggccccccttttttcccccaagtgaagaggcagaaacctaagaagttatcttttctttctacccaaagcatacatagtcactgagcacctgcggtccatttcctcttaaaagttttgttttgatttgtttccatttcctttccctttgtgtttgctacactgacctcttgcggtcttgattaggtttcagtcaactctggatcatgtcagggactgataatttcatttgtggattacgcagacccctctacttcccctctttcccttctgagattctttccttgtgatctgaatgtctccttttccccctcagagggcaaagaggtgaacataaaggatttggtgaaacatttgtaagggtaggagttgaaaactgcagttcccagtgccacggaagtgtgattggagcctgcagataatgcycagccatcctcccatcctgcactttagccagctgcagggcgggcaaggcaaggaaagctgcttccctggaagtgtatcactttctccggcagctgggaagtctagaaccagccagactgggttaagggagctgctcaagcaatagcagaggtttcacccggcaggatgacacagaccacttcccagggagcacgggcatgccttggaatattgccaagcttccagctgcctcttctcytaaagcattcctaggaatattttccccgccaatgctgggcgtacaccctagccaacgggacaaatcctagagggtataaaatcatctctgctcagataatcatgacttagcaagaataagggcaaaaaatcctgttggcttaacgtcactgttccaccyggtgtaatatctctcatgacagtgacaccaagggaagttgactaagtcacatgtaaattaggagtgttttaaagaatgccatagatgttgattcttaactgctacagataacctgtaattgagcagatttaaaattcaggcatacttttccatttatccaagtgctttcatttttccagatggcttcagaagtaggctcgtgggcagggcgcagacctgatctttmtagggttgacatagaaagcagtagttgtgggtgaaagggcaggttgtcttcaaactctgtgaggtagaatcctttgtctatacctccatgaacattgactcgtgtgttcagagcctttggcctctctgtggagtctggctctctggctcctgtgcattctttgaatagtcactcgtaaaaactgtcagtgcttgaarctgtttcctttactcatgttgaagggactttgttggcttttagagtgttggtcatgactccaagagcagagcagggaagagcccaagcatagacttggtgccgtggtgawggctgcagtccagttttgtgatgctgcttttacgtgtccctcgataacagtcagctagacacactcaggaggactactgaggctctgcgaccttcaggagctgagcctgcctctctcctttagatgacagaccttcatctgggaacgtgctgagccagcaccctcagatgatttccctccaaactgctgactaggtcatcctctgtctggtagagacattcacatctttgcttttattctrtgctctctgtacttttgaccaaaaattgaccaaagtaagaaaatgcaagttctaaaaatagactaaggatgcctttgcagaacaccaaagcatcccaaggaactggtagggaagtggcgcctgtctcctggagtggaagaggcctgctccctggctctgggtctgctgggggcacagtaaatcagtcttggcacccacatccagggcagagaggtctgtggttctcagcatcagaaggcagcgcagcccctctcctcttcaggctacagggttgtcacctgctgagtcctcaggttgtttggcctctctggtccatcttgggcattaggttctccagcagagctctggccagctgcctcttctttaactgggaacacaggctctcacaagatcagaacccccactcacccccaagatcttatctagcaagcctgtagtattcagtttctgttgtaggaagagagcgaggcatccctgaattccacgcatctgctggaaacgagccgtgtcagatcgcacatccctgcgcccccatgcccccatgcccctytgagtcacacaggacagaggaggcagagcttctgcccactgttatcttcactttctttgtccagtcttttktttttaataagcagtgaccctccctactcttctttttaatgatttttgtagttgatttgtctgaactgtggctactgtgcattccttgaataatcacttgtaaaaattgtcagtgcttgaagctgtttcctttactcacattgaagggacttcgttggttttttggagtyttggttgtgactccaagagcagagtgaggaagacccccaagcrtagactcgggtactgtgatgatggctgcagtccagttttatgattctgcttttatgtgtcccttgataacagtgacttaacaatatacattcctcataaataaaaaaaaaacaagaatctgaattcttag

SEQ ID NO: 2170 - DNA, 6209 bp, Homo sapiens
  misc_feature (1)...(6209): n = A,T,C or G
gcggccgcactggcagcctccgggtgtccggccgtgtcccgaggaagtgcaagacccggggtattccctcagcggatactacacccatccatttcaaggctatgagcacagacagctcagrtaccagcagcctgggccaggatcttcccccagtagtttcctgcttaagcaaatagaatttctcaaggggcagctcccagaagcaccggtgattggaaagcagacaccgtcactrccaccttccctcccaggactccggccaaggtttccagtactacttgcctccagtaccagaggcaggcaagtggacatcaggggtgtccccaggggcgtgcatctcrgaagtcaggggctccagagagggttccagcatccttcaccacgtggcaggagtctgccacagagaggtgttgattgcctttcctcacatttccaggaactgagtatctaccaagatcaggaacaaaggatcttaaagttcctggaagagcttggggaagggaaggccaccacagcacatgatctgtctgggaaacttgggactccgaagaaagaaatcaatcgagttttatactccctggcaaagaagggcaagctacagaaagaggcaggaacaccccctttgtggaaaatcgcggtctccactcaggcttggaaccagcacagcggagtggtaagaccagacggtcatagccaaggagccccaaactcagacccgagtttggaaccggaagacagaaactccacatctgtctcagaagatcttcttgagccttttattgcagtctcagctcaggcttggaaccagcacagcggagtggtaagaccagacagtcatagccaaggatccccaaactcagacccaggtttggaacctgaagacagcaactccacatctgccttggaagatcctcttgagtttttagacatggccgagatcaaggagaaaatctgcgactatctcttcaatgtgtctgactcctctgccctgaatttggctaaaaatattggccttaccaaggcccgagatataaatgctgtgctawttgacatggaaaggcagggggatgtctatagacaagggacaacccctcccatatggcatttgacagacaagaagcgagagaggatgcaaatcaagagaaatacgaacagtgttcctgaaaccgctccagctgcaatccctgagaccanaagaaacgcagagttcctcacctgtaatatacccacatcaaatgcctcaaataacatggtaaccacagaaaaagtggagaatgggcaggaacctgtcataaagttagaaaacaggcaagaggccagaccagaaccagcaagactgaaaccacctgttcattacaatggcccctcaaaagcagggtatgttgactttgaaaatggccagtgggccacagatgacatcccagatgacttgaatagtatccgcgcagcaccaggtgagtttcgagccatcatggagatgccctccttctacagtcatggcttgccacggtgttcaccctacaagaaactgacagagtgccagctgaagaaccccatcagcgggctgttagaatatgcccagttcgctagtcaaacctgtgagttcaacatgatagagcagagtggaccaccccatgaacctcgatttaaattccaggttgtcatcaatggccgagagtttcccccagctgaagctggaagcaagaaagtggccaagcaggatgcagctatgaaagccatgacaattctgctagaggaagccaaagccaaggacagtggaaaatcagaagaatcatcccactrttccacagagaaagaatcagagaagactgcagagtcccagacccccaccccttcagccacatccttcttttstgggaagagccccgtcaccacactgcttgagtgtatgcacaaattggggaactcctgcgaattccgtctcctgtccaaagaaggccctgcccatgaacccaagttccaatactgtgttgcagtgggagcccaaactttccccagtgtgagtgctcccagcaagaaagtggcaaagcagatggccgcagaggaagccatgaaggccctgcatggggaggcgaccaactccatggcttctgataaccagyctgaaggtatgatctcagagtcacttgataacttggaatccatgatgcccaacaaggtcaggaagattggcgagctygtgagatacctgaacaccaaccctgtgggtggccttttggagtacgcccgctcccatggctttgctgctgaattcaagttggtcgaccagtccggacctcctcacgagcccaagttcgtttaccaagcaaaagttgggggtcgctggttcccagccgtctgcgcacacagcaagaagcaaggcaagcaggaagcagcagatgcggctctccgtgtcttgattggggagaacgagaaggcagaacgcatgggtttcacagagctccctctcactggcagcaccttccatgaccagatagccatgctgagccaccggtgcttcaacactctgactaacagcttccagccctccttgctcggccgcaagattctggccgccatcattatgaaaaaagactctgaggacatgggtgtcgtcgtcagcttgggaacagggaatcgctgtgtraaaggagattctctcagcctaaaaggagaaactgtcaatgactgccatgcagaaataatctcccggagaggcttcatcaggtttctctacagtgagttaatgaaatacaactcccagactgcgaaggatagtatatttgaacctgctaagggaggagaaaagctccaaataaaaaagactgtgtcattccatctgtatatcagcactgctccgtgtggagatggcgccctctttgacaagtcctgcagcgaccgtgctatggaaagcacagaatcccgccactaccctgtcttcgagaatcccaaacaaggaaagctccgcaccaaggtggagaacggagaaggcacaatccctgtggaatccagtgacattgtgcctacgtgggatggcattcggctcggggagagactccgtaccatgtcctgtagtgacaaaatcctacgctggaacgtgctgggcctgcaaggggcactgttgacccacttcctgcagcccatttatctcaaatctgtcacattgggttaccttttcagccaagggcatctgacccgtgctatttgctgtcgtgtgacaagagatgggagtgcatttgaggatggactacgacatccctttattgtcaaccaccccaaggttggcagagtcagcatatatgattccaaaaggcaatccgggaagactaaggagacaagcgtcaactggtgtctggctgatggctatgacctggagatcctggacggtaccagaggcactgtggatgggccacggaatgaattgtcccgggtctccaaaaagaacatttttcttctatttaagaagctctgctccttccgttaccgcagggatctactgagactctcctatggtgaggccaagaaagctgcccgtgactacgagacggccaagaactacttcaaaaaaggcctgaaggatatgggctatgggaactggattagcaaaccccaggaggaaaagaacttttatctctgcccagtatagtatgctccagtgacagatggattagggtgtgtcatactagggtgtgagagaggtaggtcgtagcattcctcatcacatggtcaggggatttttttttctcctttttttttytttttaagccataattggtgatactgaaaactttgggttcccatttatcctgctttctttgggattgctaggcaaggtctggccaggccccccttttttcccccaagtgaagaggcagaaacctaagaagttatcttttctttctacccaaagcatacatagtcactgagcacctgcggtccatttcctcttaaaagttttgttttgatttgtttccatttcctttccctttgtgtttgctacactgacctcttgcggtcttgattaggtttcagtcaactctggatcatgtcagggactgataatttcatttgtggattacgcagacccctctacttcccctctttcccttctgagattctttccttgtgatctgaatgtctccttttccccctcagagggcaaagaggtgaacataaaggatttggtgaaacatttgtaagggtaggagttgaaaactgcagttcccagtgccacggaagtgtgattggagcctgcagataatgcycagccatcctcccatcctgcactttagccagctgcagggcgggcaaggcaaggaaagctgcttccctggaagtgtatcactttctccggcagctgggaagtctagaaccagccagactgggttaagggagctgctcaagcaatagcagaggtttcacccggcaggatgacacagaccacttcccagggagcacgggcatgccttggaatattgccaagcttccagctgcctcttctcytaaagcattcctaggaatattttccccgccaatgctgggcgtacaccctagccaacgggacaaatcctagagggtataaaatcatctctgctcagataatcatgacttagcaagaataagggcaaaaaatcctgttggcttaacgtcactgttccaccyggtgtaatatctctcatgacagtgacaccaagggaagttgactaagtcacatgtaaattaggagtgttttaaagaatgccatagatgttgtcttcaaactctgtgaggtagaatcctttgtctatacctccatgaacattgactcgtgtgttcagagcctttggcctctctgtggagtctggctctctggctcctgtgcattctttgaatagtcactcgtaaaaactgtcagtgcttgaarctgtttcctttactcatgttgaagggactttgttggcttttagagtgttggtcatgactccaagagcagagcagggaagagcccaagcatagacttggtgccgtggtgawggctgcagtccagttttgtgatgctgcttttacgtgtccctcgataacagtcagctagacacactcaggaggactactgaggctctgcgaccttcaggagctgagcctgcctctctcctttagatgacagaccttcatctgggaacgtgctgagccagcaccctcagatgatttccctccaaactgctgactaggtcatcctctgtctggtagagacattcacatctttgcttttattctrtgctctctgtacttttgaccaaaaattgaccaaagtaagaaaatgcaagttctaaaaatagactaaggatgcctttgcagaacaccaaagcatcccaaggaactggtagggaagtggcgcctgtctcctggagtggaagaggcctgctccctggctctgggtctgctgggggcacagtaaatcagtcttggcacccacatccagggcagagaggtctgtggttctcagcatcagaaggcagcgcagcccctctcctcttcaggctacagggttgtcacctgctgagtcctcaggttgtttggcctctctggtccatcttgggcattaggttctccagcagagctctggccagctgcctcttctttaactgggaacacaggctctcacaagatcagaacccccactcacccccaagatcttatctagcaagcctgtagtattcagtttctgttgtaggaagagagcgaggcatccctgaattccacgcatctgctggaaacgagccgtgtcagatcgcacatccctgcgcccccatgcccccatgcccctytgagtcacacaggacagaggaggcagagcttctgcccactgttatcttcactttctttgtccagtcttttktttttaataagcagtgaccctccctactcttctttttaatgatttttgtagttgatttgtctgaactgtggctactgtgcattccttgaataatcacttgtaaaaattgtcagtgcttgaagctgtttcctttactcacattgaagggacttcgttggttttttggagtyttggttgtgactccaagagcagagtgaggaagacccccaagcrtagactcgggtactgtgatgatggctgcagtccagttttatgattctgcttttatgtgtcccttgataacagtgacttaacaatatacattcctcataaataaaaaaaaaacaagaatctg

SEQ ID NO: 2171 - DNA, 6287 bp, Homo sapiens
  misc_feature (1)...(6287): n = A,T,C or G
gcggccgcactggcagcctccgggtgtccggccgtgtcccgaggaagtgcaagacccggggtattccctcagcggatactacacccatccatttcaaggctatgagcacagacagctcagrtaccagcagcctgggccaggatcttcccccagtagtttcctgcttaagcaaatagaatttctcaaggggcagctcccagaagcaccggtgattggaaagcagacaccgtcactrccaccttccctcccaggactccggccaaggtttccagtactacttgcctccagtaccagaggcaggcaagtggacatcaggggtgtccccaggggcgtgcatctcrgaagtcaggggctccagagagggttccagcatccttcaccacgtggcaggagtctgccacagagaggtgttgattgcctttcctcacatttccaggaactgagtatctaccaagatcaggaacaaaggatcttaaagttcctggaagagcttggggaagggaaggccaccacagcacatgatctgtctgggaaacttgggactccgaagaaagaaatcaatcgagttttatactccctggcaaagaagggcaagctacagaaagaggcaggaacaccccctttgtggaaaatcgcggtctccactcaggcttggaaccagcacagcggagtggtaagaccagacggtcatagccaaggagccccaaactcagacccgagtttggaaccggaagacagaaactccacatctgtctcagaagatcttcttgagccttttattgcagtctcagctcaggcttggaaccagcacagcggagtggtaagaccagacagtcatagccaaggatccccaaactcagacccaggtttggaacctgaagacagcaactccacatctgccttggaagatcctcttgagtttttagacatggccgagatcaaggagaaaatctgcgactatctcttcaatgtgtctgactcctctgccctgaatttggctaaaaatattggccttaccaaggcccgagatataaatgctgtgctawttgacatggaaaggcagggggatgtctatagacaagggacaacccctcccatatggcatttgacagacaagaagcgagagaggatgcaaatcaagagaaatacgaacagtgttcctgaaaccgctccagctgcaatccctgagaccanaagaaacgcagagttcctcacctgtaatatacccacatcaaatgcctcaaataacatggtaaccacagaaaaagtggagaatgggcaggaacctgtcataaagttagaaaacaggcaagaggccagaccagaaccagcaagactgaaaccacctgttcattacaatggcccctcaaaagcagggtatgttgactttgaaaatggccagtgggccacagatgacatcccagatgacttgaatagtatccgcgcagcaccaggtgagtttcgagccatcatggagatgccctccttctacagtcatggcttgccacggtgttcaccctacaagaaactgacagagtgccagctgaagaaccccatcagcgggctgttagaatatgcccagttcgctagtcaaacctgtgagttcaacatgatagagcagagtggaccaccccatgaacctcgatttaaattccaggttgtcatcaatggccgagagtttcccccagctgaagctggaagcaagaaagtggccaagcaggatgcagctatgaaagccatgacaattctgctagaggaagccaaagccaaggacagtggaaaatcagaagaatcatcccactrttccacagagaaagaatcagagaagactgcagagtcccagacccccaccccttcagccacatccttcttttstgggaagagccccgtcaccacactgcttgagtgtatgcacaaattggggaactcctgcgaattccgtctcctgtccaaagaaggccctgcccatgaacccaagttccaatactgtgttgcagtgggagcccaaactttccccagtgtgagtgctcccagcaagaaagtggcaaagcagatggccgcagaggaagccatgaaggccctgcatggggaggcgaccaactccatggcttctgataaccagyctgaaggtatgatctcagagtcacttgataacttggaatccatgatgcccaacaaggtcaggaagattggcgagctygtgagatacctgaacaccaaccctgtgggtggccttttggagtacgcccgctcccatggctttgctgctgaattcaagttggtcgaccagtccggacctcctcacgagcccaagttcgtttaccaagcaaaagttgggggtcgctggttcccagccgtctgcgcacacagcaagaagcaaggcaagcaggaagcagcagatgcggctctccgtgtcttgattggggagaacgagaaggcagaacgcatgggtttcacagaggtaaccccagtgacaggggccagtctcagaagaactatgctcctcctctcaaggtccccagaagcacagccaaagacactccctctcactggcagcaccttccatgaccagatagccatgctgagccaccggtgcttcaacactctgactaacagcttccagccctccttgctcggccgcaagattctggccgccatcattatgaaaaaagactctgaggacatgggtgtcgtcgtcagcttgggaacagggaatcgctgtgtraaaggagattctctcagcctaaaaggagaaactgtcaatgactgccatgcagaaataatctcccggagaggcttcatcaggtttctctacagtgagttaatgaaatacaactcccagactgcgaaggatagtatatttgaacctgctaagggaggagaaaagctccaaataaaaaagactgtgtcattccatctgtatatcagcactgctccgtgtggagatggcgccctctttgacaagtcctgcagcgaccgtgctatggaaagcacagaatcccgccactaccctgtcttcgagaatcccaaacaaggaaagctccgcaccaaggtggagaacggagaaggcacaatccctgtggaatccagtgacattgtgcctacgtgggatggcattcggctcggggagagactccgtaccatgtcctgtagtgacaaaatcctacgctggaacgtgctgggcctgcaaggggcactgttgacccacttcctgcagcccatttatctcaaatctgtcacattgggttaccttttcagccaagggcatctgacccgtgctatttgctgtcgtgtgacaagagatgggagtgcatttgaggatggactacgacatccctttattgtcaaccaccccaaggttggcagagtcagcatatatgattccaaaaggcaatccgggaagactaaggagacaagcgtcaactggtgtctggctgatggctatgacctggagatcctggacggtaccagaggcactgtggatgggccacggaatgaattgtcccgggtctccaaaaagaacatttttcttctatttaagaagctctgctccttccgttaccgcagggatctactgagactctcctatggtgaggccaagaaagctgcccgtgactacgagacggccaagaactacttcaaaaaaggcctgaaggatatgggctatgggaactggattagcaaaccccaggaggaaaagaacttttatctctgcccagtatagtatgctccagtgacagatggattagggtgtgtcatactagggtgtgagagaggtaggtcgtagcattcctcatcacatggtcaggggatttttttttctcctttttttttytttttaagccataattggtgatactgaaaactttgggttcccatttatcctgctttctttgggattgctaggcaaggtctggccaggccccccttttttcccccaagtgaagaggcagaaacctaagaagttatcttttctttctacccaaagcatacatagtcactgagcacctgcggtccatttcctcttaaaagttttgttttgatttgtttccatttcctttccctttgtgtttgctacactgacctcttgcggtcttgattaggtttcagtcaactctggatcatgtcagggactgataatttcatttgtggattacgcagacccctctacttcccctctttcccttctgagattctttccttgtgatctgaatgtctccttttccccctcagagggcaaagaggtgaacataaaggatttggtgaaacatttgtaagggtaggagttgaaaactgcagttcccagtgccacggaagtgtgattggagcctgcagataatgcycagccatcctcccatcctgcactttagccagctgcagggcgggcaaggcaaggaaagctgcttccctggaagtgtatcactttctccggcagctgggaagtctagaaccagccagactgggttaagggagctgctcaagcaatagcagaggtttcacccggcaggatgacacagaccacttcccagggagcacgggcatgccttggaatattgccaagcttccagctgcctcttctcytaaagcattcctaggaatattttccccgccaatgctgggcgtacaccctagccaacgggacaaatcctagagggtataaaatcatctctgctcagataatcatgacttagcaagaataagggcaaaaaatcctgttggcttaacgtcactgttccaccyggtgtaatatctctcatgacagtgacaccaagggaagttgactaagtcacatgtaaattaggagtgttttaaagaatgccatagatgttgtcttcaaactctgtgaggtagaatcctttgtctatacctccatgaacattgactcgtgtgttcagagcctttggcctctctgtggagtctggctctctggctcctgtgcattctttgaatagtcactcgtaaaaactgtcagtgcttgaarctgtttcctttactcatgttgaagggactttgttggcttttagagtgttggtcatgactccaagagcagagcagggaagagcccaagcatagacttggtgccgtggtgawggctgcagtccagttttgtgatgctgcttttacgtgtccctcgataacagtcagctagacacactcaggaggactactgaggctctgcgaccttcaggagctgagcctgcctctctcctttagatgacagaccttcatctgggaacgtgctgagccagcaccctcagatgatttccctccaaactgctgactaggtcatcctctgtctggtagagacattcacatctttgcttttattctrtgctctctgtacttttgaccaaaaattgaccaaagtaagaaaatgcaagttctaaaaatagactaaggatgcctttgcagaacaccaaagcatcccaaggaactggtagggaagtggcgcctgtctcctggagtggaagaggcctgctccctggctctgggtctgctgggggcacagtaaatcagtcttggcacccacatccagggcagagaggtctgtggttctcagcatcagaaggcagcgcagcccctctcctcttcaggctacagggttgtcacctgctgagtcctcaggttgtttggcctctctggtccatcttgggcattaggttctccagcagagctctggccagctgcctcttctttaactgggaacacaggctctcacaagatcagaacccccactcacccccaagatcttatctagcaagcctgtagtattcagtttctgttgtaggaagagagcgaggcatccctgaattccacgcatctgctggaaacgagccgtgtcagatcgcacatccctgcgcccccatgcccccatgcccctytgagtcacacaggacagaggaggcagagcttctgcccactgttatcttcactttctttgtccagtcttttktttttaataagcagtgaccctccctactcttctttttaatgatttttgtagttgatttgtctgaactgtggctactgtgcattccttgaataatcacttgtaaaaattgtcagtgcttgaagctgtttcctttactcacattgaagggacttcgttggttttttggagtyttggttgtgactccaagagcagagtgaggaagacccccaagcrtagactcgggtactgtgatgatggctgcagtccagttttatgattctgcttttatgtgtcccttgataacagtgacttaacaatatacattcctcataaataaaaaaaaaacaagaatctg

SEQ ID NO: 2172 - DNA, 6544 bp, Homo sapiens
  misc_feature (1)...(6544): n = A,T,C or G
cgaaattgaaccggagccatcttgggcccggcgcgcagacccgcggagtttcccgtgccgacgccccggggccacttccagtgcggagtagcggaggcgtgggggcctcgaggggctggcgcggcccagcggtcgggccagggtcgtgccgccggcgggtcgggccgggcaatgcctcgcgggcgcaatgaatccgcggcaggggtattccctcagcggatactacacccatccatttcaaggctatgagcacagacagctcagrtaccagcagcctgggccaggatcttcccccagtagtttcctgcttaagcaaatagaatttctcaaggggcagctcccagaagcaccggtgattggaaagcagacaccgtcactrccaccttccctcccaggactccggccaaggtttccagtactacttgcctccagtaccagaggcaggcaagtggacatcaggggtgtccccaggggcgtgcatctcrgaagtcaggggctccagagagggttccagcatccttcaccacgtggcaggagtctgccacagagaggtgttgattgcctttcctcacatttccaggaactgagtatctaccaagatcaggaacaaaggatcttaaagttcctggaagagcttggggaagggaaggccaccacagcacatgatctgtctgggaaacttgggactccgaagaaagaaatcaatcgagttttatactccctggcaaagaagggcaagctacagaaagaggcaggaacaccccctttgtggaaaatcgcggtctccactcaggcttggaaccagcacagcggagtggtaagaccagacggtcatagccaaggagccccaaactcagacccgagtttggaaccggaagacagaaactccacatctgtctcagaagatcttcttgagccttttattgcagtctcagctcaggcttggaaccagcacagcggagtggtaagaccagacagtcatagccaaggatccccaaactcagacccaggtttggaacctgaagacagcaactccacatctgccttggaagatcctcttgagtttttagacatggccgagatcaaggagaaaatctgcgactatctcttcaatgtgtctgactcctctgccctgaatttggctaaaaatattggccttaccaaggcccgagatataaatgctgtgctawttgacatggaaaggcagggggatgtctatagacaagggacaacccctcccatatggcatttgacagacaagaagcgagagaggatgcaaatcaagagaaatacgaacagtgttcctgaaaccgctccagctgcaatccctgagaccanaagaaacgcagagttcctcacctgtaatatacccacatcaaatgcctcaaataacatggtaaccacagaaaaagtggagaatgggcaggaacctgtcataaagttagaaaacaggcaagaggccagaccagaaccagcaagactgaaaccacctgttcattacaatggcccctcaaaagcagggtatgttgactttgaaaatggccagtgggccacagatgacatcccagatgacttgaatagtatccgcgcagcaccaggtgagtttcgagccatcatggagatgccctccttctacagtcatggcttgccacggtgttcaccctacaagaaactgacagagtgccagctgaagaaccccatcagcgggctgttagaatatgcccagttcgctagtcaaacctgtgagttcaacatgatagagcagagtggaccaccccatgaacctcgatttaaattccaggttgtcatcaatggccgagagtttcccccagctgaagctggaagcaagaaagtggccaagcaggatgcagctatgaaagccatgacaattctgctagaggaagccaaagccaaggacagtggaaaatcagaagaatcatcccactrttccacagagaaagaatcagagaagactgcagagtcccagacccccaccccttcagccacatccttcttttstgggaagagccccgtcaccacactgcttgagtgtatgcacaaattggggaactcctgcgaattccgtctcctgtccaaagaaggccctgcccatgaacccaagttccaatactgtgttgcagtgggagcccaaactttccccagtgtgagtgctcccagcaagaaagtggcaaagcagatggccgcagaggaagccatgaaggccctgcatggggaggcgaccaactccatggcttctgataaccagyctgaaggtatgatctcagagtcacttgataacttggaatccatgatgcccaacaaggtcaggaagattggcgagctygtgagatacctgaacaccaaccctgtgggtggccttttggagtacgcccgctcccatggctttgctgctgaattcaagttggtcgaccagtccggacctcctcacgagcccaagttcgtttaccaagcaaaagttgggggtcgctggttcccagccgtctgcgcacacagcaagaagcaaggcaagcaggaagcagcagatgcggctctccgtgtcttgattggggagaacgagaaggcagaacgcatgggtttcacagagctccctctcactggcagcaccttccatgaccagatagccatgctgagccaccggtgcttcaacactctgactaacagcttccagccctccttgctcggccgcaagattctggccgccatcattatgaaaaaagactctgaggacatgggtgtcgtcgtcagcttgggaacagggaatcgctgtgtraaaggagattctctcagcctaaaaggagaaactgtcaatgactgccatgcagaaataatctcccggagaggcttcatcaggtttctctacagtgagttaatgaaatacaactcccagactgcgaaggatagtatatttgaacctgctaagggaggagaaaagctccaaataaaaaagactgtgtcattccatctgtatatcagcactgctccgtgtggagatggcgccctctttgacaagtcctgcagcgaccgtgctatggaaagcacagaatcccgccactaccctgtcttcgagaatcccaaacaaggaaagctccgcaccaaggtggagaacggagaaggcacaatccctgtggaatccagtgacattgtgcctacgtgggatggcattcggctcggggagagactccgtaccatgtcctgtagtgacaaaatcctacgctggaacgtgctgggcctgcaaggggcactgttgacccacttcctgcagcccatttatctcaaatctgtcacattgggttaccttttcagccaagggcatctgacccgtgctatttgctgtcgtgtgacaagagatgggagtgcatttgaggatggactacgacatccctttattgtcaaccaccccaaggttggcagagtcagcatatatgattccaaaaggcaatccgggaagactaaggagacaagcgtcaactggtgtctggctgatggctatgacctggagatcctggacggtaccagaggcactgtggatgggccacggaatgaattgtcccgggtctccaaaaagaacatttttcttctatttaagaagctctgctccttccgttaccgcagggatctactgagactctcctatggtgaggccaagaaagctgcccgtgactacgagacggccaagaactacttcaaaaaaggcctgaaggatatgggctatgggaactggattagcaaaccccaggaggaaaagaacttttatctctgcccagtatagtatgctccagtgacagatggattagggtgtgtcatactagggtgtgagagaggtaggtcgtagcattcctcatcacatggtcaggggatttttttttctcctttttttttytttttaagccataattggtgatactgaaaactttgggttcccatttatcctgctttctttgggattgctaggcaaggtctggccaggccccccttttttcccccaagtgaagaggcagaaacctaagaagttatcttttctttctacccaaagcatacatagtcactgagcacctgcggtccatttcctcttaaaagttttgttttgatttgtttccatttcctttccctttgtgtttgctacactgacctcttgcggtcttgattaggtttcagtcaactctggatcatgtcagggactgataatttcatttgtggattacgcagacccctctacttcccctctttcccttctgagattctttccttgtgatctgaatgtctccttttccccctcagagggcaaagaggtgaacataaaggatttggtgaaacatttgtaagggtaggagttgaaaactgcagttcccagtgccacggaagtgtgattggagcctgcagataatgcycagccatcctcccatcctgcactttagccagctgcagggcgggcaaggcaaggaaagctgcttccctggaagtgtatcactttctccggcagctgggaagtctagaaccagccagactgggttaagggagctgctcaagcaatagcagaggtttcacccggcaggatgacacagaccacttcccagggagcacgggcatgccttggaatattgccaagcttccagctgcctcttctcytaaagcattcctaggaatattttccccgccaatgctgggcgtacaccctagccaacgggacaaatcctagagggtataaaatcatctctgctcagataatcatgacttagcaagaataagggcaaaaaatcctgttggcttaacgtcactgttccaccyggtgtaatatctctcatgacagtgacaccaagggaagttgactaagtcacatgtaaattaggagtgttttaaagaatgccatagatgttgattcttaactgctacagataacctgtaattgagcagatttaaaattcaggcatacttttccatttatccaagtgctttcatttttccagatggcttcagaagtaggctcgtgggcagggcgcagacctgatctttmtagggttgacatagaaagcagtagttgtgggtgaaagggcaggttgtcttcaaactctgtgaggtagaatcctttgtctatacctccatgaacattgactcgtgtgttcagagcctttggcctctctgtggagtctggctctctggctcctgtgcattctttgaatagtcactcgtaaaaactgtcagtgcttgaarctgtttcctttactcatgttgaagggactttgttggcttttagagtgttggtcatgactccaagagcagagcagggaagagcccaagcatagacttggtgccgtggtgawggctgcagtccagttttgtgatgctgcttttacgtgtccctcgataacagtcagctagacacactcaggaggactactgaggctctgcgaccttcaggagctgagcctgcctctctcctttagatgacagaccttcatctgggaacgtgctgagccagcaccctcagatgatttccctccaaactgctgactaggtcatcctctgtctggtagagacattcacatctttgcttttattctrtgctctctgtacttttgaccaaaaattgaccaaagtaagaaaatgcaagttctaaaaatagactaaggatgcctttgcagaacaccaaagcatcccaaggaactggtagggaagtggcgcctgtctcctggagtggaagaggcctgctccctggctctgggtctgctgggggcacagtaaatcagtcttggcacccacatccagggcagagaggtctgtggttctcagcatcagaaggcagcgcagcccctctcctcttcaggctacagggttgtcacctgctgagtcctcaggttgtttggcctctctggtccatcttgggcattaggttctccagcagagctctggccagctgcctcttctttaactgggaacacaggctctcacaagatcagaacccccactcacccccaagatcttatctagcaagcctgtagtattcagtttctgttgtaggaagagagcgaggcatccctgaattccacgcatctgctggaaacgagccgtgtcagatcgcacatccctgcgcccccatgcccccatgcccctytgagtcacacaggacagaggaggcagagcttctgcccactgttatcttcactttctttgtccagtcttttktttttaataagcagtgaccctccctactcttctttttaatgatttttgtagttgatttgtctgaactgtggctactgtgcattccttgaataatcacttgtaaaaattgtcagtgcttgaagctgtttcctttactcacattgaagggacttcgttggttttttggagtyttggttgtgactccaagagcagagtgaggaagacccccaagcrtagactcgggtactgtgatgatggctgcagtccagttttatgattctgcttttatgtgtcccttgataacagtgacttaacaatatacattcctcataaataaaaaaaaaacaagaatctgaattcttag

SEQ ID NO: 2173 - DNA, 4673 bp, Homo sapiens
ctacctcttcctctccacgcggttgagaagaccggtcggcctgggcaacctgcgctgaagatgccgggaaaactccgtagtgacgctggtttggaatcagacaccgcaatgaaaaaaggggagacactgcgaaagcaaaccgaggagaaagagaaaaaagagaagccaaaatctgataagactgaagagatagcagaagaggaagaaactgttttccccaaagctaaacaagttaaaaagaaagcagagccttctgaagttgacatgaattctcctaaatccaaaaaggcaaaaaagaaagaggagccatctcaaaatgacatttctcctaaaaccaaaagtttgagaaagaaaaaggagcccattgaaaagaaagtggtttcttctaaaaccaaaaaagtgacaaaaaatgaggagccttctgaggaagaaatagatgctcctaagcccaagaagatgaagaaagaaaaggaaatgaatggagaaactagagagaaaagccccaaactgaagaatggatttcctcatcctgaaccggactgtaaccccagtgaagctgccagtgaagaaagtaacagtgagatagagcaggaaatacctgtggaacaaaaagaaggcgctttctctaattttcccatatctgaagaaactattaaacttctcaaaggccgaggagtgaccttcctatttcctatacaagcaaagacattccatcatgtttacagcgggaaggacttaattgcacaggcacggacaggaactgggaagacattctcctttgccatccctttgattgagaaacttcatggggaactgcaagacaggaagagaggccgtgcccctcaggtactggttcttgcacctacaagagagttggcaaatcaagtaagcaaagacttcagtgacatcacaaaaaagctgtcagtggcttgtttttatggtggaactccctatggaggtcaatttgaacgcatgaggaatgggattgatatcctggttggaacaccaggtcgtatcaaagaccacatacagaatggcaaactagatctcaccaaacttaagcatgttgtcctggatgaagtggaccagatgttggatatgggatttgctgatcaagtggaagagattttaagtgtggcatacaagaaagattctgaagacaatccccaaacattgcttttttctgcaacttgccctcattgggtatttaatgttgccaagaaatacatgaaatctacatatgaacaggtggacctgattggtaaaaagactcagaaaacggcaataactgtggagcatctggctattaagtgccactggactcagagggcagcagttattggggatgtcatccgagtatatagtggtcatcaaggacgcactatcatcttttgtgaaaccaagaaagaagcccaggagctgtcccagaattcagctataaagcaggatgctcagtccttgcatggagacattccacagaagcaaagggaaatcaccctgaaaggttttagaaatggtagttttggagttttggtggcaaccaatgttgctgcacgtgggttagacatccctgaggttgatttggttatacaaagctctccaccaaaggatgtagagtcctacattcatcgatccgggcggacaggcagagctggaaggacgggggtgtgcatctgcttttatcagcacaaggaagaatatcagttagtacaagtggagcaaaaagcgggaattaagttcaaacgaataggtgttccttctkcaacagaaataataaaagcttccagcaaagatgccatcaggcttttggattccgtgcctcccactgccattagtcacttcaaacaatcagctgagaagctgatagaggagaagggagctgtggaagctctggcagcagcactggcccatatttcaggtgccacgtccgtagaccagcgctccttgatcaactcaaatgtgggttttgtgaccatgatcttgcagtgctcaattgaaatgccaaatattagttatgcttggaaagaacttaaagagcagctgggcgaggagattgattccaaagtgaagggaatggtttttctcaaaggaaagctgggtgtttgctttgatgtacctaccgcatcagtaacagaaatacaggagaaatggcatgattcacgacgctggcagctctctgtggccacagagcaaccagaactggaaggaccacgggaaggatatggaggcttcaggggacagcgggaaggcagtcgaggcttcaggggacagcgggacggaaacagaagattcagaggacagcgggaaggcagtagaggcccgagaggacagcgatcaggaggtggcaacaaaagtaacagatcccaaaacaaaggccagaagcggagtttcagtaaagcatttggtcaataattagaaatagaagatttatatagcaaaaagagaatgatgtttggcaatatagaactgaacattatttttcatgcaaagttaaaagcacattgtgcctccttttgaccacttgccaagtccctgtctctttcagacacagacaagcttcatttaaattatttcatctgatcattatcatttataactttattgttacttcttcatcagtttttccttttgaaaggtgtatgaattcattacatttttattctaatgtattatctgtagattagaagataaaatcaagcatgtatctgcctatactttgtgagttcacctgtctttatactcaaaagtgtcccttaatagtgtccttccctgaartaaatacctaagggagtgtaacagtctctggaggaccactttgagcctttggaagttaaggtttcctcagccacctgccgaacagtttctcatgtggtcctattatttgtctactgagacttaatactgagcaatgttttgaaacaagatttcaaactaatctgggttgtaatacagtttataccagtgtatgctctagacttggaagatgtagtatgtttgatgtggattacctatacttatgttcgttttgatacatttttagcttctcattataaggtgattcatgctttagtgaattcttcatagatagtatatataaaagtacattttaatagaaagccagggttttaaggaatttcacatgtataaggtggctccatakctttatttgtaagtaggctggataaatggtgcttaaatggtaatgtactccacttcttcctattggaagattaacattatttaccaagaaggacttaagggagtarggggcgcagattagcattgctcaagagtatgtaaaaaaaaaaaaaaaaaaaaagaaccaaaccactggaaataatcaaatgcaaaaaggtaacaaattcataactggaaagcaaagagaagaacaagtatgatttggatgataaagcattgttttaatggtgaaaacttcacagatcactaatgtttctagaggttaacttcaagtgggcaagctggggtttttaggtagtcagtggcctagttcctaaagccacagtataggatctgttaaactgaatgtctgttgaaagtttgttttagctgcttggaggcttccttttaagacaaactgtatgtgattaagttgttttgagggaactgaagaacctgatgtagcccctggccagataactgcctgatttctcagatattatttctctgggaaacattctacatagcacaggagcttaagagtggcattatcttctcgccttaatttccagagattatttctgtactgagaatcctggaactactatgctaggaaatttaaagctgcatggtctgtcttgttttcatttaattattgtgaatacctagaatctttcttggtcctgatttctcttgcttaatccagtctttatctctaactgccccttatttgatcaccatgtactaggagctctgatagccagctcagctcctaatccttgaggcaacattctttttctatttgaacttcagttctgtccttgaatcccgactagatatttcttgccctctggtctcagaattctcttggcttttattccttgatccacttgccagttttatcactttacccttgttcctcatggcttcccatcaagccatgggtattaggtgacagtgtaatttattagattctggttttgcccaaatactgggcatgctttaataataactgaaccatttcattatttggataggcatgggtaccttatcaagcagattaaaaggatatggtacccgtcctttagaaaagaacagctaaaaccttgttgtggattatggatttagcctaaagaaaaataatctggcataaattaagagtaagagagaagattaatagaaatttcacttcacataacttaaaacatggctatttcaataaaggactaaagtttctcctggatcccagaattcaacctgtatttataaatgtataatgtatttagctactttttggtttaaatgaacttgttgggttagcttggtaaatgttataatttttactrttttctacaaagaaaatattttytaatttaagttggagctatctgtgcagcagtttctctacagttgtgcataaatgtttttactataaaatgagctaatgtataaaatactgctgtataccataataaagatagtaatacttgatttta

SEQ ID NO: 2174 - DNA, 1529 bp, Homo sapiens
cctagtggttcactgcactgtgaagacagattccagatgcagggaactcacacctccaatcccagacgctgtgtccagcaaaggctccatggttctggcccacagtggtggcctggacacctcctgcatcctcatgtggctgaaggaacaaggccatgatgtcattgcctacctggccaaaatcagccagaaggaagacttcgaggatgacaggaagaaggcatggaagcttggggccaaaaaggtgttcattgatgatgtcagcagggactttgtggaggagttcatctggccagccatccagtccagcatcctgtatgaggactactacctcctgggcacctctctggctaggccctgcatcgcccacaaacaagtggaaatcacccagcaggaggggaccaagtatgtatcctacggcgtcatgggaaaggggaacgatcatgtcctgtttgagctcacctgctcactggccctcagattaaggtcattgcttcctggaggatgcccgagttttacagctggttcaagggccttaatgatctcatggaataygcaaagcaacatcggattcccatcccagtcactctcaagaacccgtggagcatagacgagaacctcatgcatatcagctacgaggctggaattctggagaaacccaagtaccataagcacctccaggtctctacatgaagactaaggacctcaccaaagcccccaacaccactgacattctcgagattgagtccaaaaaaggggtccctgtgaaggtgaccaacgtcaaggatggcgccacccaccagacctcctaggagctcttcatgtacctgaaccaagctgcaagcaagcatggcctgggccatattgacatcgtggagaaccatttcattacaatgaagtcctgaggcatctatgagaccccagcaggcaccatcctttaccatgctcattcacacatccaggccttcaccatggatcgggaagtgcgcaaaatcaaataaggcctgggcttgaaatttgctgagctgctgtacaccggtttctggcacagccctgagtgtgaatttgtccgccactacatcgtcaagtcccaggagctagtggaagggaaagtgcaggtgtccgtcttcaagggccaggtatacatcctcggacaggagtccccactgcctctctacaacgaggagctggtgagcatgagtgtgcagggcgattaggagccagttgatgccaccgggttcatcaccatcagttcccttaggctgaaggaatatcatcatctccagagcaacgtcactgccaaatggacccctatacaagtgggagctggggcctcctcactttgcagatcccccaagtacaggcactaattgttgtgataatttgtaattgtgacttgttttcccagctggcagcgtagtgggcctgccaggccctagctttgttccctggtccccctgaagcctgcaaaaatagtcatcaaagggaagggtggggggcagctgcagtggggagctataaaatgacat

SEQ ID NO: 2175 - DNA, 3817 bp, Homo sapiens
ggtgtcctggtggattggtttctgtaagttcagattctcataaatcgtgtgagcgtcgccgacacctctgagataaaagggcccctttcgactagcctctgctgaaaggacctagaagaatcccttaggatgaagctgagtcttaccaaggtagttaatggctgtcgcctaggaaaaataaaaaacctgggcaaaacaggggaccacaccatggatattccaggctgccttctgtataccaagactggctccgccccacacctcacccatcacacgctgcataatatccacggggttcctgccatggctcagcttacgctgtcatccctagcagaacatcatgaagtcttgacagaatataaagaaggagttggaaagtttataggcatgccagaatcactcttgtactgctccctgcacgatccagtcagcccctgcccggctggttatgtaacaaacaagtctgtgtctgtgtggagtgttgcaggacgagtggaaatgactgtttccaagttcatggcaattcagaaggcccttcagccagactggttccagtgcctctccgatggagaagtatcttgtaaggaagcaacttccataaaaagggtcagaaagtctgttgaccgatcacttcttttcttggataactgtctgcggctgcaggaagagtcagaggttcttcagaagagtgtgatcattggagtgattgaaggtggagatgtgatggaagagaggctgaggtcagcacgagagacagccaagcggcctgtgggtggcttccttctggatggttttcaaggaaatccaacaaccctggaggctagactacgcttgctgtcatcagtcactgcagagctgccggaggacaagccaaggctcatatctggtgttagtcggccagatgaggtgctcgagtgtattgaaagaggagtggacttatttgagagttttttcccttatcaagtaacagagcggggatgtgccctgactttcagttttgattaccagccgaatcctgaagagacactactacaacaaaatggaacacaagaagaaataaaatgtatggatcaaataaagaaaattgaaacaactggttgcaaccaagaaataacatcatttgaaattaatctgaaggaaaaaaagtaccaggaggactttaacccgctggtgagaggatgttcctgttactgctgtaagaatcacactygggcatacatccaccatctgctggtgaccaatgagctgctggccggagtcctgcttatgatgcacaactttgaacactactttgggtttttccattacatccgggaagcactaaaaagtgacaractggcacagttgaaagagctcatccacaggcaagcatcttgagatcttgcaaatacaagtctcactcttcacactgagcctgtaccactgttgtaacatgggaagacgtgaagaagaaataatctgagctttaattatttatatttggayataaggtctgcttaaataaagaatctttgtaccaaactgcccacatgagggtgaagagatttcctcaaaagacttaaatgacctggattgatcagagagaattgaactgtgacctttaaracttctagactaattcttttagttgatagagattcatttagtcaaagacaaaagctttaactgtgagggcacagccttgaagtgggagtgatgagattctgagggacccatgaattggattgaggcttgaggggaaatggtgtgagacgaatgggctctggacatatgcctgttgatttgagaagaaatctggctggtttgagggtttcctttagttcaccctcatactctcaggagactcttctggatacttttgtcttccaccctgccctggcagtgcagccaatcagaaatggctcttgtgacttaactgggcttggatatccctggaatgtggggcttgaacattgctcctgtgatgatcatctgtcccaggtcacactccttcatttgaccacatggcctatttgcaacttctttttagagccaatgtaattgcctgttaggagccagaagtttgcccagctgctttcttctggttgtacagatccattgtggtctgccttccaggctcattaatagtctaactacgtaataactgaagacctatctcttgtgaagattcattctcaatgtgttcacttggacagagccctgcctggcctaacgattagagggttagtctccatcctgctcagatatgactcctgggcaattcacttaacttctccatggctgcttcctgctgaataaatagggacaggcataatggataggaatgaatgaacttttaagatactgtctagctctaaaattggaagaacaaaaagttttagattagagtcatagccttaatagccctagttgtcatcctgggagacaggcaacagtagagatatttgagagcctaaagagaggtttggcctgtgggtttttaagtggttattgaattggtatcaggagatcctgaggctggtaggggaaggtaattctttctaagttacctctgtatttttcaagttttctataaggaatacacatacacccacatgcacacaccatagtttttatacaaacagcaataacaaaaccaaaaagatgcccctttttttgtagggataagaaatacatttgttttatacttctatgctatattttgctattcaaaatttagtgggcattacttaacattgtttctaattattttgtggctgctgtatgttttatgtgttgggagcccattgtattaggccgttcttggattgctataaagaaatacctgagactgggtaatttggttttttggttttttggggttttttttgagacggagccttgctctgtcgcccaggctggagtgcagtggcgcgatctcggctctatgcaacctccacctcctgggttcatgccattctcctgcctcagcctcccgagtagctgggactacaggcgcccgccaccatgcctggctaattttttatatttttagtagagatggggtttcaccgtatgagccaggatggtctcgatctcctgacctcatgatccacaagactgggtaatctgtaaagaaaagaggtttaattggctcatggctctgcaggctttacaggaagcatggtactggcatctgcttggtttctggggaggcctccggaagcttatagtcatgrcagaaggtgaagggggagcaggcacatcacatgacaaaagcaggaacaagactcagagcaagaagtcacttatcaccaaggggatggcccaggccattcatgagggatccacctttgtgctccaaacacctcccaccaggccccacctccagtattggggattacatttcaacttgaggtttgggcgggaacaaatagtcaaattatattacccatctacatggttttctttttcttagtatgggagtgtccatgaataaattcatgggcatcctcataactcttccatgaatggcaaggggtacttatggaaaacagttttccaaagatctgattgttttgaaatgtgttagattggacttgttcaaatgttcatatttttgttctatgctaaatgcatcgttaggggagtagtggtaaatattccagaatccatatgaaattcatgagtttatttatgtctaaaacactgaaaactgtgtccaatatcgttcagtttcctgggtctttttcttattagcacatttgagaaaaatattcctttcctttattgtagtaaatctattaaaggcaatagccaataaaacatttttaatttt

SEQ ID NO: 2176 - DNA, 3901 bp, Homo sapiens
cagagaattttgcaacacgtggtagtgaactgtgaggagtttgaggggtctgaagactgaaagagtcgaatggtttgttggcagggtgtcctggtggattggtttctgtaagttcagattctcataaatcgtgtgagcgtcgccgacacctctgagataaaagggcccctttcgactagcctctgctgaaaggacctagaagaatcccttaggatgaagctgagtcttaccaaggtagttaatggctgtcgcctaggaaaaataaaaaacctgggcaaaacaggggaccacaccatggatattccaggctgccttctgtataccaagactggctccgccccacacctcacccatcacacgctgcataatatccacggggttcctgccatggctcagcttacgctgtcatccctagcagaacatcatgaagtcttgacagaatataaagaaggagttggaaagtttataggcatgccagaatcactcttgtactgctccctgcacgatccagtcagcccctgcccggctggttatgtaacaaacaagtctgtgtctgtgtggagtgttgcaggacgagtggaaatgactgtttccaagttcatggcaattcagaaggcccttcagccagactggttccagtgcctctccgatggagaagtatcttgtaaggaagcaacttccataaaaagggtcagaaagtctgttgaccgatcacttcttttcttggataactgtctgcggctgcaggaagagtcagaggttcttcagaagagtgtgatcattggagtgattgaaggtggagatgtgatggaagagaggctgaggtcagcacgagagacagccaagcggcctgtgggtggcttccttctggatggttttcaaggaaatccaacaaccctggaggctagactacgcttgctgtcatcagtcactgcagagctgccggaggacaagccaaggctcatatctggtgttagtcggccagatgaggtgctcgagtgtattgaaagaggagtggacttatttgagagttttttcccttatcaagtaacagagcggggatgtgccctgactttcagttttgattaccagccgaatcctgaagagacactactacaacaaaatggaacacaagaagaaataaaatgtatggatcaaataaagaaaattgaaacaactggttgcaaccaagaaataacatcatttgaaattaatctgaaggaaaaaaagtaccaggaggactttaacccgctggtgagaggatgttcctgttactgctgtaagaatcacactygggcatacatccaccatctgctggtgaccaatgagctgctggccggagtcctgcttatgatgcacaactttgaacactactttgggtttttccattacatccgggaagcactaaaaagtgacaractggcacagttgaaagagctcatccacaggcaagcatcttgagatcttgcaaatacaagtctcactcttcacactgagcctgtaccactgttgtaacatgggaagacgtgaagaagaaataatctgagctttaattatttatatttggayataaggtctgcttaaataaagaatctttgtaccaaactgcccacatgagggtgaagagatttcctcaaaagacttaaatgacctggattgatcagagagaattgaactgtgacctttaaracttctagactaattcttttagttgatagagattcatttagtcaaagacaaaagctttaactgtgagggcacagccttgaagtgggagtgatgagattctgagggacccatgaattggattgaggcttgaggggaaatggtgtgagacgaatgggctctggacatatgcctgttgatttgagaagaaatctggctggtttgagggtttcctttagttcaccctcatactctcaggagactcttctggatacttttgtcttccaccctgccctggcagtgcagccaatcagaaatggctcttgtgacttaactgggcttggatatccctggaatgtggggcttgaacattgctcctgtgatgatcatctgtcccaggtcacactccttcatttgaccacatggcctatttgcaacttctttttagagccaatgtaattgcctgttaggagccagaagtttgcccagctgctttcttctggttgtacagatccattgtggtctgccttccaggctcattaatagtctaactacgtaataactgaagacctatctcttgtgaagattcattctcaatgtgttcacttggacagagccctgcctggcctaacgattagagggttagtctccatcctgctcagatatgactcctgggcaattcacttaacttctccatggctgcttcctgctgaataaatagggacaggcataatggataggaatgaatgaacttttaagatactgtctagctctaaaattggaagaacaaaaagttttagattagagtcatagccttaatagccctagttgtcatcctgggagacaggcaacagtagagatatttgagagcctaaagagaggtttggcctgtgggtttttaagtggttattgaattggtatcaggagatcctgaggctggtaggggaaggtaattctttctaagttacctctgtatttttcaagttttctataaggaatacacatacacccacatgcacacaccatagtttttatacaaacagcaataacaaaaccaaaaagatgcccctttttttgtagggataagaaatacatttgttttatacttctatgctatattttgctattcaaaatttagtgggcattacttaacattgtttctaattattttgtggctgctgtatgttttatgtgttgggagcccattgtattaggccgttcttggattgctataaagaaatacctgagactgggtaatttggttttttggttttttggggttttttttgagacggagccttgctctgtcgcccaggctggagtgcagtggcgcgatctcggctctatgcaacctccacctcctgggttcatgccattctcctgcctcagcctcccgagtagctgggactacaggcgcccgccaccatgcctggctaattttttatatttttagtagagatggggtttcaccgtatgagccaggatggtctcgatctcctgacctcatgatccacaagactgggtaatctgtaaagaaaagaggtttaattggctcatggctctgcaggctttacaggaagcatggtactggcatctgcttggtttctggggaggcctccggaagcttatagtcatgrcagaaggtgaagggggagcaggcacatcacatgacaaaagcaggaacaagactcagagcaagaagtcacttatcaccaaggggatggcccaggccattcatgagggatccacctttgtgctccaaacacctcccaccaggccccacctccagtattggggattacatttcaacttgaggtttgggcgggaacaaatagtcaaattatattacccatctacatggttttctttttcttagtatgggagtgtccatgaataaattcatgggcatcctcataactcttccatgaatggcaaggggtacttatggaaaacagttttccaaagatctgattgttttgaaatgtgttagattggacttgttcaaatgttcatatttttgttctatgctaaatgcatcgttaggggagtagtggtaaatattccagaatccatatgaaattcatgagtttatttatgtctaaaacactgaaaactgtgtccaatatcgttcagtttcctgggtctttttcttattagcacatttgagaaaaatattcctttcctttattgtagtaaatctattaaaggcaatagccaataaaacatttttaatttt

SEQ ID NO: 2177 - DNA, 3907 bp, Homo sapiens
cagagaattttgcaacacgtggtagtgaactgtgaggagtttgaggggtctgaagactgaaagagtcgaatggtttgttggcagggtgtcctggtggattggtttctgtaagttcagattctcataaatcgtgtgagcgtcgccgacacctctgagataaaagggcccctttcgactagcctctgctgaaaggacctagaagaatcccttaggatgaagctgagtcttaccaaggtagttaatggctgtcgcctaggaaaaataaaaaacctgggcaaaacaggggaccacaccatggatattccaggctgccttctgtataccaagactggctccgccccacacctcacccatcacacgctgcataatatccacggggttcctgccatggctcagcttacgctgtcatccctagcagaacatcatgaagtcttgacagaatataaagaaggagttggaaagtttataggcatgccagaatcactcttgtactgctccctgcacgatccagtcagcccctgcccggctggttatgtaacaaacaagtctgtgtctgtgtggagtgttgcaggacgagtggaaatgactgtttccaagttcatggcaattcagaaggcccttcagccagactggttccagtgcctctccgatggagaagtatcttgtaaggaagcaacttccataaaaagggtcagaaagtctgttgaccgatcacttcttttcttggataactgtctgcggctgcaggaagagtcagaggttcttcagaagagtgtgatcattggagtgattgaaggtggagatgtgatggaagagaggctgaggtcagcacgagagacagccaagcggcctgtgggtggcttccttctggatggttttcaaggaaatccaacaaccctggaggctagactacgcttgctgtcatcagtcactgcagagctgccggaggacaagccaaggccagtgctcatatctggtgttagtcggccagatgaggtgctcgagtgtattgaaagaggagtggacttatttgagagttttttcccttatcaagtaacagagcggggatgtgccctgactttcagttttgattaccagccgaatcctgaagagacactactacaacaaaatggaacacaagaagaaataaaatgtatggatcaaataaagaaaattgaaacaactggttgcaaccaagaaataacatcatttgaaattaatctgaaggaaaaaaagtaccaggaggactttaacccgctggtgagaggatgttcctgttactgctgtaagaatcacactygggcatacatccaccatctgctggtgaccaatgagctgctggccggagtcctgcttatgatgcacaactttgaacactactttgggtttttccattacatccgggaagcactaaaaagtgacaractggcacagttgaaagagctcatccacaggcaagcatcttgagatcttgcaaatacaagtctcactcttcacactgagcctgtaccactgttgtaacatgggaagacgtgaagaagaaataatctgagctttaattatttatatttggayataaggtctgcttaaataaagaatctttgtaccaaactgcccacatgagggtgaagagatttcctcaaaagacttaaatgacctggattgatcagagagaattgaactgtgacctttaaracttctagactaattcttttagttgatagagattcatttagtcaaagacaaaagctttaactgtgagggcacagccttgaagtgggagtgatgagattctgagggacccatgaattggattgaggcttgaggggaaatggtgtgagacgaatgggctctggacatatgcctgttgatttgagaagaaatctggctggtttgagggtttcctttagttcaccctcatactctcaggagactcttctggatacttttgtcttccaccctgccctggcagtgcagccaatcagaaatggctcttgtgacttaactgggcttggatatccctggaatgtggggcttgaacattgctcctgtgatgatcatctgtcccaggtcacactccttcatttgaccacatggcctatttgcaacttctttttagagccaatgtaattgcctgttaggagccagaagtttgcccagctgctttcttctggttgtacagatccattgtggtctgccttccaggctcattaatagtctaactacgtaataactgaagacctatctcttgtgaagattcattctcaatgtgttcacttggacagagccctgcctggcctaacgattagagggttagtctccatcctgctcagatatgactcctgggcaattcacttaacttctccatggctgcttcctgctgaataaatagggacaggcataatggataggaatgaatgaacttttaagatactgtctagctctaaaattggaagaacaaaaagttttagattagagtcatagccttaatagccctagttgtcatcctgggagacaggcaacagtagagatatttgagagcctaaagagaggtttggcctgtgggtttttaagtggttattgaattggtatcaggagatcctgaggctggtaggggaaggtaattctttctaagttacctctgtatttttcaagttttctataaggaatacacatacacccacatgcacacaccatagtttttatacaaacagcaataacaaaaccaaaaagatgcccctttttttgtagggataagaaatacatttgttttatacttctatgctatattttgctattcaaaatttagtgggcattacttaacattgtttctaattattttgtggctgctgtatgttttatgtgttgggagcccattgtattaggccgttcttggattgctataaagaaatacctgagactgggtaatttggttttttggttttttggggttttttttgagacggagccttgctctgtcgcccaggctggagtgcagtggcgcgatctcggctctatgcaacctccacctcctgggttcatgccattctcctgcctcagcctcccgagtagctgggactacaggcgcccgccaccatgcctggctaattttttatatttttagtagagatggggtttcaccgtatgagccaggatggtctcgatctcctgacctcatgatccacaagactgggtaatctgtaaagaaaagaggtttaattggctcatggctctgcaggctttacaggaagcatggtactggcatctgcttggtttctggggaggcctccggaagcttatagtcatgrcagaaggtgaagggggagcaggcacatcacatgacaaaagcaggaacaagactcagagcaagaagtcacttatcaccaaggggatggcccaggccattcatgagggatccacctttgtgctccaaacacctcccaccaggccccacctccagtattggggattacatttcaacttgaggtttgggcgggaacaaatagtcaaattatattacccatctacatggttttctttttcttagtatgggagtgtccatgaataaattcatgggcatcctcataactcttccatgaatggcaaggggtacttatggaaaacagttttccaaagatctgattgttttgaaatgtgttagattggacttgttcaaatgttcatatttttgttctatgctaaatgcatcgttaggggagtagtggtaaatattccagaatccatatgaaattcatgagtttatttatgtctaaaacactgaaaactgtgtccaatatcgttcagtttcctgggtctttttcttattagcacatttgagaaaaatattcctttcctttattgtagtaaatctattaaaggcaatagccaataaaacatttttaatttt

SEQ ID NO: 2178 - DNA, 4933 bp, Homo sapiens
aggagcttcccgcgactccggaggcgctcggcgcagtcgcccgggattggggctggcgggagcctgagactccgggcagggctgctccctcctctgctcccccgccagatccgcggggaaggaatcgtgcccgcgccgcccctggcccgcgccaccttcctttggtttctgccggcctcgggcttctgcggcccgatgtggcaggcgccgcgagagaggcagcagccggctggagcagcggcccctcaggtctcggagcccggtgcgcctctgcggtcgtcgctcctgggcctcggcgggtcactcttgccggccggcttcgctgcgggtttgcactgcccggcatttgcaagtgaggaagcagcacaaccctgggttttagataatttctaacagagaggccccagcaattcagcaggcagcrtcctgagtctttggcagcctggtccctctttcgcaaattctccacctttgcgaacagagggtctttaggacacagattcttaaaagtgcaggtgagccagccatgagagggtatcttgtggccatattcctgagtgctgtcttcctctattatgtactgcattgcatattatggggaacgaatgtctattgggtggcacctgtggaaatgaaacggagaaataagatccagccttgtttatcaaagccagcttttgcctctctgctgaggtttcatcagtttcacccttttctgtgtgcrgctgattttagaaagattgcttccttgtatggtagcgataagtttgatttgccctatgggatgagaacatcagcggaatattttcgacttgctctttcaaaactgcagagttgtgatctctttgatgagtttgacaacataccctgtaaaaagtgtgtggtggttggtaatggaggagttttgaagaataagacattaggagaaaaaatcgactcctatgatgtaataataagaatgaataatggtcctgttttaggacatgaagaagaagttgggagaaggacaaccttccgacttttttatccagaatctgttttttcagatcctattcacaatgaccctaatacgacagtgattctcactgcttttaagccacatgatttaaggtggctgttggaattgttgatgggtgacaaaataaacactaatggtttttggaagaaaccagccttaaacctgatttataaaccttatcaaatccgaatattagatcctttcattatcagaacagcagcttatgaactgcttcattttccaaaagtgtttcccaaaaatcagaaacctaaacacccaacaacaggaattattgccatcacattggcgttttacatatgtcacgaagttcacctagctggttttaaatacaacttttctgacctcaagagtcctttgcactactatgggaatgccaccatgtctttgatgaataagaacgcgtatcacaatgtgactrcagagcagctctttttgaaggacattatagaaaaaaacctcgtaatcaacttgactcaagattgactctrcagactcagaagatgatgctaacagtgttagttttatttttgtactgcaatttttagtttaaaatatgttggatgcactcgtcaaataattatgtatactgtctgttgctgcctggtgattcataaccaccagcttaatttctgtgaatactgtatatttaacttatgaaaaccaagaaatgtaaagataacaggaaaataagttttgattgcawtgtttttaaaataagctagttttctgaggtgttttcacacgtctttttatagttacttcatcttagatttttgaagggatatgacttcctactaaggatttartttaccacaacaattctgactacaataagacattttgaggaggatatttggctactgtaaacatggctggtggaraatcacgattgtggcttgatgtggcaagccgaaaccacttggctctggaaatctaagttcatactggtttaattaagctctctcctgacaacccccagaattaaatgaaccatgattgtgaagagtaatttggtacaatgaaggcagtgtttgtttttaagttaaaggaaatgggctaaacataaagttcttattagataagtaaataactaaagaaagaatacaattactaaactctgatggctttgtattattttaaagaaatgaagtttaahtttatacartgaagctaagctaggcaagctcaagaaggaaaaaaaaatcttgaacattatttttttttgcctgacttacttattcattaaattttgaaggttttccacttgaagtaaattaggaaaggtaaagaagataacagaacaagtaaacacttaagaaaagtcaagctgaggccgggcagggtggctcacacctgtaatcctaacaaacactttgggaggccgagggaggcagctggattgcctgaactcaggagttcaagaccagcctggccaacatggtgaaacctcatctctactaaaatacaaaataattagctgggcgtggtggtatgcgctgtagtcccaggtactcgggaggctgaggcacgagaattgcttgagcccgggaggcagaggttgcagtgagccaagatcgcgccactgcacttcagcctgggtgacagagtgaggctgtcttctaaaaaatataaaaagtgaagttgggatttttggatttaaatggtacaaaaagaatatctcattttcccatgattaaagctaatcttcagatggaaagcttgcctggctacctagggtgcaccagagaatctgatccaatgcaagccagtcaatcctacaaatgtggtgagctagtcttccttcctatattttaataaatgtaaccaaaggccatctggaggtaggggaatgagaggtgaagaaacagaaaaatagaggttataaggatggaactaaaagttgtcagaagaggtatgasctgaagaaagaattactctcttttgaccaataaatacaattgggaaacactggaaaaccatggcttgattactgacaaccaacctgcctctctaaagagggtgtataaagggtgaaatacattagatttggctcagaaacagaatgcggtacttataaagcagaataaaggggagaacagtagtagttgatctaacccagattagacatgaataccagcatatgtttgcagagtcccacagttttgattcytcttataactttttgaggtgcaaaaggaaggtaccagaactggaatcacatgtaatcaatcagtgtgattttcccctcataccacacagccataggctgcagtgtggctgctgaagttcaattgatataaagtaaatcaggcttcaaaaagaatggtgctgtgggtacacaaggacataaagatgggaacgatagacactgaggactgcggcggggggagcgaggggagcggggagggcaagggctgaaagactatgtattgggtactatgctcacaacctggatgatgggatcattcataccacaaacctcagtatcacacaatatacccatgtaacaacctgcactctgcacatgtacccttagaatctaaaataaaagttgaaattatttttttaaaaaaaggatggcgctggtcatagaaaaagtcaaagtaaactaacagtgtcattttcaaatgttgctggaagcacaatattggccataaattagtgaggttaaaatagaagaatctggcattttatagtataaggaaaagctacaaacctcaaggttgttttatttaaaccaaataatctgagcaagacatatatacattaaaaacaaatgaacacattaaaatttcactattttacaatctaaattctagcaacatatacaaatactgagtgactacagtacatgccgaggtaagataagtacattctgggagaatatcactgacgctcaaaccatttttatttccaatatgtatttcaatacatgtttgtttccacttttcccagtgccacacacacacacamaaaaacaaaacaaaacaaaaaaaaacagtcacaagttggattacattagaattggtgccacagttractttaaaagcattttaataaccacccaactcttagattttgcagtttagggacttcaagttcagaaccaaaaagcagagaatcgtttcatgtgacatgatgtttctatagacctcttgctctctaggtgacaatgcagagccagggcaaaggtgtttaagctttgtcaccttccacagctttgtggccacattcatatttagataagctcggactctgctcccctcttctggagatggggagaggcaagtgtgtatgtgttgtcatacttactgcattaattcttcactcgaaccgtttacatcagcgaataaacccattgttcaatgcaaagtgcaaacagtgaaacatgaacttaaataaactggactagacccatcacatccaacaggatctatttagatttayagcatttaataaagtataagtcagaattcacaatatcttaaactgtgctgtttcctaagatcaagtaacagccaagtcagtgtaattttatgaaacctgtaatggccacatttgttgtgtctccgatgtatttctataattgcattaacaggaaaaaacttaatccaatataccagtgactttgagtcttaaatgttgcaagcaaaggataaaaattcaagggaattttgtcagatatggttactttcacattttcagttgttacttgattgtctccaaagccgtatatgtatcagacatataaatgtagtaaaaaaaaaaaaaaaaaatagaaaacctctactataaaaaccaatgaactaaaaagaagtataaagcagaaaaaccatttgaatcasgctcagctcttcatctggaaagtaaagtttatataaaagtagtaaaaac

SEQ ID NO: 2179 - DNA, 5374 bp, Homo sapiens
atgcaagatgtaattacagccattgatagggaaaatatcagcaatatgatgcccttggaagctcagaaaaaatctcttctggtgatggagaaaaggaagtgtcatccatacaagatgaatttacactctgaaccccaggaggtcctgcaccactgtccctggggtcatccaaaccagtacagtaacccagctggcctctcttcttctgaaaacatctccaacttcaacaatactttgagataccatattgctggtatttcaaaaactgctgccagcagggaggaggccaatggcgtgtccatagatcatgttcagcctccaagtggtstcataatcaacaaagaatctgaagtttacaagatgcttcaggagaaacaggrgttgaatgaacccctgaaacagtctacctctttcctgattttgcaggaaatcctggagtctgagataaaaggggatctcaacaaccctcaggattcagaagtgttaaaactcctgaccctaagtggctgcatcaattggaaatgctcagaaggtgcccatgtgtgacaaatgtggtcctggcattgtaggcatgtttgtaaagctgcggggaccatcatcccctccctgaatgttacgtgtgcactgattgtgacactcacccgaaagagaagggcttttttttttttttttccatcaaatctactgtgaagagcatgcccaggagcaagtcacaccacttgagggtacgatgtgrtcatcatgttccccaagtgatccagcagacctgcactgaccaccgttctccagccagcctctgctgcagctagttctctaaatgttctggccttgtctcttgaaagttctgtacttattcccccaccccmcaacccgcttaccttggttttatccctgctcattgaaccttgagtcccttgtcttggttaactgactcacactgactgtgtggtgcccgcccacttttacaatgaatggcaaactgtttttgttcagtgtccccttgccggcaacactgtgtaccttcctcccctcagttcttctctgctgcaaatggacatcagccacatttgaaccaaatcaaatataatatgtctgacattgatttcatttttgctccatctatagactcccagaaaaaagaaataaaaaaaatgcaaagaaaatttaaatgaacaaacagacccttctggaacctactgtgacatgagatgtgtccacaaggcgaggtttcaggcacacactgaaggagcatctgctggacagccctccccrcccccaagtccttaccaacctgtgccactgcataccctgtaaaaagtgtgtggtggttggtaatggaggagttttgaagaataagacattaggagaaaaaatcgactcctatgatgtaataataagaatgaataatggtcctgttttaggacatgaagaagaagttgggagaaggacaaccttccgacttttttatccagaatctgttttttcagatcctattcacaatgaccctaatacgacagtgattctcactgcttttaagccacatgatttaaggtggctgttggaattgttgatgggtgacaaaataaacactaatggtttttggaagaaaccagccttaaacctgatttataaaccttatcaaatccgaatattagatcctttcattatcagaacagcagcttatgaactgcttcattttccaaaagtgtttcccaaaaatcagaaacctaaacacccaacaacaggaattattgccatcacattggcgttttacatatgtcacgaagttcacctagctggttttaaatacaacttttctgacctcaagagtcctttgcactactatgggaatgccaccatgtctttgatgaataagaacgcgtatcacaatgtgactrcagagcagctctttttgaaggacattatagaaaaaaacctcgtaatcaacttgactcaagattgactctrcagactcagaagatgatgctaacagtgttagttttatttttgtactgcaatttttagtttaaaatatgttggatgcactcgtcaaataattatgtatactgtctgttgctgcctggtgattcataaccaccagcttaatttctgtgaatactgtatatttaacttatgaaaaccaagaaatgtaaagataacaggaaaataagttttgattgcawtgtttttaaaataagctagttttctgaggtgttttcacacgtctttttatagttacttcatcttagatttttgaagggatatgacttcctactaaggatttartttaccacaacaattctgactacaataagacattttgaggaggatatttggctactgtaaacatggctggtggaraatcacgattgtggcttgatgtggcaagccgaaaccacttggctctggaaatctaagttcatactggtttaattaagctctctcctgacaacccccagaattaaatgaaccatgattgtgaagagtaatttggtacaatgaaggcagtgtttgtttttaagttaaaggaaatgggctaaacataaagttcttattagataagtaaataactaaagaaagaatacaattactaaactctgatggctttgtattattttaaagaaatgaagtttaahtttatacartgaagctaagctaggcaagctcaagaaggaaaaaaaaatcttgaacattatttttttttgcctgacttacttattcattaaattttgaaggttttccacttgaagtaaattaggaaaggtaaagaagataacagaacaagtaaacacttaagaaaagtcaagctgaggccgggcagggtggctcacacctgtaatcctaacaaacactttgggaggccgagggaggcagctggattgcctgaactcaggagttcaagaccagcctggccaacatggtgaaacctcatctctactaaaatacaaaataattagctgggcgtggtggtatgcgctgtagtcccaggtactcgggaggctgaggcacgagaattgcttgagcccgggaggcagaggttgcagtgagccaagatcgcgccactgcacttcagcctgggtgacagagtgaggctgtcttctaaaaaatataaaaagtgaagttgggatttttggatttaaatggtacaaaaagaatatctcattttcccatgattaaagctaatcttcagatggaaagcttgcctggctacctagggtgcaccagagaatctgatccaatgcaagccagtcaatcctacaaatgtggtgagctagtcttccttcctatattttaataaatgtaaccaaaggccatctggaggtaggggaatgagaggtgaagaaacagaaaaatagaggttataaggatggaactaaaagttgtcagaagaggtatgasctgaagaaagaattactctcttttgaccaataaatacaattgggaaacactggaaaaccatggcttgattactgacaaccaacctgcctctctaaagagggtgtataaagggtgaaatacattagatttggctcagaaacagaatgcggtacttataaagcagaataaaggggagaacagtagtagttgatctaacccagattagacatgaataccagcatatgtttgcagagtcccacagttttgattcytcttataactttttgaggtgcaaaaggaaggtaccagaactggaatcacatgtaatcaatcagtgtgattttcccctcataccacacagccataggctgcagtgtggctgctgaagttcaattgatataaagtaaatcaggcttcaaaaagaatggtgctgtgggtacacaaggacataaagatgggaacgatagacactgaggactgcggcggggggagcgaggggagcggggagggcaagggctgaaagactatgtattgggtactatgctcacaacctggatgatgggatcattcataccacaaacctcagtatcacacaatatacccatgtaacaacctgcactctgcacatgtacccttagaatctaaaataaaagttgaaattatttttttaaaaaaaggatggcgctggtcatagaaaaagtcaaagtaaactaacagtgtcattttcaaatgttgctggaagcacaatattggccataaattagtgaggttaaaatagaagaatctggcattttatagtataaggaaaagctacaaacctcaaggttgttttatttaaaccaaataatctgagcaagacatatatacattaaaaacaaatgaacacattaaaatttcactattttacaatctaaattctagcaacatatacaaatactgagtgactacagtacatgccgaggtaagataagtacattctgggagaatatcactgacgctcaaaccatttttatttccaatatgtatttcaatacatgtttgtttccacttttcccagtgccacacacacacacamaaaaacaaaacaaaacaaaaaaaaacagtcacaagttggattacattagaattggtgccacagttractttaaaagcattttaataaccacccaactcttagattttgcagtttagggacttcaagttcagaaccaaaaagcagagaatcgtttcatgtgacatgatgtttctatagacctcttgctctctaggtgacaatgcagagccagggcaaaggtgtttaagctttgtcaccttccacagctttgtggccacattcatatttagataagctcggactctgctcccctcttctggagatggggagaggcaagtgtgtatgtgttgtcatacttactgcattaattcttcactcgaaccgtttacatcagcgaataaacccattgttcaatgcaaagtgcaaacagtgaaacatgaacttaaataaactggactagacccatcacatccaacaggatctatttagatttayagcatttaataaagtataagtcagaattcacaatatcttaaactgtgctgtttcctaagatcaagtaacagccaagtcagtgtaattttatgaaacctgtaatggccacatttgttgtgtctccgatgtatttctataattgcattaacaggaaaaaacttaatccaatataccagtgactttgagtcttaaatgttgcaagcaaaggataaaaattcaagggaattttgtcagatatggttactttcacattttcagttgttacttgattgtctccaaagccgtatatgtatcagacatataaatgtagtaaaaaaaaaaaaaaaaaatagaaaacctctactataaaaaccaatgaactaaaaagaagtataaagcagaaaaaccatttgaatcasgctcagctcttcatctggaaagtaaagtttatataaaagtagtaaaaac

SEQ ID NO: 2180 - DNA, 4880 bp, Homo sapiens
ctcccgcctggtccccaacgcctcaccctccgggagacccgcagcctcccaccactttgcaccttcctcctcgaatttgggggcggccaccgtgcaactggcgccagccgcggagcaggaggagcttcccgcgactccggaggcgctcggcgcagtcgcccgggattggggctggcgggagcctgagactccgggcagggctgctccctcctctgctcccccgccagatccgcggggaaggaatcgtgcccgcgccgcccctggcccgcgccaccttcctttggtttctgccggcctcgggcttctgcggcccgatgtggcaggcgccgcgagagaggcagcagccggctggagcagcggcccctcaggtctcggagcccggtgcgcctctgcggtcgtcgctcctgggcctcggcgggtcactcttgccggccggcttcgctgcgggtttgcactgcccgggtgagccagccatgagagggtatcttgtggccatattcctgagtgctgtcttcctctattatgtactgcattgcatattatggggaacgaatgtctattgggtggcacctgtggaaatgaaacggagaaataagatccagccttgtttatcaaagccagcttttgcctctctgctgaggtttcatcagtttcacccttttctgtgtgcrgctgattttagaaagattgcttccttgtatggtagcgataagtttgatttgccctatgggatgagaacatcagcggaatattttcgacttgctctttcaaaactgcagagttgtgatctctttgatgagtttgacaacataccctgtaaaaagtgtgtggtggttggtaatggaggagttttgaagaataagacattaggagaaaaaatcgactcctatgatgtaataataagaatgaataatggtcctgttttaggacatgaagaagaagttgggagaaggacaaccttccgacttttttatccagaatctgttttttcagatcctattcacaatgaccctaatacgacagtgattctcactgcttttaagccacatgatttaaggtggctgttggaattgttgatgggtgacaaaataaacactaatggtttttggaagaaaccagccttaaacctgatttataaaccttatcaaatccgaatattagatcctttcattatcagaacagcagcttatgaactgcttcattttccaaaagtgtttcccaaaaatcagaaacctaaacacccaacaacaggaattattgccatcacattggcgttttacatatgtcacgaagttcacctagctggttttaaatacaacttttctgacctcaagagtcctttgcactactatgggaatgccaccatgtctttgatgaataagaacgcgtatcacaatgtgactrcagagcagctctttttgaaggacattatagaaaaaaacctcgtaatcaacttgactcaagattgactctrcagactcagaagatgatgctaacagtgttagttttatttttgtactgcaatttttagtttaaaatatgttggatgcactcgtcaaataattatgtatactgtctgttgctgcctggtgattcataaccaccagcttaatttctgtgaatactgtatatttaacttatgaaaaccaagaaatgtaaagataacaggaaaataagttttgattgcawtgtttttaaaataagctagttttctgaggtgttttcacacgtctttttatagttacttcatcttagatttttgaagggatatgacttcctactaaggatttartttaccacaacaattctgactacaataagacattttgaggaggatatttggctactgtaaacatggctggtggaraatcacgattgtggcttgatgtggcaagccgaaaccacttggctctggaaatctaagttcatactggtttaattaagctctctcctgacaacccccagaattaaatgaaccatgattgtgaagagtaatttggtacaatgaaggcagtgtttgtttttaagttaaaggaaatgggctaaacataaagttcttattagataagtaaataactaaagaaagaatacaattactaaactctgatggctttgtattattttaaagaaatgaagtttaahtttatacartgaagctaagctaggcaagctcaagaaggaaaaaaaaatcttgaacattatttttttttgcctgacttacttattcattaaattttgaaggttttccacttgaagtaaattaggaaaggtaaagaagataacagaacaagtaaacacttaagaaaagtcaagctgaggccgggcagggtggctcacacctgtaatcctaacaaacactttgggaggccgagggaggcagctggattgcctgaactcaggagttcaagaccagcctggccaacatggtgaaacctcatctctactaaaatacaaaataattagctgggcgtggtggtatgcgctgtagtcccaggtactcgggaggctgaggcacgagaattgcttgagcccgggaggcagaggttgcagtgagccaagatcgcgccactgcacttcagcctgggtgacagagtgaggctgtcttctaaaaaatataaaaagtgaagttgggatttttggatttaaatggtacaaaaagaatatctcattttcccatgattaaagctaatcttcagatggaaagcttgcctggctacctagggtgcaccagagaatctgatccaatgcaagccagtcaatcctacaaatgtggtgagctagtcttccttcctatattttaataaatgtaaccaaaggccatctggaggtaggggaatgagaggtgaagaaacagaaaaatagaggttataaggatggaactaaaagttgtcagaagaggtatgasctgaagaaagaattactctcttttgaccaataaatacaattgggaaacactggaaaaccatggcttgattactgacaaccaacctgcctctctaaagagggtgtataaagggtgaaatacattagatttggctcagaaacagaatgcggtacttataaagcagaataaaggggagaacagtagtagttgatctaacccagattagacatgaataccagcatatgtttgcagagtcccacagttttgattcytcttataactttttgaggtgcaaaaggaaggtaccagaactggaatcacatgtaatcaatcagtgtgattttcccctcataccacacagccataggctgcagtgtggctgctgaagttcaattgatataaagtaaatcaggcttcaaaaagaatggtgctgtgggtacacaaggacataaagatgggaacgatagacactgaggactgcggcggggggagcgaggggagcggggagggcaagggctgaaagactatgtattgggtactatgctcacaacctggatgatgggatcattcataccacaaacctcagtatcacacaatatacccatgtaacaacctgcactctgcacatgtacccttagaatctaaaataaaagttgaaattatttttttaaaaaaaggatggcgctggtcatagaaaaagtcaaagtaaactaacagtgtcattttcaaatgttgctggaagcacaatattggccataaattagtgaggttaaaatagaagaatctggcattttatagtataaggaaaagctacaaacctcaaggttgttttatttaaaccaaataatctgagcaagacatatatacattaaaaacaaatgaacacattaaaatttcactattttacaatctaaattctagcaacatatacaaatactgagtgactacagtacatgccgaggtaagataagtacattctgggagaatatcactgacgctcaaaccatttttatttccaatatgtatttcaatacatgtttgtttccacttttcccagtgccacacacacacacamaaaaacaaaacaaaacaaaaaaaaacagtcacaagttggattacattagaattggtgccacagttractttaaaagcattttaataaccacccaactcttagattttgcagtttagggacttcaagttcagaaccaaaaagcagagaatcgtttcatgtgacatgatgtttctatagacctcttgctctctaggtgacaatgcagagccagggcaaaggtgtttaagctttgtcaccttccacagctttgtggccacattcatatttagataagctcggactctgctcccctcttctggagatggggagaggcaagtgtgtatgtgttgtcatacttactgcattaattcttcactcgaaccgtttacatcagcgaataaacccattgttcaatgcaaagtgcaaacagtgaaacatgaacttaaataaactggactagacccatcacatccaacaggatctatttagatttayagcatttaataaagtataagtcagaattcacaatatcttaaactgtgctgtttcctaagatcaagtaacagccaagtcagtgtaattttatgaaacctgtaatggccacatttgttgtgtctccgatgtatttctataattgcattaacaggaaaaaacttaatccaatataccagtgactttgagtcttaaatgttgcaagcaaaggataaaaattcaagggaattttgtcagatatggttactttcacattttcagttgttacttgattgtctccaaagccgtatatgtatcagacatataaatgtagtaaaaaaaaaaaaaaaaaatagaaaacctctactataaaaaccaatgaactaaaaagaagtataaagcagaaaaaccatttgaatcasgctcagctcttcatctggaaagtaaagtttatataaaagtagtaaaaac

SEQ ID NO: 2181 - DNA, 4671 bp, Homo sapiens
caagcctcagtgtttacttctgccgcctgccagccgggcggggaaggggagtacccggccacccctcactttagctcctgcagctttccaaacaaaccagggcgggatgggagtgtcttcttggctgtggaaatcgatcctcctaccttgtcctgaagccacccgccgcctttcctcgtccctcccttcgcggtgattttccggtcccggcgcccggcgagggcgcgcggctggtgtccgccccgcccgaaaggtgagccagccatgagagggtatcttgtggccatattcctgagtgctgtcttcctctattatgtactgcattgcatattatggggaacgaatgtctattgggtggcacctgtggaaatgaaacggagaaataagatccagccttgtttatcaaagccagcttttgcctctctgctgaggtttcatcagtttcacccttttctgtgtgcrgctgattttagaaagattgcttccttgtatggtagcgataagtttgatttgccctatgggatgagaacatcagcggaatattttcgacttgctctttcaaaactgcagagttgtgatctctttgatgagtttgacaacataccctgtaaaaagtgtgtggtggttggtaatggaggagttttgaagaataagacattaggagaaaaaatcgactcctatgatgtaataataagaatgaataatggtcctgttttaggacatgaagaagaagttgggagaaggacaaccttccgacttttttatccagaatctgttttttcagatcctattcacaatgaccctaatacgacagtgattctcactgcttttaagccacatgatttaaggtggctgttggaattgttgatgggtgacaaaataaacactaatggtttttggaagaaaccagccttaaacctgatttataaaccttatcaaatccgaatattagatcctttcattatcagaacagcagcttatgaactgcttcattttccaaaagtgtttcccaaaaatcagaaacctaaacacccaacaacaggaattattgccatcacattggcgttttacatatgtcacgaagttcacctagctggttttaaatacaacttttctgacctcaagagtcctttgcactactatgggaatgccaccatgtctttgatgaataagaacgcgtatcacaatgtgactrcagagcagctctttttgaaggacattatagaaaaaaacctcgtaatcaacttgactcaagattgactctrcagactcagaagatgatgctaacagtgttagttttatttttgtactgcaatttttagtttaaaatatgttggatgcactcgtcaaataattatgtatactgtctgttgctgcctggtgattcataaccaccagcttaatttctgtgaatactgtatatttaacttatgaaaaccaagaaatgtaaagataacaggaaaataagttttgattgcawtgtttttaaaataagctagttttctgaggtgttttcacacgtctttttatagttacttcatcttagatttttgaagggatatgacttcctactaaggatttartttaccacaacaattctgactacaataagacattttgaggaggatatttggctactgtaaacatggctggtggaraatcacgattgtggcttgatgtggcaagccgaaaccacttggctctggaaatctaagttcatactggtttaattaagctctctcctgacaacccccagaattaaatgaaccatgattgtgaagagtaatttggtacaatgaaggcagtgtttgtttttaagttaaaggaaatgggctaaacataaagttcttattagataagtaaataactaaagaaagaatacaattactaaactctgatggctttgtattattttaaagaaatgaagtttaahtttatacartgaagctaagctaggcaagctcaagaaggaaaaaaaaatcttgaacattatttttttttgcctgacttacttattcattaaattttgaaggttttccacttgaagtaaattaggaaaggtaaagaagataacagaacaagtaaacacttaagaaaagtcaagctgaggccgggcagggtggctcacacctgtaatcctaacaaacactttgggaggccgagggaggcagctggattgcctgaactcaggagttcaagaccagcctggccaacatggtgaaacctcatctctactaaaatacaaaataattagctgggcgtggtggtatgcgctgtagtcccaggtactcgggaggctgaggcacgagaattgcttgagcccgggaggcagaggttgcagtgagccaagatcgcgccactgcacttcagcctgggtgacagagtgaggctgtcttctaaaaaatataaaaagtgaagttgggatttttggatttaaatggtacaaaaagaatatctcattttcccatgattaaagctaatcttcagatggaaagcttgcctggctacctagggtgcaccagagaatctgatccaatgcaagccagtcaatcctacaaatgtggtgagctagtcttccttcctatattttaataaatgtaaccaaaggccatctggaggtaggggaatgagaggtgaagaaacagaaaaatagaggttataaggatggaactaaaagttgtcagaagaggtatgasctgaagaaagaattactctcttttgaccaataaatacaattgggaaacactggaaaaccatggcttgattactgacaaccaacctgcctctctaaagagggtgtataaagggtgaaatacattagatttggctcagaaacagaatgcggtacttataaagcagaataaaggggagaacagtagtagttgatctaacccagattagacatgaataccagcatatgtttgcagagtcccacagttttgattcytcttataactttttgaggtgcaaaaggaaggtaccagaactggaatcacatgtaatcaatcagtgtgattttcccctcataccacacagccataggctgcagtgtggctgctgaagttcaattgatataaagtaaatcaggcttcaaaaagaatggtgctgtgggtacacaaggacataaagatgggaacgatagacactgaggactgcggcggggggagcgaggggagcggggagggcaagggctgaaagactatgtattgggtactatgctcacaacctggatgatgggatcattcataccacaaacctcagtatcacacaatatacccatgtaacaacctgcactctgcacatgtacccttagaatctaaaataaaagttgaaattatttttttaaaaaaaggatggcgctggtcatagaaaaagtcaaagtaaactaacagtgtcattttcaaatgttgctggaagcacaatattggccataaattagtgaggttaaaatagaagaatctggcattttatagtataaggaaaagctacaaacctcaaggttgttttatttaaaccaaataatctgagcaagacatatatacattaaaaacaaatgaacacattaaaatttcactattttacaatctaaattctagcaacatatacaaatactgagtgactacagtacatgccgaggtaagataagtacattctgggagaatatcactgacgctcaaaccatttttatttccaatatgtatttcaatacatgtttgtttccacttttcccagtgccacacacacacacamaaaaacaaaacaaaacaaaaaaaaacagtcacaagttggattacattagaattggtgccacagttractttaaaagcattttaataaccacccaactcttagattttgcagtttagggacttcaagttcagaaccaaaaagcagagaatcgtttcatgtgacatgatgtttctatagacctcttgctctctaggtgacaatgcagagccagggcaaaggtgtttaagctttgtcaccttccacagctttgtggccacattcatatttagataagctcggactctgctcccctcttctggagatggggagaggcaagtgtgtatgtgttgtcatacttactgcattaattcttcactcgaaccgtttacatcagcgaataaacccattgttcaatgcaaagtgcaaacagtgaaacatgaacttaaataaactggactagacccatcacatccaacaggatctatttagatttayagcatttaataaagtataagtcagaattcacaatatcttaaactgtgctgtttcctaagatcaagtaacagccaagtcagtgtaattttatgaaacctgtaatggccacatttgttgtgtctccgatgtatttctataattgcattaacaggaaaaaacttaatccaatataccagtgactttgagtcttaaatgttgcaagcaaaggataaaaattcaagggaattttgtcagatatggttactttcacattttcagttgttacttgattgtctccaaagccgtatatgtatcagacatataaatgtagtaaaaaaaaaaaaaaaaaatagaaaacctctactataaaaaccaatgaactaaaaagaagtataaagcagaaaaaccatttgaatcasgctcagctcttcatctggaaagtaaagtttatataaaagtagtaaaaac

SEQ ID NO: 2182 - DNA, 4846 bp, Homo sapiens
ccacaagcctcagtgtttacttctgccgcctgccagccgggcggggaaggggagtacccggccacccctcactttagctcctgcagctttccaaacaaaccagggcgggatgggagtgtcttcttggctgtggaaatcgatcctcctaccttgtcctgaagccacccgccgcctttcctcgtccctcccttcgcggtgattttccggtcccggcgcccggcgagggcgcgcggctggtgtccgccccgcccgaaagcatttgcaagtgaggaagcagcacaaccctgggttttagataatttctaacagagaggccccagcaattcagcaggcagcrtcctgagtctttggcagcctggtccctctttcgcaaattctccacctttgcgaacagagggtctttaggacacagattcttaaaagtgcaggtgagccagccatgagagggtatcttgtggccatattcctgagtgctgtcttcctctattatgtactgcattgcatattatggggaacgaatgtctattgggtggcacctgtggaaatgaaacggagaaataagatccagccttgtttatcaaagccagcttttgcctctctgctgaggtttcatcagtttcacccttttctgtgtgcrgctgattttagaaagattgcttccttgtatggtagcgataagtttgatttgccctatgggatgagaacatcagcggaatattttcgacttgctctttcaaaactgcagagttgtgatctctttgatgagtttgacaacataccctgtaaaaagtgtgtggtggttggtaatggaggagttttgaagaataagacattaggagaaaaaatcgactcctatgatgtaataataagaatgaataatggtcctgttttaggacatgaagaagaagttgggagaaggacaaccttccgacttttttatccagaatctgttttttcagatcctattcacaatgaccctaatacgacagtgattctcactgcttttaagccacatgatttaaggtggctgttggaattgttgatgggtgacaaaataaacactaatggtttttggaagaaaccagccttaaacctgatttataaaccttatcaaatccgaatattagatcctttcattatcagaacagcagcttatgaactgcttcattttccaaaagtgtttcccaaaaatcagaaacctaaacacccaacaacaggaattattgccatcacattggcgttttacatatgtcacgaagttcacctagctggttttaaatacaacttttctgacctcaagagtcctttgcactactatgggaatgccaccatgtctttgatgaataagaacgcgtatcacaatgtgactrcagagcagctctttttgaaggacattatagaaaaaaacctcgtaatcaacttgactcaagattgactctrcagactcagaagatgatgctaacagtgttagttttatttttgtactgcaatttttagtttaaaatatgttggatgcactcgtcaaataattatgtatactgtctgttgctgcctggtgattcataaccaccagcttaatttctgtgaatactgtatatttaacttatgaaaaccaagaaatgtaaagataacaggaaaataagttttgattgcawtgtttttaaaataagctagttttctgaggtgttttcacacgtctttttatagttacttcatcttagatttttgaagggatatgacttcctactaaggatttartttaccacaacaattctgactacaataagacattttgaggaggatatttggctactgtaaacatggctggtggaraatcacgattgtggcttgatgtggcaagccgaaaccacttggctctggaaatctaagttcatactggtttaattaagctctctcctgacaacccccagaattaaatgaaccatgattgtgaagagtaatttggtacaatgaaggcagtgtttgtttttaagttaaaggaaatgggctaaacataaagttcttattagataagtaaataactaaagaaagaatacaattactaaactctgatggctttgtattattttaaagaaatgaagtttaahtttatacartgaagctaagctaggcaagctcaagaaggaaaaaaaaatcttgaacattatttttttttgcctgacttacttattcattaaattttgaaggttttccacttgaagtaaattaggaaaggtaaagaagataacagaacaagtaaacacttaagaaaagtcaagctgaggccgggcagggtggctcacacctgtaatcctaacaaacactttgggaggccgagggaggcagctggattgcctgaactcaggagttcaagaccagcctggccaacatggtgaaacctcatctctactaaaatacaaaataattagctgggcgtggtggtatgcgctgtagtcccaggtactcgggaggctgaggcacgagaattgcttgagcccgggaggcagaggttgcagtgagccaagatcgcgccactgcacttcagcctgggtgacagagtgaggctgtcttctaaaaaatataaaaagtgaagttgggatttttggatttaaatggtacaaaaagaatatctcattttcccatgattaaagctaatcttcagatggaaagcttgcctggctacctagggtgcaccagagaatctgatccaatgcaagccagtcaatcctacaaatgtggtgagctagtcttccttcctatattttaataaatgtaaccaaaggccatctggaggtaggggaatgagaggtgaagaaacagaaaaatagaggttataaggatggaactaaaagttgtcagaagaggtatgasctgaagaaagaattactctcttttgaccaataaatacaattgggaaacactggaaaaccatggcttgattactgacaaccaacctgcctctctaaagagggtgtataaagggtgaaatacattagatttggctcagaaacagaatgcggtacttataaagcagaataaaggggagaacagtagtagttgatctaacccagattagacatgaataccagcatatgtttgcagagtcccacagttttgattcytcttataactttttgaggtgcaaaaggaaggtaccagaactggaatcacatgtaatcaatcagtgtgattttcccctcataccacacagccataggctgcagtgtggctgctgaagttcaattgatataaagtaaatcaggcttcaaaaagaatggtgctgtgggtacacaaggacataaagatgggaacgatagacactgaggactgcggcggggggagcgaggggagcggggagggcaagggctgaaagactatgtattgggtactatgctcacaacctggatgatgggatcattcataccacaaacctcagtatcacacaatatacccatgtaacaacctgcactctgcacatgtacccttagaatctaaaataaaagttgaaattatttttttaaaaaaaggatggcgctggtcatagaaaaagtcaaagtaaactaacagtgtcattttcaaatgttgctggaagcacaatattggccataaattagtgaggttaaaatagaagaatctggcattttatagtataaggaaaagctacaaacctcaaggttgttttatttaaaccaaataatctgagcaagacatatatacattaaaaacaaatgaacacattaaaatttcactattttacaatctaaattctagcaacatatacaaatactgagtgactacagtacatgccgaggtaagataagtacattctgggagaatatcactgacgctcaaaccatttttatttccaatatgtatttcaatacatgtttgtttccacttttcccagtgccacacacacacacamaaaaacaaaacaaaacaaaaaaaaacagtcacaagttggattacattagaattggtgccacagttractttaaaagcattttaataaccacccaactcttagattttgcagtttagggacttcaagttcagaaccaaaaagcagagaatcgtttcatgtgacatgatgtttctatagacctcttgctctctaggtgacaatgcagagccagggcaaaggtgtttaagctttgtcaccttccacagctttgtggccacattcatatttagataagctcggactctgctcccctcttctggagatggggagaggcaagtgtgtatgtgttgtcatacttactgcattaattcttcactcgaaccgtttacatcagcgaataaacccattgttcaatgcaaagtgcaaacagtgaaacatgaacttaaataaactggactagacccatcacatccaacaggatctatttagatttayagcatttaataaagtataagtcagaattcacaatatcttaaactgtgctgtttcctaagatcaagtaacagccaagtcagtgtaattttatgaaacctgtaatggccacatttgttgtgtctccgatgtatttctataattgcattaacaggaaaaaacttaatccaatataccagtgactttgagtcttaaatgttgcaagcaaaggataaaaattcaagggaattttgtcagatatggttactttcacattttcagttgttacttgattgtctccaaagccgtatatgtatcagacatataaatgtagtaaaaaaaaaaaaaaaaaatagaaaacctctactataaaaaccaatgaactaaaaagaagtataaagcagaaaaaccatttgaatcasgctcagctcttcatctggaaagtaaagtttatataaaagtagtaaaaac

SEQ ID NO: 2183 - DNA, 4674 bp, Homo sapiens
ccacaagcctcagtgtttacttctgccgcctgccagccgggcggggaaggggagtacccggccacccctcactttagctcctgcagctttccaaacaaaccagggcgggatgggagtgtcttcttggctgtggaaatcgatcctcctaccttgtcctgaagccacccgccgcctttcctcgtccctcccttcgcggtgattttccggtcccggcgcccggcgagggcgcgcggctggtgtccgccccgcccgaaaggtgagccagccatgagagggtatcttgtggccatattcctgagtgctgtcttcctctattatgtactgcattgcatattatggggaacgaatgtctattgggtggcacctgtggaaatgaaacggagaaataagatccagccttgtttatcaaagccagcttttgcctctctgctgaggtttcatcagtttcacccttttctgtgtgcrgctgattttagaaagattgcttccttgtatggtagcgataagtttgatttgccctatgggatgagaacatcagcggaatattttcgacttgctctttcaaaactgcagagttgtgatctctttgatgagtttgacaacataccctgtaaaaagtgtgtggtggttggtaatggaggagttttgaagaataagacattaggagaaaaaatcgactcctatgatgtaataataagaatgaataatggtcctgttttaggacatgaagaagaagttgggagaaggacaaccttccgacttttttatccagaatctgttttttcagatcctattcacaatgaccctaatacgacagtgattctcactgcttttaagccacatgatttaaggtggctgttggaattgttgatgggtgacaaaataaacactaatggtttttggaagaaaccagccttaaacctgatttataaaccttatcaaatccgaatattagatcctttcattatcagaacagcagcttatgaactgcttcattttccaaaagtgtttcccaaaaatcagaaacctaaacacccaacaacaggaattattgccatcacattggcgttttacatatgtcacgaagttcacctagctggttttaaatacaacttttctgacctcaagagtcctttgcactactatgggaatgccaccatgtctttgatgaataagaacgcgtatcacaatgtgactrcagagcagctctttttgaaggacattatagaaaaaaacctcgtaatcaacttgactcaagattgactctrcagactcagaagatgatgctaacagtgttagttttatttttgtactgcaatttttagtttaaaatatgttggatgcactcgtcaaataattatgtatactgtctgttgctgcctggtgattcataaccaccagcttaatttctgtgaatactgtatatttaacttatgaaaaccaagaaatgtaaagataacaggaaaataagttttgattgcawtgtttttaaaataagctagttttctgaggtgttttcacacgtctttttatagttacttcatcttagatttttgaagggatatgacttcctactaaggatttartttaccacaacaattctgactacaataagacattttgaggaggatatttggctactgtaaacatggctggtggaraatcacgattgtggcttgatgtggcaagccgaaaccacttggctctggaaatctaagttcatactggtttaattaagctctctcctgacaacccccagaattaaatgaaccatgattgtgaagagtaatttggtacaatgaaggcagtgtttgtttttaagttaaaggaaatgggctaaacataaagttcttattagataagtaaataactaaagaaagaatacaattactaaactctgatggctttgtattattttaaagaaatgaagtttaahtttatacartgaagctaagctaggcaagctcaagaaggaaaaaaaaatcttgaacattatttttttttgcctgacttacttattcattaaattttgaaggttttccacttgaagtaaattaggaaaggtaaagaagataacagaacaagtaaacacttaagaaaagtcaagctgaggccgggcagggtggctcacacctgtaatcctaacaaacactttgggaggccgagggaggcagctggattgcctgaactcaggagttcaagaccagcctggccaacatggtgaaacctcatctctactaaaatacaaaataattagctgggcgtggtggtatgcgctgtagtcccaggtactcgggaggctgaggcacgagaattgcttgagcccgggaggcagaggttgcagtgagccaagatcgcgccactgcacttcagcctgggtgacagagtgaggctgtcttctaaaaaatataaaaagtgaagttgggatttttggatttaaatggtacaaaaagaatatctcattttcccatgattaaagctaatcttcagatggaaagcttgcctggctacctagggtgcaccagagaatctgatccaatgcaagccagtcaatcctacaaatgtggtgagctagtcttccttcctatattttaataaatgtaaccaaaggccatctggaggtaggggaatgagaggtgaagaaacagaaaaatagaggttataaggatggaactaaaagttgtcagaagaggtatgasctgaagaaagaattactctcttttgaccaataaatacaattgggaaacactggaaaaccatggcttgattactgacaaccaacctgcctctctaaagagggtgtataaagggtgaaatacattagatttggctcagaaacagaatgcggtacttataaagcagaataaaggggagaacagtagtagttgatctaacccagattagacatgaataccagcatatgtttgcagagtcccacagttttgattcytcttataactttttgaggtgcaaaaggaaggtaccagaactggaatcacatgtaatcaatcagtgtgattttcccctcataccacacagccataggctgcagtgtggctgctgaagttcaattgatataaagtaaatcaggcttcaaaaagaatggtgctgtgggtacacaaggacataaagatgggaacgatagacactgaggactgcggcggggggagcgaggggagcggggagggcaagggctgaaagactatgtattgggtactatgctcacaacctggatgatgggatcattcataccacaaacctcagtatcacacaatatacccatgtaacaacctgcactctgcacatgtacccttagaatctaaaataaaagttgaaattatttttttaaaaaaaggatggcgctggtcatagaaaaagtcaaagtaaactaacagtgtcattttcaaatgttgctggaagcacaatattggccataaattagtgaggttaaaatagaagaatctggcattttatagtataaggaaaagctacaaacctcaaggttgttttatttaaaccaaataatctgagcaagacatatatacattaaaaacaaatgaacacattaaaatttcactattttacaatctaaattctagcaacatatacaaatactgagtgactacagtacatgccgaggtaagataagtacattctgggagaatatcactgacgctcaaaccatttttatttccaatatgtatttcaatacatgtttgtttccacttttcccagtgccacacacacacacamaaaaacaaaacaaaacaaaaaaaaacagtcacaagttggattacattagaattggtgccacagttractttaaaagcattttaataaccacccaactcttagattttgcagtttagggacttcaagttcagaaccaaaaagcagagaatcgtttcatgtgacatgatgtttctatagacctcttgctctctaggtgacaatgcagagccagggcaaaggtgtttaagctttgtcaccttccacagctttgtggccacattcatatttagataagctcggactctgctcccctcttctggagatggggagaggcaagtgtgtatgtgttgtcatacttactgcattaattcttcactcgaaccgtttacatcagcgaataaacccattgttcaatgcaaagtgcaaacagtgaaacatgaacttaaataaactggactagacccatcacatccaacaggatctatttagatttayagcatttaataaagtataagtcagaattcacaatatcttaaactgtgctgtttcctaagatcaagtaacagccaagtcagtgtaattttatgaaacctgtaatggccacatttgttgtgtctccgatgtatttctataattgcattaacaggaaaaaacttaatccaatataccagtgactttgagtcttaaatgttgcaagcaaaggataaaaattcaagggaattttgtcagatatggttactttcacattttcagttgttacttgattgtctccaaagccgtatatgtatcagacatataaatgtagtaaaaaaaaaaaaaaaaaatagaaaacctctactataaaaaccaatgaactaaaaagaagtataaagcagaaaaaccatttgaatcasgctcagctcttcatctggaaagtaaagtttatataaaagtagtaaaaac

SEQ ID NO: 2184 - DNA, 1859 bp, Homo sapiens
gcgcaggctgacggcgggcgggggtcgcctgctccagctcgggctcccgcgccagaaccgggtccagaaccttgattccggaagcgggcaacggggtggttggtgggcgcgcctgagggaagggacgtgaggagccggagtccgcggagttgccgcggagttgtccgcggagtccaggcgggtggggagcagagcagctggaaccccccgagcgccctgcagacgcagcagcctcttgaggggagggtctcccccacctcgggctggacaaagacagcttttccccacgtccctctgggttctctagagcaacagcaatacccgcccggcaggggtgtggcttagagccccgcacctcctcgccgcgcggcgggcctgacttctagccacsggtctccgcagttggcccagcgcttcgggccggtgttcacgctgtacgtgggctcgcagcgcatggtggtgatgcacggctacaaggcggtgaaggaagcgctgctggactacaaggacgagttctcgggcagaggcgacctccccgcgttccatgcgcacagggacaggggaatcatttttaataatggacctacctggaaggacatccggcggttttccctgaccaccctccggaactatgggatggggaaacagggcaatgagagccggatccagagggaggcccacttcctgctggaagcactcaggaagacccaaggccagcctttcgaccccaccttcctcatcggctgcgcgccctgcaacgtcatagccgacatcctcttccgcaagcattttgactacaatgatgagaagtttctaaggctgatgtatttgtttaatgagaacttccacctactcagcactccctggctccagctttacaataattttcccagctttctacactacttgcctggaagccacagaaaagtcataaaaaatgtggctgaagtaaaagagtatgtgtctgaaagggtgaaggagcaccatcaatctctggaccccaactgtccccgggacctcaccgactgcctgctcgtggaaatggagaaggaaaagcacagtgcagagcgcttgtacacaatggacggtatcaccgtgactgtggccgacctgttctttgcggggacagagaccaccagcacaactctgagatatgggctcctgattctcatgaaataccctgagatygaagagaagctccatgaagaaattgacagggtgattgggccaagccgaatccctgccatcaaggataggcaagagatgccctacatggatgctgtggtgcatgagattcagcggttcatcaccctcgtgccctccaacctgccccatgaagcaacccgagacaccattttcagaggatacctcatccccaagggcacagtcgtagtgccaactctggactctgttttgtatgacaaccaagaatttcctgatccagaaaagtttaagccagaacacttcctgaatgaaaatggaaagttyaagtacagtgactatttcaagccattttccacaggaaaacgagtgtgtgctggagaaggcctggctcgcatggagttgtttcttttgttgtgtgccattttgcagcattttaatttgaagcctctcgttgacccaaaggatatcgacctcagccctatacatattgggtttggctgtatcccaccacgttacaaactctgtgtcattccccgctcatgagtgtgtggaggacaccctgaaycccccgctttcaaacaagwtttcraattgyttgaggtcaggatttctcaaactgattcctttctttgcatatgagtatttgaaaataaatattttcccagaatataaataaatcatcacatgattatttt

SEQ ID NO: 2185 - DNA, 1670 bp, Homo sapiens
gtcctcccgggctggcagcagggccccagcggcaccatgtctgccctcggagtcaccgtggccctgctggtgtgggcggccttcctcctgctggtgtccatgtggaggcaggtgcacagcagctggaatctgcccccaggccctttcccgcttcccatcatcgggaacctcttccagttggaattgaagaatattcccaagtccttcacccggttggcccagcgcttcgggccggtgttcacgctgtacgtgggctcgcagcgcatggtggtgatgcacggctacaaggcggtgaaggaagcgctgctggactacaaggacgagttctcgggcagaggcgacctccccgcgttccatgcgcacagggacaggggaatcatttttaataatggacctacctggaaggacatccggcggttttccctgaccaccctccggaactatgggatggggaaacagggcaatgagagccggatccagagggaggcccacttcctgctggaagcactcaggaagacccaaggccagcctttcgaccccaccttcctcatcggctgcgcgccctgcaacgtcatagccgacatcctcttccgcaagcattttgactacaatgatgagaagtttctaaggctgatgtatttgtttaatgagaacttccacctactcagcactccctggctccagctttacaataattttcccagctttctacactacttgcctggaagccacagaaaagtcataaaaaatgtggctgaagtaaaagagtatgtgtctgaaagggtgaaggagcaccatcaatctctggaccccaactgtccccgggacctcaccgactgcctgctcgtggaaatggagaaggaaaagcacagtgcagagcgcttgtacacaatggacggtatcaccgtgactgtggccgacctgttctttgcggggacagagaccaccagcacaactctgagatatgggctcctgattctcatgaaataccctgagatygaagagaagctccatgaagaaattgacagggtgattgggccaagccgaatccctgccatcaaggataggcaagagatgccctacatggatgctgtggtgcatgagattcagcggttcatcaccctcgtgccctccaacctgccccatgaagcaacccgagacaccattttcagaggatacctcatccccaagggcacagtcgtagtgccaactctggactctgttttgtatgacaaccaagaatttcctgatccagaaaagtttaagccagaacacttcctgaatgaaaatggaaagttyaagtacagtgactatttcaagccattttccacaggaaaacgagtgtgtgctggagaaggcctggctcgcatggagttgtttcttttgttgtgtgccattttgcagcattttaatttgaagcctctcgttgacccaaaggatatcgacctcagccctatacatattgggtttggctgtatcccaccacgttacaaactctgtgtcattccccgctcatgagtgtgtggaggacaccctgaaycccccgctttcaaacaagwtttcraattgyttgaggtcaggatttctcaaactgattcctttctttgcatatgagtatttgaaaataaatattttcccagaatataaataaatcatcacatgattatttt

SEQ ID NO: 2186 - DNA, 1508 bp, Homo sapiens
gagatgctctccctgctcagtgggctggctttactggccatctccttcctgctcctgaaacttggcaccttctgctgggacaggagctgtcttcctcctggcccactccccttccccatccttggaaacctgtggcagctatrctttcagctgcacccagagacactgctccagctggcgcagagtgtgttcaccgtgtgggtgggcccgatccccgttgcggtgctgagtggcttccaggtggtgaaggaagcactggtctccaactcggagcagttctccggcaggtccctcaccccgytcttccaggacctgtttggagaacgaggcagggctgcccctcctgctggggagggggaggcggctagatggtcactacactcagggaggctgggcctaggcaagctggcgctggaggtgcagctgcagaaagaggcagcagagctggcagaagccttcygccaggagcagggtagacccttcgaccctcaggtatccattgtcaggtccacagtcagagtcatcggggcccttgtgtttggccaccacttcctcttagaggatcccatcttccaggaactgactcaagccatcgactttggcctggcmtttgtcagcactgtgtggcgccggctgtatgacgtgtttccctgggccctctgccacctcccaggaccccaccaggagatatttaggtaccaagaggtcgtgctgagcttaatccaccaggagatcascaggcacaaactcagggcacsggaggcccccagggacttcatcagctgctacctggcccagatctccaaggtgagcctggaacagctgctcaggaaaggaggggccatcttttygggctgcacctcgtttctgagcacctcctttctaagccatggtctcagtttctcatctttgactctatctacgagcttccaaagcacgctgaaaatgaaccctccccagacccacactaagccacctgcggagacggtgcagctggagctggacgaggtgctgggtgctgccccggttgtctgctatgaagaccgcaagcgactgccttacaccatgctgtcctccatgacgtgcagcgcctcagcagcgtcatggccatgggtgccgtgcgccagtgtgtgacctccacccgctccctgagccacaccagcatctctctgcagggcaccatcatcttacccaacctggcctctgtgctctatgaccctgagtgctgggagacccctcgacagttcaaccctggccacttctcggacaaggatggaaactttgtggccaatgaggccttcctgccattctctgcagggcatcgtgtctacccagcagaccagctggctcaaatggagctcttcctgatgtttgccaccctcctcaggacctttcggttccaactgccagaagggagcccggggctcaagctggagtacatctttggcggcacttggcaaccccagccccaggagatctgcgcagtgccccgcctgagcagccccagc

SEQ ID NO: 2187 - DNA, 1632 bp, Homo sapiens
ggcgggcggggggaggcggcgcagagcccggcaggcgccgccgttgcctccgcctccgcgcggtctccccggggccagctgggaccccgagggctggggcgggggcgggggcgcgggcgactgcggcggggcctggagggcgctggtcccagcccagggcggggtcccggggacgcccctcggccttagatccgcgagcggcagctcgggcctgggggcggggcctggcggagagcgacccgctcactctgcccgggctgatctcgcgagggccgcctggtctcgcggcgctggcctgtgggcggagcgagccctgaaaggctataggcgagggggcggctccgcggggccgggcgaggagtccagagagccatggccgccctgcgtgtcctgctgtcctgcgyycgcggcccgctgaggcccccggttcgctgtcccgcctggcgtcccttcgcctcgggtgctaactttgagtacatcatcgcagaaaaaagagggaagaataacaccgtggggttgatccaactgaaccgccccaaggccctcaatgcactttgcgatggcctgattgacgagctcaaccaggccctgaagaycttygaggaggacccrgccgtgggggccattgtcctcaccggcggggataaggcctttgcagctggagctgatatcaaggaaatgcagaacctgagtttccaggactgttactccagcaagttcttgaagcactgggaccacctcacccaggtcaagaagccagtcatcgctgctgtcaatggctatgcctttggcgggggctgtgagcttgccatgatgtgtgatatcatctatgccggtgagaaggcccagtttgcacagccggagatcttaataggaaccatcccaggtgcgggcggcacccagagactcacccgtgctgttgggaagtcgctggcgatggagatggtcctcacyggtgaccggatctcagcccaggacgccaagcaagcaggtcttgtcagcaagatttgtcctgttgagacactggtggaagaagccatccagtgtgcagaaaaaattgccagcaattctaaaattgtagtagcgatggccaaagaatcagtgaatgcagcttttgaaatgacattaacagaaggaagtaagttggagaagaaactcttttattcaacctttgccactgatgaccggaaagaagggatgaccgcgtttgtggaaaagagaaaggccaacttcaaagaccagtgagaaccagctgcccctgcttcacacctctgcttggagaggacaagtgcagcctgtcagttttagaagcaagtaaatcatcctcttttcaagagcagtgtccgtggtgtgyagytyctctccaattgctgcrtggtcgtggcccgacctctcacggcatgacagccttcgtcacccagcctgtgagggtcctgactggagcaccttctaaatctaagattctkctgaggagcccccgctggtccctctgggcatgctgtgctcggacggaaagcggggcctgygggtccttgtgtccctgccgctgaagaatggggctgctytgagggaaacgctgtctgctgccttcatacagatgctgattaaagtgatagcgattcagattacacc

SEQ ID NO: 2188 - DNA, 4793 bp, Homo sapiens
ccgcggatggatgctgcgggaaggggctgccatttgctgcccctgccagcggcgcgcggacctgcccgcgctcctgcagccgccgccgccgccgccgccagcccgcccggcccctgcagcggcgccgcctgcgctccctccgcggccgccggagcgggcgccatgaaccccagctcctcggcgggagaggagaaaggggcgacgggcggcagcagcagcagcggaagcggcgccgggagctgctgcctgggcgccgagggcggcgcggacccgcggggcgcagggtcagccgcggcggcgggggccgctgccctggacgagcccgcggccgccggccagaaggagaaggacgaagcgctggaggagaagctgaggaacttaactttccggaagcaggtctcgtacaggaaagcaatctcccgggcaggcctccagcatctggctcctgcacatcccctcagccttcctgtggcaaatggtccagccaaggagcccagagcgactttggactggagtgagaatgccgtgaatggagaacacctgtggctggagaccaacgtctcgggagacctctgctaccttggagaggagaactgccaagtcagatttgcaaaatcagctctcaggaggaagtgtgcagtctgtaaaatcgtcrtccacaccgcctgcattgagcagctagaaaagattaatttcagatgtaaaccaacwtttcgagaaggaggctcaaggtcaccaagagaaaattttgtacgtcatcactgggtgcacaggcgtcggcaggaggggaaatgtaagcagtgtggtaagggcttccagcaaaagttctccttccacagtaaagagattgtggctatcagctgttcctggtgcaagcaggcgtttcacaataaggtgacctgcttcatgctgcatcacattgaagaaccctgctccctgggggctcatgctgctgttattgtcccgcccacttggatcattaaggtgaagaaacctcagaactccctgaaggcttcaaatcggaagaagaagagaacaagctttaaaagaaaagccagtaaaagagggatggaacaggaaaacaaaggtcgtccttttgtgataaaacccatctcttctcctctcatgaaacccttgcttgtatttgtgaatcccaagagtggaggcaaccagggaaccaaagtcctgcagatgttcatgtggtacctgaatccacggcaagtctttgatctttctcaggaagggccaaaagatgcgcttgaattgtataggaaagtaccaaatctgcgaattctggcctgtggtggggatggaacggtgggctggatcctttccatcctggatgaactgcagctgagccctcagcctcctgtgggggtccttcctctggggactgggaatgacctggctcgaactctcaactggggagggggctacactgatgaacctgtttctaagatcctgtgtcaagtggaagatgggacagttgtacagctagatcgctggaacctccatgtggaaagaaaccccgacttgcctccagaagaacttgaagatggcgtatgtaagctccctctgaatgttttcaataactacttcagccttggatttgatgcccatgtcacactggagttccatgaatccagagaagcaaatccagagaaattcaacagtcgttttcgaaataaaatgttctatgcaggggtagctttttctgacttcctacagagaagttctagagatctatccaaacatgttaaagttgtttgtgatggaacagatctcaccccaaagattcaggaactgaagttccagtgtatagtatttttaaatatacccagatattgtgctggcacaatgccctggggaaacccaggwgatcaccatgatttcgaacctcagcgtcatgatgatggttatattgaagtcattggatttaccatggcctctttggcagccctgcaagttgggggccatggagagaggctacaccagtgtcgagaagtcatgcttctaacttacaaatccatccccatgcaagtggatggggagccctgtaggttggccccagctatgattcggatctccctgaggaatcaggccaacatggtacagaagagcaagaggagaacatccatgcctttactcaatgatccccagtctgtcccagatcgtctgaggatccgggtgaacaaaatcagtttacaagactatgaaggattccactatgacaaggagaaactccgagaagcttctatttcagactggttaagaaccattgctggggaactagtgcagtcatttggagcgatacctctgggtattctagttgtgcgtggagactgtgatttggagacttgccgtatgtacatagaccgcctacaggaggacctacagtcagtttcttctggctcccagagagttcattaccaggaccatgaaacctccttccccagggctctctcagcacagaggctctctcctcggtggtgcttcctagatgacttcttgttcttcyttaggaacatttgcactttgtgatggagatttcccaagatgagatttttattctggacccagatatggtggtgtcacagccggcggggacrcctccgggcatgcctgacctggtggtggarcaagcctcggggatctcagactggtggaatcctgccctgcggaaacgcatgctgagtgacagtgggctggggatgatagctccctattatgaggactcagatctgaaagatctcagccactcccgcgtgctacagtcaccagtctcttcagargatcatgcaattttgcaggcagtaatagctggtgatcttatgaagctaatagaaagctataaaaatggaggcagtctgctaattcagggaccagaccactgttcactccttcactacgcagctaaaaccggcaacggggagatygtgaaatatatccttgaccacggaccttccgagttattggatatggcagacagtgaaacgggtgagactgcactgcacaaggctgcctgccagcggaaccgggctgtgtgccagcttctggtggatgcaggagcatctctgagaaagacggactccaagggtaagacacctcaagaaagagcacagcaggctggggacccagacttggctgcttacctagaaagccgtcagaactataaggtcattggccatgaggacctggaaactgctgtttgaccctggtattcgggcaaagaggacatgagcaagcgtatcacatctgccctccctgcaattgggcagctcccctggaagaagctgatggaattcatatatctgtctctctcctgcaagawtctacctgagaccatgccactagcttttaagggctaccaagatgtacaacagaacatgatagcccattgagaaggaggcaggatacctggagatttgtggaatacagtacgagttccacaaaatttgatccttattgcttccagcaagtagcatgaacttctgtgttcacctgtataatttattttaaagattcaaaggatgttcgtataaatggcactgctccatcctccccctatgcattggtttttttccctgtaccatacaattctactgtaactacccatcaacttaaagaaaaatattatctcttctctttacattcagtcttggaagaccacaagattgtctgaaggccttctaaaaccttctgaatgtcctgcagaaatataactgtaaaaccacttccatttctaagactaaatatatcaagactatttagtgactctctctgcatgtccccctcacccgccaaccctccgtttcattatataggagctgggaagtgccacatggataatgtcaacttgtgtgctatatctctgaggaatggtgaggtggcatgggagatgtctgtgcttggaggtacctcagagaggtaacccaggggtcagcccaggctgctgggctgtagccaatagccatgcaggactggttcagcttgggctgtctgtacagctccgtactgcctatgtgtagccatctttgccttttgctgcaatagaagatgagcaaaggattaaacagaggcccacagctagtttgcagaaccactcaattttaagtgctgtttaaattgcagagcaaataatcctgtgtgggaactgtggttacaggaaatggagcactctaacaatgtttacttctaaactttgttgaatgataatagaaagcaccctaattgacttggaaaaaaaaaacagcaaaagcaaaagtagcaacatatgtcaacatatgtcactgaaataggaaacagtcattggaatgttgcacagaggctaatarctatrgactgttggatacagtggtgagaggagccccattttaggtctttcttttaggtttttggttttcattactccaagtaryccttgacccaagaacaaaggcttgttgtatgagttccactgccagatttatgggatgcctggatcattcagaaggatgcttcaactattatttgtcaggtccaaaggtcgtacttrataaccccattttctatgtatggggtagtctaatatattattttatctactttatttttcccttttcagaaagtccttagtgcaaaccaccattggaatctagccagaaatgtctgtcagatagttagaattgtaacatctaaacctgccacggatcgaatggtacttacaggtacctctcttagggactctgtgatccctaaaatatcagaagaaaatgtctgtctttctgtccaaatatctacttgacttgggggta

SEQ ID NO: 2189 - DNA, 4785 bp, Homo sapiens
ccgcggatggatgctgcgggaaggggctgccatttgctgcccctgccagcggcgcgcggacctgcccgcgctcctgcagccgccgccgccgccgccgccagcccgcccggcccctgcagcggcgccgcctgcgctccctccgcggccgccggagcgggcgccatgaaccccagctcctcggcgggagaggagaaaggggcgacgggcggcagcagcagcagcggaagcggcgccgggagctgctgcctgggcgccgagggcggcgcggacccgcggggcgcagggtcagccgcggcggcgggggccgctgccctggacgagcccgcggccgccggccagaaggagaaggacgaagcgctggaggagaagctgaggaacttaactttccggaagcaggtctcgtacaggaaagcaatctcccgggcaggcctccagcatctggctcctgcacatcccctcagccttcctgtggcaaatggtccagccaaggagcccagagcgactttggactggagtgagaatgccgtgaatggagaacacctgtggctggagaccaacgtctcgggagacctctgctaccttggagaggagaactgccaagtcagatttgcaaaatcagctctcaggaggaagtgtgcagtctgtaaaatcgtcrtccacaccgcctgcattgagcagctagaaaagattaatttcagatgtaaaccaacwtttcgagaaggaggctcaaggtcaccaagagaaaattttgtacgtcatcactgggtgcacaggcgtcggcaggaggggaaatgtaagcagtgtggtaagggcttccagcaaaagttctccttccacagtaaagagattgtggctatcagctgttcctggtgcaagcaggcgtttcacaataaggtgacctgcttcatgctgcatcacattgaagaaccctgctccctgggggctcatgctgctgttattgtcccgcccacttggatcattaaggtgaagaaacctcagaactccctgaaggcttcaaatcggaagaagaagagaacaagctttaaaagaaaagccagtaaaagagggatggaacaggaaaacaaaggtcgtccttttgtgataaaacccatctcttctcctctcatgaaacccttgcttgtatttgtgaatcccaagagtggaggcaaccagggaaccaaagtcctgcagatgttcatgtggtacctgaatccacggcaagtctttgatctttctcaggaagggccaaaagatgcgcttgaattgtataggaaagtaccaaatctgcgaattctggcctgtggtggggatggaacggtgggctggatcctttccatcctggatgaactgcagctgagccctcagcctcctgtgggggtccttcctctggggactgggaatgacctggctcgaactctcaactggggagggggctacactgatgaacctgtttctaagatcctgtgtcaagtggaagatgggacagttgtacagctagatcgctggaacctccatgtggaaagaaaccccgacttgcctccagaagaacttgaagatggcgtatgtaagctccctctgaatgttttcaataactacttcagccttggatttgatgcccatgtcacactggagttccatgaatccagagaagcaaatccagagaaattcaacagtcgttttcgaaataaaatgttctatgcaggggcagctttttctgacttcctacagagaagttctagagatctatccaaacatgttaaagttgtttgtgatggaacagatctcaccccaaagattcaggaactgaagttccagtgtatagtatttttaaatatacccagatattgtgctggcacaatgccctggggaaacccaggwgatcaccatgatttcgaacctcagcgtcatgatgatggttatattgaagtcattggatttaccatggcctctttggcagccctgcaagttgggggccatggagagaggctacaccagtgtcgagaagtcatgcttctaacttacaaatccatccccatgcaagtggatggggagccctgtaggttggccccagctatgattcggatctccctgaggaatcaggccaacatggtacagaagagcaagaggagaacatccatgcctttactcaatgatccccagtctgtcccagatcgtctgaggatccgggtgaacaaaatcagtttacaagactatgaaggattccactatgacaaggagaaactccgagaagcttctatttcagactggttaagaaccattgctggggaactagtgcagtcatttggagcgatacctctgggtattctagttgtgcgtggagactgtgatttggagacttgccgtatgtacatagaccgcctacaggaggacctacagtcagtttcttctggctcccagagagttcattaccaggaccatgaaacctccttccccagggctctctcagcacagaggctctctcctcggtggtgcttcctagatgttcttcyttaggaacatttgcactttgtgatggagatttcccaagatgagatttttattctggacccagatatggtggtgtcacagccggcggggacrcctccgggcatgcctgacctggtggtggarcaagcctcggggatctcagactggtggaatcctgccctgcggaaacgcatgctgagtgacagtgggctggggatgatagctccctattatgaggactcagatctgaaagatctcagccactcccgcgtgctacagtcaccagtctcttcagargatcatgcaattttgcaggcagtaatagctggtgatcttatgaagctaatagaaagctataaaaatggaggcagtctgctaattcagggaccagaccactgttcactccttcactacgcagctaaaaccggcaacggggagatygtgaaatatatccttgaccacggaccttccgagttattggatatggcagacagtgaaacgggtgagactgcactgcacaaggctgcctgccagcggaaccgggctgtgtgccagcttctggtggatgcaggagcatctctgagaaagacggactccaagggtaagacacctcaagaaagagcacagcaggctggggacccagacttggctgcttacctagaaagccgtcagaactataaggtcattggccatgaggacctggaaactgctgtttgaccctggtattcgggcaaagaggacatgagcaagcgtatcacatctgccctccctgcaattgggcagctcccctggaagaagctgatggaattcatatatctgtctctctcctgcaagawtctacctgagaccatgccactagcttttaagggctaccaagatgtacaacagaacatgatagcccattgagaaggaggcaggatacctggagatttgtggaatacagtacgagttccacaaaatttgatccttattgcttccagcaagtagcatgaacttctgtgttcacctgtataatttattttaaagattcaaaggatgttcgtataaatggcactgctccatcctccccctatgcattggtttttttccctgtaccatacaattctactgtaactacccatcaacttaaagaaaaatattatctcttctctttacattcagtcttggaagaccacaagattgtctgaaggccttctaaaaccttctgaatgtcctgcagaaatataactgtaaaaccacttccatttctaagactaaatatatcaagactatttagtgactctctctgcatgtccccctcacccgccaaccctccgtttcattatataggagctgggaagtgccacatggataatgtcaacttgtgtgctatatctctgaggaatggtgaggtggcatgggagatgtctgtgcttggaggtacctcagagaggtaacccaggggtcagcccaggctgctgggctgtagccaatagccatgcaggactggttcagcttgggctgtctgtacagctccgtactgcctatgtgtagccatctttgccttttgctgcaatagaagatgagcaaaggattaaacagaggcccacagctagtttgcagaaccactcaattttaagtgctgtttaaattgcagagcaaataatcctgtgtgggaactgtggttacaggaaatggagcactctaacaatgtttacttctaaactttgttgaatgataatagaaagcaccctaattgacttggaaaaaaaaaacagcaaaagcaaaagtagcaacatatgtcaacatatgtcactgaaataggaaacagtcattggaatgttgcacagaggctaatarctatrgactgttggatacagtggtgagaggagccccattttaggtctttcttttaggtttttggttttcattactccaagtaryccttgacccaagaacaaaggcttgttgtatgagttccactgccagatttatgggatgcctggatcattcagaaggatgcttcaactattatttgtcaggtccaaaggtcgtacttrataaccccattttctatgtatggggtagtctaatatattattttatctactttatttttcccttttcagaaagtccttagtgcaaaccaccattggaatctagccagaaatgtctgtcagatagttagaattgtaacatctaaacctgccacggatcgaatggtacttacaggtacctctcttagggactctgtgatccctaaaatatcagaagaaaatgtctgtctttctgtccaaatatctacttgacttgggggta

SEQ ID NO: 2190 - DNA, 2133 bp, Homo sapiens
ccgcggatggatgctgcgggaaggggctgccatttgctgcccctgccagcggcgcgcggacctgcccgcgctcctgcagccgccgccgccgccgccgccagcccgcccggcccctgcagcggcgccgcctgcgctccctccgcggccgccggagcgggcgccatgaaccccagctcctcggcgggagaggagaaaggggcgacgggcggcagcagcagcagcggaagcggcgccgggagctgctgcctgggcgccgagggcggcgcggacccgcggggcgcagggtcagccgcggcggcgggggccgctgccctggacgagcccgcggccgccggccagaaggagaaggacgaagcgctggaggagaagctgaggaacttaactttccggaagcaggtctcgtacaggaaagcaatctcccgggcaggcctccagcatctggctcctgcacatcccctcagccttcctgtggcaaatggtccagccaaggagcccagagcgactttggactggagtgagaatgccgtgaatggagaacacctgtggctggagaccaacgtctcgggagacctctgctaccttggagaggagaactgccaagtcagatttgcaaaatcagctctcaggaggaagtgtgcagtctgtaaaatcgtcrtccacaccgcctgcattgagcagctagaaaagattaatttcagatgtaaaccaacwtttcgagaaggaggctcaaggtcaccaagagaaaattttgtacgtcatcactgggtgcacaggcgtcggcaggaggggaaatgtaagcagtgtggtaagggcttccagcaaaagttctccttccacagtaaagagattgtggctatcagctgttcctggtgcaagcaggcgtttcacaataaggtgacctgcttcatgctgcatcacattgaagaaccctgctccctgggggctcatgctgctgttattgtcccgcccacttggatcattaaggtgaagaaacctcagaactccctgaaggcttcaaatcggaagaagaagagaacaagctttaaaagaaaagccagtaaaagagggatggaacaggaaaacaaaggtcgtccttttgtgataaaacccatctcttctcctctcatgaaacccttgcttgtatttgtgaatcccaagagtggaggcaaccagggaaccaaagtcctgcagatgttcatgtggtacctgaatccacggcaagtctttgatctttctcaggaagggccaaaagatgcgcttgaattgtataggaaagtaccaaatctgcgaattctggcctgtggtggggatggaacgaatgaaaatattgctcaaaatgcmcttggtaaacattcagtgacaactaatgctaaaaacggacagatggtggcagcattgaccagctgctgctgtgcatggctgctcagggacaaagcggaggacctggtgggctggatcctttccatcctggatgaactgcagctgagccctcagcctcctgtgggggtccttcctctggggactgggaatgacctggctcgaactctcaactggggagggcaatggatatgttctctgattcctcagggctacactgatgaacctgtttctaagatcctgtgtcaagtggaagatgggacagttgtacagctagatcgctggaacctccatgtggaaagaaaccccgacttgcctccagaagaacttgaagatggcgtatgtaagctccctctgaatgttttcaataactacttcagccttggatttgatgcccatgtcacactggagttccatgaatccagagaagcaaatccagagaaattcaacagtcgttttcgaaataaaatgttctatgcagggtgtgatggaacagatctcaccccaaagattcaggaactgaagttccagtgtatagtatttttaaatatacccagatattgtgctggcacaatgccctggggaaacccaggwgatcaccatgatttcgaacctcagcgtcatgatgatggttatattgaagtcattggatttaccatggcctctttgctcaagcagctgacaagtgaagcacagcatcggctctcccttgcttcttttgtaccaccaagccattgcacgtgtgctctctctctc

SEQ ID NO: 2191 - DNA, 4576 bp, Homo sapiens
acggtgaaacccggtctctactaaaaatacaaaaaaattagccaggcgcgatggcaggcgcctgtggtcccagccactcggggggctgaggcaggagaatggtgtgaacccgggaggtggagcttgcagtgagccgagatcgcaccactgcagtccagcctgggcgaaagagcgagactctgtctcaaaaaaaaaaaacaggaaagcaatctcccgggcaggcctccagcatctggctcctgcacatcccctcagccttcctgtggcaaatggtccagccaaggagcccagagcgactttggactggagtgagaatgccgtgaatggagaacacctgtggctggagaccaacgtctcgggagacctctgctaccttggagaggagaactgccaagtcagatttgcaaaatcagctctcaggaggaagtgtgcagtctgtaaaatcgtcrtccacaccgcctgcattgagcagctagaaaagattaatttcagatgtaaaccaacwtttcgagaaggaggctcaaggtcaccaagagaaaattttgtacgtcatcactgggtgcacaggcgtcggcaggaggggaaatgtaagcagtgtggtaagggcttccagcaaaagttctccttccacagtaaagagattgtggctatcagctgttcctggtgcaagcaggcgtttcacaataaggtgacctgcttcatgctgcatcacattgaagaaccctgctccctgggggctcatgctgctgttattgtcccgcccacttggatcattaaggtgaagaaacctcagaactccctgaaggcttcaaatcggaagaagaagagaacaagctttaaaagaaaagccagtaaaagagggatggaacaggaaaacaaaggtcgtccttttgtgataaaacccatctcttctcctctcatgaaacccttgcttgtatttgtgaatcccaagagtggaggcaaccagggaaccaaagtcctgcagatgttcatgtggtacctgaatccacggcaagtctttgatctttctcaggaagggccaaaagatgcgcttgaattgtataggaaagtaccaaatctgcgaattctggcctgtggtggggatggaacggtgggctggatcctttccatcctggatgaactgcagctgagccctcagcctcctgtgggggtccttcctctggggactgggaatgacctggctcgaactctcaactggggagggggctacactgatgaacctgtttctaagatcctgtgtcaagtggaagatgggacagttgtacagctagatcgctggaacctccatgtggaaagaaaccccgacttgcctccagaagaacttgaagatggcgtatgtaagctccctctgaatgttttcaataactacttcagccttggatttgatgcccatgtcacactggagttccatgaatccagagaagcaaatccagagaaattcaacagtcgttttcgaaataaaatgttctatgcaggggcagctttttctgacttcctacagagaagttctagagatctatccaaacatgttaaagttgtttgtgatggaacagatctcaccccaaagattcaggaactgaagttccagtgtatagtatttttaaatatacccagatattgtgctggcacaatgccctggggaaacccaggwgatcaccatgatttcgaacctcagcgtcatgatgatggttatattgaagtcattggatttaccatggcctctttggcagccctgcaagttgggggccatggagagaggctacaccagtgtcgagaagtcatgcttctaacttacaaatccatccccatgcaagtggatggggagccctgtaggttggccccagctatgattcggatctccctgaggaatcaggccaacatggtacagaagagcaagaggagaacatccatgcctttactcaatgatccccagtctgtcccagatcgtctgaggatccgggtgaacaaaatcagtttacaagactatgaaggattccactatgacaaggagaaactccgagaagcttctatttcagactggttaagaaccattgctggggaactagtgcagtcatttggagcgatacctctgggtattctagttgtgcgtggagactgtgatttggagacttgccgtatgtacatagaccgcctacaggaggacctacagtcagtttcttctggctcccagagagttcattaccaggaccatgaaacctccttccccagggctctctcagcacagaggctctctcctcggtggtgcttcctagatggtgagttggaacatttgcactttgtgatggagatttcccaagatgagatttttattctggacccagatatggtggtgtcacagccggcggggacrcctccgggcatgcctgacctggtggtggarcaagcctcggggatctcagactggtggaatcctgccctgcggaaacgcatgctgagtgacagtgggctggggatgatagctccctattatgaggactcagatctgaaagatctcagccactcccgcgtgctacagtcaccagtctcttcagargatcatgcaattttgcaggcagtaatagctggtgatcttatgaagctaatagaaagctataaaaatggaggcagtctgctaattcagggaccagaccactgttcactccttcactacgcagctaaaaccggcaacggggagatygtgaaatatatccttgaccacggaccttccgagttattggatatggcagacagtgaaacgggtgagactgcactgcacaaggctgcctgccagcggaaccgggctgtgtgccagcttctggtggatgcaggagcatctctgagaaagacggactccaagggtaagacacctcaagaaagagcacagcaggctggggacccagacttggctgcttacctagaaagccgtcagaactataaggtcattggccatgaggacctggaaactgctgtttgaccctggtattcgggcaaagaggacatgagcaagcgtatcacatctgccctccctgcaattgggcagctcccctggaagaagctgatggaattcatatatctgtctctctcctgcaagawtctacctgagaccatgccactagcttttaagggctaccaagatgtacaacagaacatgatagcccattgagaaggaggcaggatacctggagatttgtggaatacagtacgagttccacaaaatttgatccttattgcttccagcaagtagcatgaacttctgtgttcacctgtataatttattttaaagattcaaaggatgttcgtataaatggcactgctccatcctccccctatgcattggtttttttccctgtaccatacaattctactgtaactacccatcaacttaaagaaaaatattatctcttctctttacattcagtcttggaagaccacaagattgtctgaaggccttctaaaaccttctgaatgtcctgcagaaatataactgtaaaaccacttccatttctaagactaaatatatcaagactatttagtgactctctctgcatgtccccctcacccgccaaccctccgtttcattatataggagctgggaagtgccacatggataatgtcaacttgtgtgctatatctctgaggaatggtgaggtggcatgggagatgtctgtgcttggaggtacctcagagaggtaacccaggggtcagcccaggctgctgggctgtagccaatagccatgcaggactggttcagcttgggctgtctgtacagctccgtactgcctatgtgtagccatctttgccttttgctgcaatagaagatgagcaaaggattaaacagaggcccacagctagtttgcagaaccactcaattttaagtgctgtttaaattgcagagcaaataatcctgtgtgggaactgtggttacaggaaatggagcactctaacaatgtttacttctaaactttgttgaatgataatagaaagcaccctaattgacttggaaaaaaaaaacagcaaaagcaaaagtagcaacatatgtcaacatatgtcactgaaataggaaacagtcattggaatgttgcacagaggctaatarctatrgactgttggatacagtggtgagaggagccccattttaggtctttcttttaggtttttggttttcattactccaagtaryccttgacccaagaacaaaggcttgttgtatgagttccactgccagatttatgggatgcctggatcattcagaaggatgcttcaactattatttgtcaggtccaaaggtcgtacttrataaccccattttctatgtatggggtagtctaatatattattttatctactttatttttcccttttcagaaagtccttagtgcaaaccaccattggaatctagccagaaatgtctgtcagatagttagaattgtaacatctaaacctgccacggatcgaatggtacttacaggtacctctcttagggactctgtgatccctaaaatatcagaagaaaatgtctgtctttctgtccaaatatctacttgacttgggggta

SEQ ID NO: 2192 - DNA, 2260 bp, Homo sapiens
ggggctttggcagctgagcagttccgctcagggttccgtcgcttaaaaagtggcaaaatgccgtttgtaagtaaccggacgcaccacttggacttctgagtagaggaaaaacgcattgagactcagctgtccgagcggaaggagcgggagcccaactggaaactcctctcgccattcattgcccctaggcttccgctttgcttccttcagcgtccacccagttcctcctcccgccaatgagagctgaggaagttgaagcccccgcccgacgtgcgtcaggcgctttagtggtacgcacgagaacgcctgcgcaaacgcgcgcgggaggcgggcctggccaacttctgaacaggaagcagttcgctcgcgcctaggttggcgcgggctgggaggtgttccarccctttaagatgttgcgcgtggtgagctggaacatcaatgggattcggagacccctgcaaggggtggcaaatcaggaacccagcaactgtgccgccgtggmcgtggggcgcattttggacgagctggatgcggatatcgtctgtctccaggaaaccaaagtgamcagggatgcactgacagagcccctggctatcgttgagggttataactcctatttcagcttcagccgcaaccgtagcggctattctgcacatgggaaggtaaggagaagaccttgaccctaatcaacgtgtactgcccccatgcggaccctgggaggcctgagcggctagtctttaagatgcgcttctatcgtttgctgcaaatccgagcagaagccctcctggcggcaggcagccatgtgatcattctgggtgacctgaatacagcccaccgccccattgaccactgggatgcagtcaacctggaatgctttgaagaggacccagggcgcaagtggatggacagcttgctcagtaacttggggtgccagtctgcctctcatgtagggcccttcatcgatagctaccgctgcttccaaccaaagcaggagggggccttcacctgctggtcagcagtcactggcgcccgccatctcaactatggctcccggcttgactatgtgctgggggacaggaccctggtcatagacacctttcaggcctctttcctgctgcctgaggtgatgggctctgaccactgccctgtgggtgcrgtcttgagtgtgtcctctgtgcctgcaaaacagtgcccacctctgtgcacccgcttcctccctgagttygcaggcacccagctcaagatccttcgcttcctagttcctctcgaacaaagtcctgtgttggagcagtcgacgctgcagcacaacaatcaaacccgggtacagacatgccaaaacaaagcccaagtgcgctcaaccaggcctcagcccagtcaggttggctctagcagaggccagaaaaacctgaagagctactttcagccytcccctagctgtccccaagcctctcctgacatagagctgcctagcctaccactgatgagcgccctcatgaccccgaagacyccagaagagaaggcagtggccaaagtggtgaaggggcaggccaagacttcagaagccaaagatgagaaggagttacggacctcattctggaagtctgtgctggcggggcccttgcgcacacccctctgtgggggccacagggagccatgtgtgatgcgtactgtgaagaagccaggacccaacttgggccgccgcttctacatgtgtgccaggccccggggtcctcccactgacccctcctcccggtgcaacttcttcctctggagcaggcccagctgaaccaatggaggcctggggacatctggcatggtcacccctgcacatgatctgaggmcagctccccttccctgagctgcctcctgcttctccctcaaagtctcctacccttctcttcctcttttaagccctctcttcctcgctttccttcctacctagctccttgttggtgagcttcttgtgccttaatcctgtgacccagccccttacaccactttccaccttcctgtccgaagtacacggacactagctgccccaggaagttgtgtgattttaaatcacttctgtctttgctggaaagtgtatttgtgcataaataaagtctgtgtatttgtttcagggttgcactttggacattgtggaggtactccataaagttgagtcagagaagctatctcaatacttggtttgccggctggctgtagcccaatgatgtaattcccagagaaaggggaggagggaggggggaggagggaa

SEQ ID NO: 2193 - DNA, 2043 bp, Homo sapiens
ggggctttggcagctgagcagttccgctcagggttccgtcgcttaaaaagtggcaaaatgccgtttgtaagtaaccggacgcaccacttggacttctgagtagaggaaaaacgcattgagactcagctgtccgagcggaaggagcgggagcccaactggaaactcctctcgccattcattgcccctaggcttccgctttgcttccttcagcgtccacccagttcctcctcccgccaatgagagctgaggaagttgaagcccccgcccgacgtgcgtcaggcgctttagtggtacgcacgagaacgcctgcgcaaacgcgcgcgggaggcgggcctggccaacttctgaacaggaagcagttcgctcgcgcctaggttggcgcgggctgggaggtgttccarccctttaagatgttgcgcgtggtgagctggaacatcaatgggattcggagacccctgcaaggggtggcaaatcaggaacccagcaactgtgccgccgtggmcgtggggcgcattttggacgagctggatgcggatatcgtctgtctccaggaaaccaaagtgamcagggatgcactgacagagcccctggctatcgttgagggttataactcctatttcagcttcagccgcaaccgtagcggctattctggaatgctttgaagaggacccagggcgcaagtggatggacagcttgctcagtaacttggggtgccagtctgcctctcatgtagggcccttcatcgatagctaccgctgcttccaaccaaagcaggagggggccttcacctgctggtcagcagtcactggcgcccgccatctcaactatggctcccggcttgactatgtgctgggggacaggaccctggtcatagacacctttcaggcctctttcctgctgcctgaggtgatgggctctgaccactgccctgtgggtgcrgtcttgagtgtgtcctctgtgcctgcaaaacagtgcccacctctgtgcacccgcttcctccctgagttygcaggcacccagctcaagatccttcgcttcctagttcctctcgaacaaagtcctgtgttggagcagtcgacgctgcagcacaacaatcaaacccgggtacagacatgccaaaacaaagcccaagtgcgctcaaccaggcctcagcccagtcaggttggctctagcagaggccagaaaaacctgaagagctactttcagccytcccctagctgtccccaagcctctcctgacatagagctgcctagcctaccactgatgagcgccctcatgaccccgaagacyccagaagagaaggcagtggccaaagtggtgaaggggcaggccaagacttcagaagccaaagatgagaaggagttacggacctcattctggaagtctgtgctggcggggcccttgcgcacacccctctgtgggggccacagggagccatgtgtgatgcgtactgtgaagaagccaggacccaacttgggccgccgcttctacatgtgtgccaggccccggggtcctcccactgacccctcctcccggtgcaacttcttcctctggagcaggcccagctgaaccaatggaggcctggggacatctggcatggtcacccctgcacatgatctgaggmcagctccccttccctgagctgcctcctgcttctccctcaaagtctcctacccttctcttcctcttttaagccctctcttcctcgctttccttcctacctagctccttgttggtgagcttcttgtgccttaatcctgtgacccagccccttacaccactttccaccttcctgtccgaagtacacggacactagctgccccaggaagttgtgtgattttaaatcacttctgtctttgctggaaagtgtatttgtgcataaataaagtctgtgtatttgtttcagggttgcactttggacattgtggaggtactccataaagttgagtcagagaagctatctcaatacttggtttgccggctggctgtagcccaatgatgtaattcccagagaaaggggaggagggaggggggaggagggaa

SEQ ID NO: 2194 - DNA, 2441 bp, Homo sapiens
ggggctttggcagctgagcagttccgctcagggttccgtcgcttaaaaagtggcaaaatgccgtttgtaagtaaccggacgcaccacttggacttctgagtagaggaaaaacgcattgagactcagctgtccgagcggaaggagcgggagcccaactggaaactcctctcgccattcattgcccctaggcttccgctttgcttccttcagcgtccacccagttcctcctcccgccaatgagagctgaggaagttgaagcccccgcccgacgtgcgtcaggcgctttagtggtacgcacgagaacgcctgcgcaaacgcgcgcgggaggcgggcctggccaacttctgaacaggaagcagttcgctcgcgcctaggttggcgcgggctgggaggtgttccarccctttaagatgttgcgcgtggtgagctggaacatcaatgggattcggagacccctgcaaggggtggcaaatcaggaacccagcaactgtgccgccgtggmcgtggggcgcattttggacgagctggatgcggatatcgtctgtctccaggaaaccaaagtgamcagggatgcactgacagagcccctggctatcgttgagggttataactcctatttcagcttcagccgcaaccgtagcggctattctggtgtagccaccttctgtaaggacaatgctaccccagtggctgctgaagaaggcctgagtggcctgtttgccacccagaatggggatgttggttgctatggaaacatggatgagtttacccaagaggaactccgggctctggatagtgagggcagggccctcctcacrcagcataagatcygcacatgggaaggtaaggagaagaccttgaccctaatcaacgtgtactgcccccatgcggaccctgggaggcctgagcggctagtctttaagatgcgcttctatcgtttgctgcaaatccgagcagaagccctcctggcggcaggcagccatgtgatcattctgggtgacctgaatacagcccaccgccccattgaccactgggatgcagtcaacctggaatgctttgaagaggacccagggcgcaagtggatggacagcttgctcagtaacttggggtgccagtctgcctctcatgtagggcccttcatcgatagctaccgctgcttccaaccaaagcaggagggggccttcacctgctggtcagcagtcactggcgcccgccatctcaactatggctcccggcttgactatgtgctgggggacaggaccctggtcatagacacctttcaggcctctttcctgctgcctgaggtgatgggctctgaccactgccctgtgggtgcrgtcttgagtgtgtcctctgtgcctgcaaaacagtgcccacctctgtgcacccgcttcctccctgagttygcaggcacccagctcaagatccttcgcttcctagttcctctcgaacaaagtcctgtgttggagcagtcgacgctgcagcacaacaatcaaacccgggtacagacatgccaaaacaaagcccaagtgcgctcaaccaggcctcagcccagtcaggttggctctagcagaggccagaaaaacctgaagagctactttcagccytcccctagctgtccccaagcctctcctgacatagagctgcctagcctaccactgatgagcgccctcatgaccccgaagacyccagaagagaaggcagtggccaaagtggtgaaggggcaggccaagacttcagaagccaaagatgagaaggagttacggacctcattctggaagtctgtgctggcggggcccttgcgcacacccctctgtgggggccacagggagccatgtgtgatgcgtactgtgaagaagccaggacccaacttgggccgccgcttctacatgtgtgccaggccccggggtcctcccactgacccctcctcccggtgcaacttcttcctctggagcaggcccagctgaaccaatggaggcctggggacatctggcatggtcacccctgcacatgatctgaggmcagctccccttccctgagctgcctcctgcttctccctcaaagtctcctacccttctcttcctcttttaagccctctcttcctcgctttccttcctacctagctccttgttggtgagcttcttgtgccttaatcctgtgacccagccccttacaccactttccaccttcctgtccgaagtacacggacactagctgccccaggaagttgtgtgattttaaatcacttctgtctttgctggaaagtgtatttgtgcataaataaagtctgtgtatttgtttcagggttgcactttggacattgtggaggtactccataaagttgagtcagagaagctatctcaatacttggtttgccggctggctgtagcccaatgatgtaattcccagagaaaggggaggagggaggggggaggagggaa

SEQ ID NO: 2195 - DNA, 2024 bp, Homo sapiens
gactgaagacaractttgagagggctcagaaacccagtacaccccctgtcccagccctgtccacctgctgctgtggccacagcgagagaaaagacagctagtaagataggaagtgaggccaggtaccttgtgggcagtgatgtcattcggtgcgactcctaagatgtctccagagatgggagagctcacccaaaccaggttgcagaagatctggattccacacagcagcggcagcagcaggctgcaacggagaaggggctcatccataccccagtttaccaattcccccacaatggtgatcatggtgggtttaccagctcgaggcaagacctatatctccacaaagctcacacgatatctcaactggataggaacaccaactaaagtgtttaatttaggccagtatcgacgagaggcagtgagctacaagaactatgaattctttcttccagacaacatggaagccctgcaaatcaggaagcagtgcgccctggcagccctgaaggatgttcacaactatctcagccatgaggaaggtcatgttgcggtttttgatgccaccaacactaccagagaacgacggtcactgatcctgcagtttgcaaaagaacatggttacaaggtgtttttcattgagtccatttgtaatgaccctggcataattgcagaaaacatcaggcaagtgaaacttggcagccctgattatatagactgtgaccgggaaaaggttctggaagactttctaaagagaattgagtgctatgaggtcaactaccaacccttggatgaggaactggacagccacctgtcctacatcaagatcttcgacgtgggcacacgctacatggtgaaccgagtgcaggatcacatccagagccgcacagtctactacctcatgaatatccatgtcacacctcgctccatctacctttgccgacatggcgagagtgaactcaacatcagaggccgcatcggaggtgactctggcctctcagttcgcggcaagcagtatgcctatgccctggccaacttcattcagtcccagggcatcagctccctgaaggtgtggaccagtcrcatgaagaggaccatccagacagctgaggccctgggtgtcccctatgagcagtggaaggccctgaatgagattgatgcgggtgtctgtgaggagatgacctatgaagaaatccaggaacattaccctgaagaatttgcactgcgagaccaagataaatatcgctaccgctatcccaagggagagtcctatgaggatctggttcagcgtctggagccagtgataatggagctagaacgacaggagaatgtactggtgatctgccaccaggctgtcatgcggtgcctcctggcctatttcctggataaaagttcagatgagcttccatatctcaagtgccctctgcacacagtgctcaaactcactcctgtggcttatggctgcaaagtggaatccatctacctgaatgtggaggccgtgaacacacaccgggagaagcctgagaatgtggacatcacccgggaacctgaggaagccctggatactgtcccagcccactactgagccctttccaagaagtcaaactgcctgtgtcctcatcgccttccacctttaggaaatgctatctttgctcttctcctactctgccttggcctcactgaggcaccccacttccagtgaagaagtcctccgcaactcccaaacaagcctcgcttgctggccgcaaccaaggagctatctagctctggaggaaactttctttcttaattcctattctctgacgaataaagacttactgcctacaagaggagaggaggaggtcatggcgaggcttttccagttgttctcaaggtactgaccctaatcctgacccagctctgctgctgtgagggcatggaatgggtgaggatttcctggagggaaaagttctacagtagcacctccaaagatgggggagaagataggtgcctgtgagttcctgtgggccttgttccagcaaggtggctgt

SEQ ID NO: 2196 - DNA, 2482 bp, Homo sapiens
ccggcagaaggcagggtgggtggggctgagtcagaggagaagggataaatgccaggtcctaacccaagtacccacctgtcattcgttcgtcctcagtgcagggcaacaggactttaggttcaagatggtgactgcagccatgctgctacagtgctgcccagtgcttgcccggggccccacaagcctcctaggcaaggtggttaagactcaccagttcctgtttggtattggacgctgtcccatcctggctacccaaggaccaaactgttctcaaatccaccttaaggcaacaaaggctggaggagattctccatcttgggcgaagggccactgtcccttcatgctgtcggaactccaggatgggaagagcaagattgtgcagaaggcagccccagaagtccaggaagatgtgaaggctttcaagacagatctgcctagctccctggtctcagtcagcctaaggaagccattttccggtccccaggagcaggagcagatctctgggaaggtcacacacctgattcagaacaatatgcctggaaactatgtcttcagttatgaccagtttttcagggacaagatcatggagaagaaacagkatcacacctaccgtgtgttmaagactgtgaaccdctggrctgatgcatatccctttgcccaacatttctctgaggcatctgtggcctcaaaggwtgtgtccgtctggtgtagtaatgatyacctgggcatgagccgacaccctcaggtcttgcaagccacacaggagaccctgcagcgtcatggtgctggagctggtggcacccgcaacatctcaggcaccagtaagtttcatgtggagcttgagcaggagctggctgagctgcaccagaaggactcagccctgctcttctcctcctgctttgttgccaatgactctactctcttcaccttggccaagatcctgccagggtgcgagatttactcagacgcaggcaaccatgcttccatgatccaargtatccgtaacagtggagcagccmagtttgtcttcaggcacaatgaccctgaccacctaaagaaacttctagagaagtctaaccctaagatacccaaaattgtggcctttgagactgtccactccatggatggtgccatctgtcccctcgaggagttgtgtgatgtgtcccaccagtatggggccctgaccttcgtggatgaggtccatgctgtaggactgtatgggtcccggggcgctgggattggggagcgtgatggaattatgcataagattgacatcatctctggaastcttggcaaggcctttggctgtgtgggcggctacattgccagcacccgtgacttggtggacatggtgygctcctatgctgcagrcttcatctttaccacttctctgccccccrtggtgctctctggagctctagaatctgtgcggctgctcaagggagaggagggccaagccctgaggcragcccaccagyrcaatgtcaagcacatgcgccagctactcatggacaggggccttcctgtcatcccctgccccagccacatcawccccatccgggtgggcaatgcagcactcaacagcaagctctgtgatctcctgctctccaagcatggcatctatgtgcaggccatcaactacccaactgtcccccggggtgaagagctcctgcgcttggcaccctccccccaccacagccctcagatgatggaagattttgtggagaagctgctgctggcttggactgcrgtggggctgcccctccaggaygtgtctgtggctgcctgcaatttctgtcgccrtcctgtacactttgagctcatgrgtgagtgggaacgttcctacttcgggaacatggggccccagtatgtcaccacctatgcctgagaagccagctgcctaggattcacaccccacctgcgcttcacttgggtccaggcctmctcctgtcttctgctttgttgtgtgcctctagctgaattgagcctaaaaataaagcmcaaaccmcagcatgtgaagccttttattggacagggaacagacaagtgcattctgactccctcagacaagtggcagatctatgaggtaaccataggtcacttgttggtcaccattccattttaccaacagggaaacagaatgagaaagaggaaggaaatgcccaaaaactacacagtgagttgcaaagagctaggatacttggcagatttatttgaratggctcttctccaatggtttcaataaaaatccagggattgacgcttcactggtaatccgggccctggaaatctgggcccagggtagcccctgaagccaggaaatgagtcagccctaaccaaattccctagaaaggagtggttccccaaaaccaaagaggtattttccataaggggatatggatgtcttcctcaatccattatcctctctccctcccacggcatcccacagaacaggatttaccagtcccattctttttctttt

SEQ ID NO: 2197 - DNA, 2506 bp, Homo sapiens
cgttcgtcctcagtgcagggcaacagggcccacatgccttggccccacataccaacccaggctgctgtgacagcccatgagagggggagaggttgctctgggatggaacaagaaaaagaggttgttttgtgaggactttaggttcaagatggtgactgcagccatgctgctacagtgctgcccagtgcttgcccggggccccacaagcctcctaggcaaggtggttaagactcaccagttcctgtttggtattggacgctgtcccatcctggctacccaaggaccaaactgttctcaaatccaccttaaggcaacaaaggctggaggagattctccatcttgggcgaagggccactgtcccttcatgctgtcggaactccaggatgggaagagcaagattgtgcagaaggcagccccagaagtccaggaagatgtgaaggctttcaagacagatctgcctagctccctggtctcagtcagcctaaggaagccattttccggtccccaggagcaggagcagatctctgggaaggtcacacacctgattcagaacaatatgcctggaaactatgtcttcagttatgaccagtttttcagggacaagatcatggagaagaaacagkatcacacctaccgtgtgttmaagactgtgaaccdctggrctgatgcatatccctttgcccaacatttctctgaggcatctgtggcctcaaaggwtgtgtccgtctggtgtagtaatgatyacctgggcatgagccgacaccctcaggtcttgcaagccacacaggagaccctgcagcgtcatggtgctggagctggtggcacccgcaacatctcaggcaccagtaagtttcatgtggagcttgagcaggagctggctgagctgcaccagaaggactcagccctgctcttctcctcctgctttgttgccaatgactctactctcttcaccttggccaagatcctgccagggtgcgagatttactcagacgcaggcaaccatgcttccatgatccaargtatccgtaacagtggagcagccmagtttgtcttcaggcacaatgaccctgaccacctaaagaaacttctagagaagtctaaccctaagatacccaaaattgtggcctttgagactgtccactccatggatggtgccatctgtcccctcgaggagttgtgtgatgtgtcccaccagtatggggccctgaccttcgtggatgaggtccatgctgtaggactgtatgggtcccggggcgctgggattggggagcgtgatggaattatgcataagattgacatcatctctggaastcttggcaaggcctttggctgtgtgggcggctacattgccagcacccgtgacttggtggacatggtgygctcctatgctgcagrcttcatctttaccacttctctgccccccrtggtgctctctggagctctagaatctgtgcggctgctcaagggagaggagggccaagccctgaggcragcccaccagyrcaatgtcaagcacatgcgccagctactcatggacaggggccttcctgtcatcccctgccccagccacatcawccccatccgggtgggcaatgcagcactcaacagcaagctctgtgatctcctgctctccaagcatggcatctatgtgcaggccatcaactacccaactgtcccccggggtgaagagctcctgcgcttggcaccctccccccaccacagccctcagatgatggaagattttgtggagaagctgctgctggcttggactgcrgtggggctgcccctccaggaygtgtctgtggctgcctgcaatttctgtcgccrtcctgtacactttgagctcatgrgtgagtgggaacgttcctacttcgggaacatggggccccagtatgtcaccacctatgcctgagaagccagctgcctaggattcacaccccacctgcgcttcacttgggtccaggcctmctcctgtcttctgctttgttgtgtgcctctagctgaattgagcctaaaaataaagcmcaaaccmcagcatgtgaagccttttattggacagggaacagacaagtgcattctgactccctcagacaagtggcagatctatgaggtaaccataggtcacttgttggtcaccattccattttaccaacagggaaacagaatgagaaagaggaaggaaatgcccaaaaactacacagtgagttgcaaagagctaggatacttggcagatttatttgaratggctcttctccaatggtttcaataaaaatccagggattgacgcttcactggtaatccgggccctggaaatctgggcccagggtagcccctgaagccaggaaatgagtcagccctaaccaaattccctagaaaggagtggttccccaaaaccaaagaggtattttccataaggggatatggatgtcttcctcaatccattatcctctctccctcccacggcatcccacagaacaggatttaccagtcccattctttttctttt

SEQ ID NO: 2198 - DNA, 2740 bp, Homo sapiens
tcgctccgcgctgccgcggcaaccagcacaccccggcacctcctctgcggcagctgcgcctcgcaagcgcagtgccgcagcgcacgccggagtggctgtagctgcccggcgcggcgccgccctgcgcgggctgtgggctgcgggctgcgcccccgctgctggccagctctgcacggctgcgggctctgcggcgcccggtgctctgcaacgctgcggcgggcggcatgggataacgcggccatggtgcgccgagatcgcctccgcaggatgagggagtggtgggtccaggtggggctgctggccgtgcccctgcttgctgcgtacctgcacatcccaccccctcagctctcccctgcccttcactcatggaagtcttcaggcaagtttttcacttacaagggactgcgtatcttctaccaagactctgtgggtgtggttggaagtccagagatagttgtgcttttacacggttttccaacatccagctacgactggtacaagatttgggaaggtctgaccttgaggtttcatcgggtgattgcccttgatttcttaggctttggcttcagtgacaaaccgagaccacatcactattccatatttgagcaggccagcatcgtggaagcgcttttgcggcatytggggctccagaaccgcagratcaaccttctttctcatgactatggagatattgttgctcaggagcttctctacaggtacaagcagaatcgatctggtcggcttaccataaagagtctctgtctgtcaaatggaggtatctttcctgagactcaccgtccactccttctccaaaagctactcaaagatggaggtgtgctgtcacccatcctcacacgactgatgaacttctttgtattctctcgaggtctcaccccagtctttgggccgtrtactcggccctctgagagtgagctgtgggacatgtgggcagggatccgcaacaatgacgggaacttagtcattgacagtctcttacagtacatcaatcagaggaagaagttcagaaggcgctgggtgggagctcttgcctctgtaactatccccattcattttatctatgggccattggatcctgtaaatccctatccagagtttttggagctgtacaggaaaacgctgccgcggtccacagtgtcgattctggatgaccacattagccactatccacagctagaggatcccatgggcttcttgaatgcatatatgggcttcatcaactccttctgagctggaaagagtagcttccctgtattacctcccctactcccttatstgttgtgtattccacttaggaagaaatgcccaaaagaggtcctggccatcaaacataattctctcacaaagtccactttactcaaattggtgaacagtgtataggaagaagccagcaggagctctgactaaggttgacataatagtccacctcccattactttgatatctgatcaaatgtatagacttggctttgttttttgtgctattaggaaattctgatgagcattactattcactgatgcagaaagacgttcttttgcataaaagactttttttaacactttggacttctctgaaatatttagaagtgctaatttctggcccacccccaacaggaattctatagtaaggaggaggagaaggggggctccttccctctcctcgaatgacgttatgggcacatgccttttaaaagttctttaagcaacacagagctgagtcctctttgtcatacctttggatttagtgtttcatcagctgtttttagttataaacattttgttaaaatagatattggtttctgaataaattgaactaaatccaaactatttcctaaaatcasaggacattaaggaccaatagcatctgtgccagagatgtactgttattagctgggaagaccaattctaacagcaaataacagtctgagactcctcatacctcagtggttagaagcatgtctctcttgagctacagtagaggggaagggattgttgtgtagtcaagtcaccatgctgaatgtacactgattcctttatgatgactgcttaactccccactgcctgtcccagagaggctttccaatgtagctcagtaattcctgttactttacagacaggaaagttccagaaactttaagaacaaactctgaaagacctatgagcaaatggtgctgaatactttttttttaaagccmyatttcattgtcttagtcaaagcaggattattaagtgattatttaaaattcgtttttttaaattagcaacttcaagtataacaactttgaaactggaataagtgtttattttctattaataaaaatgaattgtgacaaaagtggactctggcttcccctcccccctcccccccacccctctgggataaaaattttccagcattgccaggagctttcaggtacacattaaagaataaaatgaagttaagcagctggagtataggatagtatttgattttcaagatcacccaaagctgcactatcgtcccaaagctgaccaagtagaataaaaaraaaaaaaaaaaaamcaacccatgcgcaaagatagacatttgcttgatctgctggctcagggccaaatgtttaatttgcttctccaaagtcattcatcttcaaaagtctgattctgggaaactgatgccactagcctaaaagcccactgaccatgtagtgtgcatcagtttcctcttgtccagtaagcatttatcc

SEQ ID NO: 2199 - DNA, 2959 bp, Homo sapiens
tcacttctttggccttcacttttattatgtaaaagtactcagatcaggccgaatacaattttattytctttatccaatgccggaggctattgtcgaagccacggcctgccatttcataccctttgcaataggtggcgctgacgcctggcagggagaaggcggcagcacatgctgggctcgggggcgatgggcttgtgcgcggacctggcgacgctctagccccgagccgcgtattcgtggccgggtcctccctgggaacagggtgaaggccgagaacctctggcctcaggaagcgcatgcgcaaccggttctccgaaacatggagtcctgtaggcaaggtcttacctgaatcaggatgagggagtggtgggtccaggtggggctgctggccgtgcccctgcttgctgcgtacctgcacatcccaccccctcagctctcccctgcccttcactcatggaagtcttcaggcaagtttttcacttacaagggactgcgtatcttctaccaagactctgtgggtgtggttggaagtccagagatagttgtgcttttacacggttttccaacatccagctacgactggtacaagatttgggaaggtctgaccttgaggtttcatcgggtgattgcccttgatttcttaggctttggcttcagtgacaaaccgagaccacatcactattccatatttgagcaggccagcatcgtggaagcgcttttgcggcatytggggctccagaaccgcagratcaaccttctttctcatgactatggagatattgttgctcaggagcttctctacaggtacaagcagaatcgatctggtcggcttaccataaagagtctctgtctgtcaaatggaggtatctttcctgagactcaccgtccactccttctccaaaagctactcaaagatggaggtgtgctgtcacccatcctcacacgactgatgaacttctttgtattctctcgaggtctcaccccagtctttgggccgtrtactcggccctctgagagtgagctgtgggacatgtgggcagggatccgcaacaatgacgggaacttagtcattgacagtctcttacagtacatcaatcagaggaagaagttcagaaggcgctgggtgggagctcttgcctctgtaactatccccattcattttatctatgggccattggatcctgtaaatccctatccagagtttttggagctgtacaggaaaacgctgccgcggtccacagtgtcgattctggatgaccacattagccactatccacagctagaggatcccatgggcttcttgaatgcatatatgggcttcatcaactccttctgagctggaaagagtagcttccctgtattacctcccctactcccttatstgttgtgtattccacttaggaagaaatgcccaaaagaggtcctggccatcaaacataattctctcacaaagtccactttactcaaattggtgaacagtgtataggaagaagccagcaggagctctgactaaggttgacataatagtccacctcccattactttgatatctgatcaaatgtatagacttggctttgttttttgtgctattaggaaattctgatgagcattactattcactgatgcagaaagacgttcttttgcataaaagactttttttaacactttggacttctctgaaatatttagaagtgctaatttctggcccacccccaacaggaattctatagtaaggaggaggagaaggggggctccttccctctcctcgaatgacgttatgggcacatgccttttaaaagttctttaagcaacacagagctgagtcctctttgtcatacctttggatttagtgtttcatcagctgtttttagttataaacattttgttaaaatagatattggtttaaatgatacagtattttaggtatgatttaagactatgatttacctatacattatatatattttataaagatactaaaccagcatacccttactctgccagagtagtgaagctaattaaacacrtttggtttctgaataaattgaactaaatccaaactatttcctaaaatcasaggacattaaggaccaatagcatctgtgccagagatgtactgttattagctgggaagaccaattctaacagcaaataacagtctgagactcctcatacctcagtggttagaagcatgtctctcttgagctacagtagaggggaagggattgttgtgtagtcaagtcaccatgctgaatgtacactgattcctttatgatgactgcttaactccccactgcctgtcccagagaggctttccaatgtagctcagtaattcctgttactttacagacaggaaagttccagaaactttaagaacaaactctgaaagacctatgagcaaatggtgctgaatactttttttttaaagccmyatttcattgtcttagtcaaagcaggattattaagtgattatttaaaattcgtttttttaaattagcaacttcaagtataacaactttgaaactggaataagtgtttattttctattaataaaaatgaattgtgacaaaagtggactctggcttcccctcccccctcccccccacccctctgggataaaaattttccagcattgccaggagctttcaggtacacattaaagaataaaatgaagttaagcagctggagtataggatagtatttgattttcaagatcacccaaagctgcactatcgtcccaaagctgaccaagtagaataaaaaraaaaaaaaaaaaamcaacccatgcgcaaagatagacatttgcttgatctgctggctcagggccaaatgtttaatttgcttctccaaagtcattcatcttcaaaagtctgattctgggaaactgatgccactagcctaaaagcccactgaccatgtagtgtgcatcagtttcctcttgtccagtaagcatttatcc

SEQ ID NO: 2200 - DNA, 2871 bp, Homo sapiens
tcgctccgcgctgccgcggcaaccagcacaccccggcacctcctctgcggcagctgcgcctcgcaagcgcagtgccgcagcgcacgccggagtggctgtagctgcccggcgcggcgccgccctgcgcgggctgtgggctgcgggctgcgcccccgctgctggccagctctgcacggctgcgggctctgcggcgcccggtgctctgcaacgctgcggcgggcggcatgggataacgcggccatggtgcgccgagatcgcctccgcaggatgagggagtggtgggtccaggtggggctgctggccgtgcccctgcttgctgcgtacctgcacatcccaccccctcagctctcccctgcccttcactcatggaagtcttcaggcaagtttttcacttacaagggactgcgtatcttctaccaagactctgtgggtgtggttggaagtccagagatagttgtgcttttacacggttttccaacatccagctacgactggtacaagatttgggaaggtctgaccttgaggtttcatcgggtgattgcccttgatttcttaggctttggcttcagtgacaaaccgagaccacatcactattccatatttgagcaggccagcatcgtggaagcgcttttgcggcatytggggctccagaaccgcagratcaaccttctttctcatgactatggagatattgttgctcaggagcttctctacaggtacaagcagaatcgatctggtcggcttaccataaagagtctctgtctgtcaaatggaggtatctttcctgagactcaccgtccactccttctccaaaagctactcaaagatggaggtgtgctgtcacccatcctcacacgactgatgaacttctttgtattctctcgaggtctcaccccagtctttgggccgtrtactcggccctctgagagtgagctgtgggacatgtgggcagggatccgcaacaatgacgggaacttagtcattgacagtctcttacagtacatcaatcagaggaagaagttcagaaggcgctgggtgggagctcttgcctctgtaactatccccattcattttatctatgggccattggatcctgtaaatccctatccagagtttttggagctgtacaggaaaacgctgccgcggtccacagtgtcgattctggatgaccacattagccactatccacagctagaggatcccatgggcttcttgaatgcatatatgggcttcatcaactccttctgagctggaaagagtagcttccctgtattacctcccctactcccttatstgttgtgtattccacttaggaagaaatgcccaaaagaggtcctggccatcaaacataattctctcacaaagtccactttactcaaattggtgaacagtgtataggaagaagccagcaggagctctgactaaggttgacataatagtccacctcccattactttgatatctgatcaaatgtatagacttggctttgttttttgtgctattaggaaattctgatgagcattactattcactgatgcagaaagacgttcttttgcataaaagactttttttaacactttggacttctctgaaatatttagaagtgctaatttctggcccacccccaacaggaattctatagtaaggaggaggagaaggggggctccttccctctcctcgaatgacgttatgggcacatgccttttaaaagttctttaagcaacacagagctgagtcctctttgtcatacctttggatttagtgtttcatcagctgtttttagttataaacattttgttaaaatagatattggtttaaatgatacagtattttaggtatgatttaagactatgatttacctatacattatatatattttataaagatactaaaccagcatacccttactctgccagagtagtgaagctaattaaacacrtttggtttctgaataaattgaactaaatccaaactatttcctaaaatcasaggacattaaggaccaatagcatctgtgccagagatgtactgttattagctgggaagaccaattctaacagcaaataacagtctgagactcctcatacctcagtggttagaagcatgtctctcttgagctacagtagaggggaagggattgttgtgtagtcaagtcaccatgctgaatgtacactgattcctttatgatgactgcttaactccccactgcctgtcccagagaggctttccaatgtagctcagtaattcctgttactttacagacaggaaagttccagaaactttaagaacaaactctgaaagacctatgagcaaatggtgctgaatactttttttttaaagccmyatttcattgtcttagtcaaagcaggattattaagtgattatttaaaattcgtttttttaaattagcaacttcaagtataacaactttgaaactggaataagtgtttattttctattaataaaaatgaattgtgacaaaagtggactctggcttcccctcccccctcccccccacccctctgggataaaaattttccagcattgccaggagctttcaggtacacattaaagaataaaatgaagttaagcagctggagtataggatagtatttgattttcaagatcacccaaagctgcactatcgtcccaaagctgaccaagtagaataaaaaraaaaaaaaaaaaamcaacccatgcgcaaagatagacatttgcttgatctgctggctcagggccaaatgtttaatttgcttctccaaagtcattcatcttcaaaagtctgattctgggaaactgatgccactagcctaaaagcccactgaccatgtagtgtgcatcagtttcctcttgtccagtaagcatttatcc

SEQ ID NO: 2201 - DNA, 1570 bp, Homo sapiens
gccccagaatgkaatgccgccgtcggtaggggtctgccgggcataaaggggccttcggaaccccaccagagtcacagccaggragggcagcggggcgcaccaggccgaaggctcacgccacagggagggcagctaggacatggggggaagcgcgttaaaccagggagtcctggaaggggacgacgcccccggccagtccctgtacgagcggttaagtcagaggatgctggacatctcgggggaccggggcgtgctgaaggacgtcatccgagaaggagctggagacctagtggcgcctgatgcttcggtgctagtgaaatastcgggatacctggaacacatggacagacccttmgattctaattactttaggaaaactcctcggctaatgaaacttggagaggatattacactgtggggcatggagctgggccttctgagcatgcrgagaggagagctggccaggtttctgttcaaaccgaactacgcctatggaacrctgggctsccctcccttgatccccccaaacaccactgtcctgttyragattgagctgcttgacttcctggactgtgctgagtcagacaagttttgtgctctctcagctgagcagcaagaccaatttccacttcagaaggtcctgaaagtggcagctacggaacgggagtttggcaactaccttttccgccagaatcgtttctatgatgccaaagtgagatataaaagggccctrttgcttctgcgccggcgatcagcaccccctgaagagcagcacctggtggaggccgccaagcttcctgttctcctgaacctgtcctttacatacctgaagctagaccgacccaccatagccctgtgctatggagagcaggctttgatcattgaccaaaagaatgccaaggccctcttcaggtgtggacaggcttgtcttctcctgactgagtatcaaaaggcccgggattttctagttcgagcccagaaggagcaacccttcaatcatgacatcaataatgagctgaagaaactggctagctrttacagggactatgtggataaagagaaagaaatgtggcaccgcatgttcgcgccctgtggcgatggttctacagcaggagaaagttgaaggttcttcacctaccaacgaggggagagagctgtggttctccatcattgggggagyggaagggagctcccagcgcagccgtggcagccaccttccaggagcaggggctggaatgtcctgtggccgcatctctcatggacgcggctgaaacgtgttttcacaggtgctgttttctgttttccgtgttcgtaacagaagggaggggaaagcgcagctactgacaagtagaacactgctactttttttaaggcagtttcttgtttttttagacggaattagtccttggcttccctcccagtcccagccctgcttccggctgcgaatgtccctgagtcaacaccaatagagattgctttgtgtattttgtagggttctctgttttgaagacagaattatgttacaaatgtttttgttgtaaataaataaaacacttccttgtccttgcaa

SEQ ID NO: 2202 - DNA, 442 bp, Homo sapiens
gccccagaatgkaatgccgccgtcggtaggggtctgccgggcataaaggggccttcggaaccccaccagagtcacagccaggragggcagcggggcgcaccaggccgaaggctcacgccacagggagggcagctaggacatggggggaagcgcgttaaaccagggagtcctggaaggggacgacgcccccggccagtccctgtacgagcggttaagtcagaggatgctggacatctcgggggaccggggcgtgctgaaggacgtcatccgagaaggagctggagacctagtggcgcctgatgcttcggtgctagatattacactgtggggcatggagctgggccttctgagcatgcrgagaggagagctggccagatgcttcgtcttgggtaaactcctcgactcccaaggccccagcctccatctttacctcagagcctcc

SEQ ID NO: 2203 - DNA, 1223 bp, Homo sapiens
cggmaggcgccagtcgcaggtgtgctgctgagscgtgagaatggcgtcccgcggccggcgtccggagcatggcggacccccagagctgttttatgacgagacagaagcccggaaatacrttcgcaactcacggatgattgatatccagaccaggatggctgggcgagcattggagcttctttatctgccagagaataagccctgttacctgctggatattggctgtggcactgggctgagtggaagttatctgtcagatgaagggcactattgggtgggcctggatatcagccctgccatgctggatgaggctgtggaccgagagatagagggagacctgctgctgggggatatgggccagggcatcccattcaagccaggcacatttgatggttgcatcagcatttctgctgtgcagtggctctgtaatgctaacaagaagtctgaaaaccctgccaagcgcctgtactgcttttttgcttctcttttttctgttctcgtccggggatcccgagctgtcctgcagctgtaccctgagaactcagagcagttggagctgatcacaacccaggccacaaaggcaggcttctccggtggcatggtggtagactaccctaacagtgccaaagcaaagaaattctacctctgcttgttttctgggccttcgacctttataccagaggggctgagtgaaaatcaggatgaagttgaacccagggagtctgtgttcaccaatgagaggttcccattaaggatgtcgaggcggggaatggtgaggaagagtcgggcatgggtgctggagaagaaggagcggcacaggcgccagggcagggaagtcagacctgacacccagtacaccggccgcaagcgcaagccccgcttctaagtcaccacgcggttctggaaaggcacttgcctctgcacttttctatattgttcagctgacaaagtagtattttagaaaagttctaaagttataaaaatgttttctgcagtaaaaaaaaagttctctgggccgggcgtggtggctcacacctgtaatcccagcaccttgggaggctgaggtgggaggatcatttgaggccaggagtttgagacctgcctgggcaacataatgaaacttcctttccagggagraaaaaaaaaaaaaaaaaaaaagctctgagagcatcttattttgtttaaaggcaagaaataaaatttccttttgtggagctctggca

SEQ ID NO: 2204 - DNA, 1905 bp, Homo sapiens
cggmaggcgccagtcgcaggtgtgctgctgagscgtgagaatggcgtcccgcggccggcgtccggagcatggcggacccccagagctgttttatgacgagacagaagcccggaaatacrttcgcaactcacggatgattgatatccagaccaggatggctgggcgagcattggagcttctttatctgccagagaataagccctgttacctgctggatattggctgtggcactgggctgagtggaagttatctgtcagatgaagggcactattgggtgggcctggatatcagccctgccatgctggatgaggctgtggaccgagagatagagggagacctgctgctgggggatatgggccagggcatcccattcaagccaggcacatttgatggttgcatcagcatttctgctgtgcagtggctctgtaatgctaacaagaagtctgaaaaccctgccaagcgcctgtactgcttttttgcttctcttttttctgttctcgtccggggatcccgagctgtcctgcagctgtaccctgagaactcagagcaggtgagtccctcggctactgggtgtgcmggggagttgggggactcaacaggtaagctgtcctggggaagcgacaaagaatcttatgcagattggcgggaaaaggaggaaacatgcaccctagtgtggcccctgatggcacatttgatgacctgatatcctaagggggtggcatctgcggaggtggggtgggatgccttctcttggcagatgacatggtattacagataaggtgatgcgactgatttccataaccaaataagtaaatgccatttaggaagggtgagagggcaccgacagttctcygttgtgtgatgtataaattaaggaatggcrgagtagkatgtagatgttgaaagataagtgaagagctgttcctgactaataacatgaatgactctggattccaattggtggccatctccctaaacttgagtggggagctgggtccctgcactggaaagtgagaatgaggggagttgctttgttctgtaattctcctgagggaggtgtgggccatgccagattctagcctgtacttttctctacgtggcttacagcgaccttaagttctcccaggcaggatttgtcctggagcagactggcttctgaaggaggggagggaggtgaagctgtctgctcctctcaacctccgctgcctgacccgctgcctttctttcctcagttggagctgatcacaacccaggccacaaaggcaggcttctccggtggcatggtggtagactaccctaacagtgccaaagcaaagaaattctacctctgcttgttttctgggccttcgacctttataccagaggggctgagtgaaaatcaggatgaagttgaacccagggagtctgtgttcaccaatgagaggttcccattaaggatgtcgaggcggggaatggtgaggaagagtcgggcatgggtgctggagaagaaggagcggcacaggcgccagggcagggaagtcagacctgacacccagtacaccggccgcaagcgcaagccccgcttctaagtcaccacgcggttctggaaaggcacttgcctctgcacttttctatattgttcagctgacaaagtagtattttagaaaagttctaaagttataaaaatgttttctgcagtaaaaaaaaagttctctgggccgggcgtggtggctcacacctgtaatcccagcaccttgggaggctgaggtgggaggatcatttgaggccaggagtttgagacctgcctgggcaacataatgaaacttcctttccagggagraaaaaaaaaaaaaaaaaaaaagctctgagagcatcttattttgtttaaaggcaagaaataaaatttccttttgtggagctctggca

SEQ ID NO: 2205 - DNA, 1680 bp, Homo sapiens
tagtctcrtggagagattraagatggcggcttctcaggcggtggaggaaatgcggagccgcgtggttctgggggagtttggggttcgcaatgtccatactactgactttcccggtaactattccggttatgatgatgcctgggaccaggaccgcttcgagaagaatttccgtgtggatgtagtacacatggatgaaaactcactggagtttgacatggtgggaattgacgcagccattgccaatgcttttcgacgaattctgctagctgaggtgccaactatggctgtggagaaggtcctggtgtacaataatacatccattgttcaggatgagattcttgctcaccgtctggggctcattcccattcatgctgatccccgtctttttgagtatcggaaccaaggagatgaagaaggcacagagatagatactctacagtttcgtctccaggtcagatgcactcggaacccccatgctgctaaagattcctctgaccccaacgaactgtacgtgaaccacaaagtgtataccaggcatatgacatggatccccctggggaaccaggctgatctctttccagagggcactatccgaccagtgcatgatgatatcctcatcgctcagctgcggcctggccaagaaattgacctgctcatgcactgtgtcaagggcattggcaaagatcatgccaagttttcaccagtggcaacagccagttacaggctcctgccagacatcaccctgcttgagcccgtggaaggggaggcagctgaggagttgagcaggtgcttctcacctggtgttattgaggtgcaggaagtccaaggtaaaaaggtggccagagttgccaacccccggctggataccttcagcagagaaatcttccggaatgagaagctaaagaaggttgtgaggcttgcccgggttcgagatcattatatcttctctgttgagtcaacgggggtgttgccaccagatgtgctggtgagtgaagccatcaaagtactgatggggaagtgccggcgcttcttggatgaactagatgcggttcagatggactgagcttggatgcttctgaggcaagctgaagcyttgggttctgactgacccaccctacaggactgctgaacagagagcccagtgtgactagggatcctgagttttytgggacaattccagctttaatcaatacattttgttaaatgtgccataaaatgagactttttacgcctttataaggccttagatgtaaataaactcacccaaacaaaaaaaatatcctgtgttaacagtgaaaaaatcttaaagttcttttcctaaaatcctaaatggcactgatattgaattccattatactcttagtttarctgcatttccgtcaggctgcacattatggtcactggcccaaaaagtaggaataaaaaaataggaaggaggacatccttgtaacaaactctccttcaccattctccttataatttcaggtaagaaagatttgctggctgcggtggctcacacctgtaatcccagcactttgggaggccaaggcgagtggatcacgrggtcaagagagcgagaccatcctggctaacatggtgaaaccccgtctctactaaaaaaaaaaaaaaaaaaaaaaaaaattagtcgggcatgggggcgagcgcctgtagtcccagcta

SEQ ID NO: 2206 - DNA, 1090 bp, Homo sapiens
tagtctcrtggagagattraagatggcggcttctcaggcggtggaggaaatgcggagccgcgtggttctgggggagtttggggttcgcaatgtccatactactgactttcccggtaactattccggttatgatgatgcctgggaccaggaccgcttcgagaagaatttccgtgtggatgtagtacacatggatgaaaactcactggagtttgacatggtgggaattgacgcagccattgccaatgcttttcgacgaattctgctagctgaggtgccaactatggctgtggagaaggtcctggtgtacaataatacatccattgttcaggatgagattcttgctcaccgtctggggctcattcccattcatgctgatccccgtctttttgagtatcggaaccaaggagatgaagaaggcacagagatagatactctacagtttcgtctccaggtcagatgcactcggaacccccatgctgctaaagattcctctgaccccaacgaactgtacgtgaaccacaaagtgtataccaggcatatgacatggatccccctggggaaccaggctgatctctttccagagggcactatccgaccagtgcatgatgatatcctcatcgctcagctgcggcctggccaagaaattgacctgctcatgcactgtgtcaagggcattggcaaagatcatgccaagttttcaccagtggcaacagccagttacaggctcctgccagacatcaccctgcttgagcccgtggaaggggaggcagctgaggagttgagcaggtgcttctcacctggtgttattgaggtgcaggaagtccaaggtaaaaaggtggccagagttgccaacccccggctggataccttcagcagagaaatcttccggaatgagaagctaaagaaggttgtgaggcttgcccgggttcgagatcattatatctgtaagaaagatttgctggctgcggtggctcacacctgtaatcccagcactttgggaggccaaggcgagtggatcacgrggtcaagagagcgagaccatcctggctaacatggtgaaaccccgtctctactaaaaaaaaaaaaaaaa

SEQ ID NO: 2207 - DNA, 1276 bp, Homo sapiens
tagtctcrtggagagattraagatggcggcttctcaggcggtggaggaaatgcggagccgcgtggttctgggggagtttggggttcgcaatgtccatactactgactttcccggtaactattccggttatgatgatgcctgggaccaggaccgcttcgagaagaatttccgtgtggatgtagtacacatggatgaaaactcactggagtttgacatggtgggaattgacgcagccattgccaatgcttttcgacgaattctgctagctgaggtgccaactatggctgtggagaaggtcctggtgtacaataatacatccattgttcaggatgagattcttgctcaccgtctggggctcattcccattcatgctgatccccgtctttttgagtatcggaaccaaggagatgaagaaggcacagagatagatactctacagtttcgtctccaggtcagatgcactcggaacccccatgctgctaaagattcctctgaccccaacgaactgtacgtgaaccacaaagtgtataccaggcatatgacatggatccccctggggaaccaggctgatctctttccagagggcactatccgaccagtgcatgatgatatcctcatcgctcagctgcggcctggccaagaaattgacctgctcatgcactgtgtcaagggcattggcaaagatcatgccaagttttcaccagtggcaacagccagttacaggctcctgccagacatcaccctgcttgagcccgtggaaggggaggcagctgaggagttgagcaggtgcttctcacctggtgttattgaggtgcaggaagtccaaggtaaaaaggtggccagagttgccaacccccggctggataccttcagcagagaaatcttccggaatgagaagctaaagaaggttgtgaggcttgcccgggttcgagatcattatatcttctctgttgagtcaacgggggtgttgccaccagatgtgctggtgagtgaagccatcaaagtactgatggggaagtgccggcgcttcttggatgaactagatgcggttcagatggactgagcttggatgcttctgaggcaagctgaagcyttgggttctgactgacccaccctacaggactgctgaacagagagcccagtgtgactagggatcctgagttttytgggacaattccagctttaatcaatacattttgttaaatgtgccataaaatgagactttttacgcctttataaggccttagatgtaaataaactcacccaaacaaaaaaa

SEQ ID NO: 2208 - DNA, 1869 bp, Homo sapiens
tcctgacctcaagtgattcacccacctcggcctcccaaagtgctgggattacaggcatgagccaccctccgcctcccgggttcaagcgattctcctgcatcagcctcctgagtagctgggattataggcatgcaccatcacgcctggctaatttttgtatttttagtagagatggggtttcgccacgttggccaggctggtcttgaactcttgatctcaagtgatccacccgccctggcctcccaaagtgctgggattacaggcctgagccaccaggccagccccaacttctactttttattttatttataaattggggggggggttctatatttagtttgaagaggtggggaagatttgaaaaccactagatttaccaggaaatttttttcttcaaaaatattttctgcttttatgatacttgaatatctaataaaagacaatatttagccagtcacggtggctgatgcttgtaatcctaacactttgggaggctgaggtgggtggactactggagccctggagttcaaaaccggcctaagccacatggcraaacagtctttacaaaaaatacaaagatggtggcttatgcctgtagtcgtacctactcaggaggctgaggttgggaggatcacctgaatctgggagtttggggctgcaataagccatgattgtgccgctgcactccagcctgggtgacagtctgagaccctgtctcaaaaaaaaaaaaaaaaaaaaaaaaaaaaaagactacattcactgtatacgtggccttttccccctaactagctatgtagcttcttaaaggcaaagattcttcatagtgctttgcacatgataggtgctgatactcattggatgaatgtatatagtgaagaattttagatctgattaccacaattgggatcataaacatgtataaactccttgggagtctgccttatatactttttatccccctaaatgttccattaatgttgcagagaggctcactagttcctggagatgtcttattaagtactgaaatgtgattttccaaaattttctttacaatacaggcaaaagataagtaaattgtggacaaagctttcatctctatcagcagctatagagaggaagtaaacagcttagcccctaatacaggaggaagttgttcaactacaggcttgttagtagcaagttaaaccagttacattttataaaacagcctgagtggtagggaagctatcactttaatactctagaggcagaatgccacataggactttgggtcacatatttcttttccagggtctcctcaaaatgcagtttctatttacagttgactttggcccctatttacccataaaatgtcaaaatcaagtagtatgaacatggaaacaggagcagggactaaggtttggtcaagtggccctcattgttccaagagtaatttaggctatgtaaacttgaaaaatatgggaccagattaccttttgtctctaaattctactcttctttaagtagctggcactgtatctctgccagggcacagaagtgggctccttactattctgaccactagcaagtggccaactcttcaaatacagggtagctacctatttcacgtgaaaggcctcagtattctgctcacttgaactacggaaaataggccacaatacttggttacaatactggaactctgaacctatgtggaggagagaaaaacaatggtgaacgagataccagctgggctctttccacattcagggctcagcagtgttggggtttcacttgtctctaatcctgaagaggtatctagccctggaaggaagctgagcctgtagctaacgcataagcacagtgtattcaataaaacatttttattct

SEQ ID NO: 2209 - DNA, 3542 bp, Homo sapiens
aacggcccttcgcagcgggcgcgctgtcagacctcagtctggcggctgcattgctgggcgcgccgctctcgtctgatccctgctggggacggttgcccgggcaggatcctttacgatcccttctcggtttctccgtcgtcacagggaataaatctcgctcgaaactcactggaccgctcctagaaaggcgaaaagatattcaggagcccttccattttccttccagtaggcaccgaacccagcattttcggcaaccgctgctggcagttttgccaggtgtttgttaccttgaaaaatggctactggacaggatcgagtggttgctctcgtggacatggactgtttttttgttcaagtggagyagcggcaaaatcctcatttgaggaataaaccttgtgcagttgtacagtacaaatcatggaagggtggtggaataattgcagtgagttatgaagctcgtgcatttggagtcactagaagtatgtgggcagatgatgctaagaagttatgtccagatcttctactggcacaagttcgtgagtcccgtgggaaagctaacctcaccaagtaccgggaagccagtgttgaagtgatggagataatgtctcgttttgctgtgattgaacrtgccagcattgatgaggcttacgtagatctgmccagtgctgtayaagagagactacaaaagctacaaggtcagcctatctcggcagacttgttgccaagcacttacattgaaggkttgccccaaggccctacaacggcagaagagactgttcagaaagaggggatgcgaaaacaaggcttatttcaatggctcgattctcttcagattgataacctcacctctccagacctgcagctcaccgtgggagcagtgattgtggaggaaatgagagcagccatagagagggagactgkttttcagtgttcagctggaatttcacacaataaggtcctggcaaaactggcytgtggactaaacaagcccaaccgccaaaccctggtttcacatgggtcagtcccacagctcttcagccaaatgcccattcgcaaaatccgtagtcttggaggaaagctaggggcctctgtcattgagatcctagggatagaatacatgggtgaactgacccagttcactgaatcccagctccagagtcattttggggagaagaatgggtcttrgctatatgccatgtgccgagggattgaacatgatccagttaaacccaggcaactacccaaaaccattggctgtagtaagaacttcccaggaaaaayagctcttgctactcgggaacaggtacaatggtggctgttgcaattagcccaggaactagaggagagactgactaaagaccgaaatgataatgacagggtagccacccagctggttgtgagcattcgtgtayaaggagacaaacgcctcagcagcctgcgccgctgctgtgcccttacccgctatgatgctcacaagatgagccatgatgcatttactgtcatcaagaactgtaatacttctggaatccagacagaatggtctcctcctctcacaatgcttttcctctgtgctacaaaattttctgcctctgccccttcatcttctacagacatcaccagcttcttgagcagtgacccaagttctctgccaaaggtgccagttaccagctcagaagctaagacccagggaagtggcccagcggtgacagccactaagaaagcaaccacrtctctggaatcattcttccaaaaagctgcagaaaggcagaaagttaaagaagcttcgctttcatctcttactgctcccactcaggctcccatgagcaattcaccatccaagccctcattaccttttyaaaccagtcaaagtacaggaactgagcccttctttaagcagraaagtctgcttctaaagcagaaacagcttaataattcttmagtttcttccccccaacaaaacccatggtccaactgtaaagcattaccaaactctttaccaacagagtatccagggtgtgtccctgtttgtgaaggggtgtcgaagcyagaagaatcctctamagcaactcctgcagagrtggatttggcccacaacagccaaagcatgcacgcctcttcagcttccaaatctgtgctggaggtgactcagaaagcaaccccaaatccaagtcttctagctgctgaggaccaagtgccctgtgagaagtgtggctccctggtaccggtatgggatwtgccagaacacatggactatcattttgcattggagttgcagaaatcctttttgcagccccactcttcaaacccccaggttgtttctgccgtatctcatcaaggcaaaagaaatcccaagagccctttggcctgcactaataaacgccccaggcctgagggcatgcaaacattggaatcattttttaagccattaacacattagtgctgccctcaggcttgcctgtaggatttaatattttttatctttacagrtctttatctttaatattttatctttacagatttccctgagaaagggaattatgaaatttttaatacaaaaaataatccatttaggtgctgagttacggtcccatctcttcacaggcatggattctaatcccactgctgacagagatgtaaaaattcatcctaccagagtttttaatctttagcatttagggaggcagtgtcataaagtaaaaagtgtgtgggccttggagtctaagagacgtggttgcaaacttagctctggttattgcaatgagggccttgaacaagtcattttcttcacattctcatctgtaaaatggagataataccttacagattattgcagattaataacaatgtattcaaattatgtaactcggccgggtacaatggctcacgcctgtaatcctaacactttgggaggccgaggcagacagatcacctgaggtcaggagtttgagaccagcctggccaacatggcaaaaccatctctactaaaaatagaaaaattagccaggcacgttccaggcacctgtgatcccagctacttagaggctgaggcagaagaattgctttaaccttggaggcggaggttgcattgagctgagatcatgctagtgcgctccagcctgggcaacagagcgagacttcatctcagaaaataaaaaataggggccaggcacagtggctcatacctgtaatgccagcactttgggaggccaaggcgggcagatcacgaggtcaggagtttcagaccaatatggtgaaaccccatctctactaaaattacaaaaaaaattatccaggcgtggtggtgcacgcctgtaatcccagctactcrggaggctaaggcaggagaatcacttgaacccaggaggcagaggttggagtgagctgagatygcgccaccgcactccagcctgggcaacagagcgagactccatctcaaacaaaaacaagaacaaaaacaaacataaagttggcacagaaaagggaccaagtttaaaaaagggttttaaatgtaatgagacttgcatagttaaaaaaaaaaaagg

SEQ ID NO: 2210 - DNA, 4608 bp, Homo sapiens
aacggcccttcgcagcgggcgcgctgtcagacctcagtctggcggctgcattgctgggcgcgccgctctcgtctgatccctgctggggacggttgcccgggcaggatcctttacgatcccttctcggtttctccgtcgtcacagggaataaatctcgctcgaaactcactggaccgctcctagaaaggcgaaaagatattcaggagcccttccattttccttccagtaggcaccgaacccagcattttcggcaaccgctgctggcagttttgccaggtgtttgttaccttgaaaaatggctactggacaggatcgagtggttgctctcgtggacatggactgtttttttgttcaagtggagyagcggcaaaatcctcatttgaggaataaaccttgtgcagttgtacagtacaaatcatggaagggtggtggaataattgcagtgagttatgaagctcgtgcatttggagtcactagaagtatgtgggcagatgatgctaagaagttatgtccagatcttctactggcacaagttcgtgagtcccgtgggaaagctaacctcaccaagtaccgggaagccagtgttgaagtgatggagataatgtctcgttttgctgtgattgaacrtgccagcattgatgaggcttacgtagatctgmccagtgctgtayaagagagactacaaaagctacaaggtcagcctatctcggcagacttgttgccaagcacttacattgaaggkttgccccaaggccctacaacggcagaagagactgttcagaaagaggggatgcgaaaacaaggcttatttcaatggctcgattctcttcagattgataacctcacctctccagacctgcagctcaccgtgggagcagtgattgtggaggaaatgagagcagccatagagagggagactgkttttcagtgttcagctggaatttcacacaataaggtcctggcaaaactggcytgtggactaaacaagcccaaccgccaaaccctggtttcacatgggtcagtcccacagctcttcagccaaatgcccattcgcaaaatccgtagtcttggaggaaagctaggggcctctgtcattgagatcctagggatagaatacatgggtgaactgacccagttcactgaatcccagctccagagtcattttggggagaagaatgggtcttrgctatatgccatgtgccgagggattgaacatgatccagttaaacccaggcaactacccaaaaccattggctgtagtaagaacttcccaggaaaaayagctcttgctactcgggaacaggtacaatggtggctgttgcaattagcccaggaactagaggagagactgactaaagaccgaaatgataatgacagggtagccacccagctggttgtgagcattcgtgtayaaggagacaaacgcctcagcagcctgcgccgctgctgtgcccttacccgctatgatgctcacaagatgagccatgatgcatttactgtcatcaagaactgtaatacttctggaatccagacagaatggtctcctcctctcacaatgcttttcctctgtgctacaaaattttctgcctctgccccttcatcttctacagacatcaccagcttcttgagcagtgacccaagttctctgccaaaggtgccagttaccagctcagaagctaagacccagggaagtggcccagcggtgacagccactaagaaagcaaccacrtctctggaatcattcttccaaaaagctgcagaaaggcagaaagttaaagaagcttcgctttcatctcttactgctcccactcaggctcccatgagcaattcaccatccaagccctcattaccttttyaaaccagtcaaagtacaggaactgagcccttctttaagcagraaagtctgcttctaaagcagaaacagcttaataattcttmagtttcttccccccaacaaaacccatggtccaactgtaaagcattaccaaactctttaccaacagagtatccagggtgtgtccctgtttgtgaaggggtgtcgaagcyagaagaatcctctamagcaactcctgcagagrtggatttggcccacaacagccaaagcatgcacgcctcttcagcttccaaatctgtgctggaggtgactcagaaagcaaccccaaatccaagtcttctagctgctgaggaccaagtgccctgtgagaagtgtggctccctggtaccggtatgggatwtgccagaacacatggactatcattttgcattggagttgcagaaatcctttttgcagccccactcttcaaacccccaggttgtttctgccgtatctcatcaaggcaaaagaaatcccaagagccctttggcctgcactaataaacgccccaggcctgagggcatgcaaacattggaatcattttttaagccattaacacattagtgctgccctcaggcttgcctgtaggatttaatattttttatctttacagrtctttatctttaatattttatctttacagatttccctgagaaagggaattatgaaatttttaatacaaaaaataatccatttaggtgctgagttacggtcccatctcttcacaggcatggattctaatcccactgctgacagagatgtaaaaattcatcctaccagagtttttaatctttagcatttagggaggcagtgtcataaagtaaaaagtgtgtgggccttggagtctaagagacgtggttgcaaacttagctctggttattgcaatgagggccttgaacaagtcattttcttcacattctcatctgtaaaatggagataataccttacagattattgcagattaataacaatgtattcaaattatgtaactcggccgggtacaatggctcacgcctgtaatcctaacactttgggaggccgaggcagacagatcacctgaggctggtcttgaactcttgatctcaagtgatccacccgccctggcctcccaaagtgctgggattacaggcctgagccaccaggccagccccaacttctactttttattttatttataaattggggggggggttctatatttagtttgaagaggtggggaagatttgaaaaccactagatttaccaggaaatttttttcttcaaaaatattttctgcttttatgatacttgaatatctaataaaagacaatatttagccagtcacggtggctgatgcttgtaatcctaacactttgggaggctgaggtgggtggactactggagccctggagttcaaaaccggcctaagccacatggcraaacagtctttacaaaaaatacaaagatggtggcttatgcctgtagtcgtacctactcaggaggctgaggttgggaggatcacctgaatctgggagtttggggctgcaataagccatgattgtgccgctgcactccagcctgggtgacagtctgagaccctgtctcaaaaaaaaaaaaaaaaaaaaaaaaaaaaaagactacattcactgtatacgtggccttttccccctaactagctatgtagcttcttaaaggcaaagattcttcatagtgctttgcacatgataggtgctgatactcattggatgaatgtatatagtgaagaattttagatctgattaccacaattgggatcataaacatgtataaactccttgggagtctgccttatatactttttatccccctaaatgttccattaatgttgcagagaggctcactagttcctggagatgtcttattaagtactgaaatgtgattttccaaaattttctttacaatacaggcaaaagataagtaaattgtggacaaagctttcatctctatcagcagctatagagaggaagtaaacagcttagcccctaatacaggaggaagttgttcaactacaggcttgttagtagcaagttaaaccagttacattttataaaacagcctgagtggtagggaagctatcactttaatactctagaggcagaatgccacataggactttgggtcacatatttcttttccagggtctcctcaaaatgcagtttctatttacagttgactttggcccctatttacccataaaatgtcaaaatcaagtagtatgaacatggaaacaggagcagggactaaggtttggtcaagtggccctcattgttccaagagtaatttaggctatgtaaacttgaaaaatatgggaccagattaccttttgtctctaaattctactcttctttaagtagctggcactgtatctctgccagggcacagaagtgggctccttactattctgaccactagcaagtggccaactcttcaaatacagggtagctacctatttcacgtgaaaggcctcagtattctgctcacttgaactacggaaaataggccacaatacttggttacaatactggaactctgaacctatgtggaggagagaaaaacaatggtgaacgagataccagctgggctctttccacattcagggctcagcagtgttggggtttcacttgtctctaatcctgaagaggtatctagccctggaaggaagctgagcctgtagctaacgcataagcacagtgtattcaataaaacatttttattct

SEQ ID NO: 2211 - DNA, 3471 bp, Homo sapiens
aacggcccttcgcagcgggcgcgctgtcagacctcagtctggcggctgcattgctgggcgcgccgctctcgtctgatccctgctggggacggttgcccgggcaggatcctttacgatcccttctcggtttctccgtcgtcacagggaataaatctcgctcgaaactcactggaccgctcctagaaaggcgaaaagatattcaggagcccttccattttccttccagtaggcaccgaacccagcattttcggcaaccgctgctggcagttttgccaggtgtttgttaccttgaaaaatggctactggacaggatcgagtggttgctctcgtggacatggactgtttttttgttcaagtggagyagcggcaaaatcctcatttgaggaataaaccttgtgcagttgtacagtacaaatcatggaagggtggtggaataattgcagtgagttatgaagctcgtgcatttggagtcactagaagtatgtgggcagatgatgctaagaagttatgtccagatcttctactggcacaagttcgtgagtcccgtgggaaagctaacctcaccaagtaccgggaagccagtgttgaagtgatggagataatgtctcgttttgctgtgattgaacrtgccagcattgatgaggcttacgtagatctgmccagtgctgtayaagagagactacaaaagctacaaggtcagcctatctcggcagacttgttgccaagcacttacattgaaggkttgccccaaggccctacaacggcagaagagactgttcagaaagaggggatgcgaaaacaaggcttatttcaatggctcgattctcttcagattgataacctcacctctccagacctgcagctcaccgtgggagcagtgattgtggaggaaatgagagcagccatagagagggagactgkttttcagtgttcagctggaatttcacacaataaggtcctggcaaaactggcytgtggactaaacaagcccaaccgccaaaccctggtttcacatgggtcagtcccacagctcttcagccaaatgcccattcgcaaaatccgtagtcttggaggaaagctaggggcctctgtcattgagatcctagggatagaatacatgggtgaactgacccagttcactgaatcccagctccagagtcattttggggagaagaatgggtcttrgctatatgccatgtgccgagggattgaacatgatccagttaaacccaggcaactacccaaaaccattggctgtagtaagaacttcccaggaaaaayagctcttgctactcgggaacaggtacaatggtggctgttgcaattagcccaggaactagaggagagactgactaaagaccgaaatgataatgacagggtagccacccagctggttgtgagcattcgtgtayaaggagacaaacgcctcagcagcctgcgccgctgctgtgcccttacccgctatgatgctcacaagatgagccatgatgcatttactgtcatcaagaactgtaatacttctggaatccagacagaatgacatcaccagcttcttgagcagtgacccaagttctctgccaaaggtgccagttaccagctcagaagctaagacccagggaagtggcccagcggtgacagccactaagaaagcaaccacrtctctggaatcattcttccaaaaagctgcagaaaggcagaaagttaaagaagcttcgctttcatctcttactgctcccactcaggctcccatgagcaattcaccatccaagccctcattaccttttyaaaccagtcaaagtacaggaactgagcccttctttaagcagraaagtctgcttctaaagcagaaacagcttaataattcttmagtttcttccccccaacaaaacccatggtccaactgtaaagcattaccaaactctttaccaacagagtatccagggtgtgtccctgtttgtgaaggggtgtcgaagcyagaagaatcctctamagcaactcctgcagagrtggatttggcccacaacagccaaagcatgcacgcctcttcagcttccaaatctgtgctggaggtgactcagaaagcaaccccaaatccaagtcttctagctgctgaggaccaagtgccctgtgagaagtgtggctccctggtaccggtatgggatwtgccagaacacatggactatcattttgcattggagttgcagaaatcctttttgcagccccactcttcaaacccccaggttgtttctgccgtatctcatcaaggcaaaagaaatcccaagagccctttggcctgcactaataaacgccccaggcctgagggcatgcaaacattggaatcattttttaagccattaacacattagtgctgccctcaggcttgcctgtaggatttaatattttttatctttacagrtctttatctttaatattttatctttacagatttccctgagaaagggaattatgaaatttttaatacaaaaaataatccatttaggtgctgagttacggtcccatctcttcacaggcatggattctaatcccactgctgacagagatgtaaaaattcatcctaccagagtttttaatctttagcatttagggaggcagtgtcataaagtaaaaagtgtgtgggccttggagtctaagagacgtggttgcaaacttagctctggttattgcaatgagggccttgaacaagtcattttcttcacattctcatctgtaaaatggagataataccttacagattattgcagattaataacaatgtattcaaattatgtaactcggccgggtacaatggctcacgcctgtaatcctaacactttgggaggccgaggcagacagatcacctgaggtcaggagtttgagaccagcctggccaacatggcaaaaccatctctactaaaaatagaaaaattagccaggcacgttccaggcacctgtgatcccagctacttagaggctgaggcagaagaattgctttaaccttggaggcggaggttgcattgagctgagatcatgctagtgcgctccagcctgggcaacagagcgagacttcatctcagaaaataaaaaataggggccaggcacagtggctcatacctgtaatgccagcactttgggaggccaaggcgggcagatcacgaggtcaggagtttcagaccaatatggtgaaaccccatctctactaaaattacaaaaaaaattatccaggcgtggtggtgcacgcctgtaatcccagctactcrggaggctaaggcaggagaatcacttgaacccaggaggcagaggttggagtgagctgagatygcgccaccgcactccagcctgggcaacagagcgagactccatctcaaacaaaaacaagaacaaaaacaaacataaagttggcacagaaaagggaccaagtttaaaaaagggttttaaatgtaatgagacttgcatagttaaaaaaaaaaaagg

SEQ ID NO: 2212 - DNA, 9914 bp, Homo sapiens
aggctgcggcggagccccggcggggcgtttggtttcggtttsgccctgactgggattagtgttgacgatcgaaatgggagtccccaagttttacagatggatctcagagcggtatccctgtctcagcgaagtggtgaaagagcatcagattcctgaatttgacaacttgtacctggatatgaatggaattatacatcagtgctcccatcctaatgatgatgatgttcactttagaatttcagatgataaaatctttactgatatttttcactacctggaggtgttgtttcgcattattaaacccaggaaagtgttctttatggctgtagatggtgtggctcctcgagcaaaaatgaaccagcagcgtgggaggcgttttaggtcagcaaaggaggcagaagacaaaattaaaaaggcaatagagaagggagaaactcttcctacagaggccagatttgattccaactgtatcacaccaggaactgaatttatggccaggttacatgaacatctgaagtattttgtaaatatgaaaatttccacagacaagtcatggcaaggagttaccatctacttctcaggccatgagactcctggagaaggagagcataaaatcatggaatttatcagatccgagaaagcaaagccagatcatgatccaaacaccagacactgtctttatggtttagatgctgacttgattatgcttggattaacaagtcatgaggcacatttttctctcttaagagaagaagttcgatttggtggcaaaaaaacacaacgggtatgtgctccagaagaaactacatttcaccttctacacttgtctttaatgagagagtatattgactatgagttttcagtattaaaagaaaagatcacatttaaatatgatattgaaaggataatagatgattggattttgatggggtttcttgttggtaatgattttatccctcatctacctyatttacatattaatcatgatgcactgcctcttctttatggaacatatgttaccatcctgycagaacttgggggttatattaatgaaagtgggcacctcaacttacctcgatttgagaaataccttgtgaaactatcagattttgatcgggagcacttcagtgaagtttttgtggacctaaaatggtttgaaagcaaagttggtaacaagtacctcaatgaagcagcaggtgtcgcagcagaagaagccaggaactacaaggaaaagaaaaagttaaagggccaggaaaattctctgtgttggactgctttagacaaaaatgaaggcgaaatgataacttctaaggataatttagaagatgagactgaagatgatgacctatttgaaactgagtttagacaatataaaagaacatattacatgacgaagatgggggttgacgtagtatctgatgactttctggctgatcaagctgcatgttatgttcaggcaatacagtggattttgcactattactatcatggagttcagtcctggagctggtattatccttatcattatgcacctttcctgtctgatatacacaacatcagtacactcaaaatccattttgaactaggaaaaccttttaagccatttgaacagcttcttgctgtacttccagcagccagcaaaaatttacttcctgcatgctaccagcatttgatgaccaatgaagactcaccaattatagaatattacccacctgattttaaaactgacctaaatgggaaacaacaggaatgggaagctgtggtgttaatcccttttattgatgagcgattattggaagccatggagacatgtaaccactccctcaaaaaggaagagaggaaaagaaaccaacatagtgartgcctaatgtgctggtatgatagagacacagagtttatctatccttctccatggccagaaaagttccctgccatagaacgatgttgtacaaggtataaaataatatccttagatgcttggcgtgtagacataaacaaaaacaaaataaccagaattgaccagaaagcattatatttctgtggatttcctactctgaaacacatcagacacaaattttttttgaagaaargtggtgttcaagtattccagcaaagcagtcgtggagaaaacatgatgttggaaatcttagtggatgcagaatcagatgaacttaccgtagaaaatgtagcttcatcagtgcttggaaaatctgtctttgttaattggcctcaccttgaggaagctagagtcgtggctgtatcagatggagaaactaagttttacttggaagaacctccaggaacacagaagctttattcaggaagaactgccccaccatctaaagtggttcatcttggagataaagaacaatctaactgggcaaaagaagtacaaggaatttcagaacactacctgagaagaaaaggaataataataaatgaaacatctgcagttgtgtatgctcagttactcacaggtcgtaaatatcaaataaatcaaaatggtgaagttcgtctagagaaacagtggtcaaaacaagttgttccttttgtttatcaaactattgtcaaggacatccgagctttcgactcccgtttctccaatatcaaaacattggatgatttgtttcctctgagaagtatggtctttatgctgggaactccctattatggctgcactggagaagttcaggattcaggtgatgtgattacagaaggtaggattcgtgtgattttcagcattccatgtgaacccaatcttgatgctttaatacagaaccagcataaatattctataaagtacaacccaggatatgtgttggccagtcgccttggagtgagtggataccttgtttcaaggtttacaggaagtatttttattggaagaggatctaggagaaaccctcatggagaccataaagcaaatgtgggtttaaatctcaaattcaacaagaaaaatgaggaggtacctggatatactaagaaagttggaagtgaatggatgtattcatctgcagcagaacaacttctggcagagtacttagagagagctccagaactatttagttatatagccaaaaatagccaagaggatgtgttctatgaagatgacatttggcctggagaaaatgagaatggtgctgaaaaagttcaagaaattattacttggctaaaaggacatcctgtcagtactttatctcgttcttcttgtgatttacaaattctggatgcagctattgttgagaaaattgaggaagaagtcgaaaagtgcaagcaaagaaagaataataagaaggtgcgagtaacagtgaaaccccatttgctatacagacctttagaacagcaacatggagtcattcctgatcgggatgcagaattttgtctttttgaccgtgttgtaaatgtgagagaaaacttctcagttccagttggccttcgaggcaccatcataggaataaaaggagctaatagagaagccgatgtactatttgaagtattatttgatgaagaatttcctggagggttaacaataagatgctcacctggtagaggttatcgactgccaacaagtgccttggtgaacctttctcatgggagtcgctctgaaactggaaatcagaagttgacagccatcgtaaaaccacaaccagctgtacatcaacatagctcaagttcatcagtttcctctgggcatttgggagccctcaaccattcccctcaatcactttttgttcctactcaagtacctactaaagatgatgatgaattctgcaacatttggcagtccttacagggatctggaaagatgcaatactttcagccaactatacaagagaagggtgcagytctacctcaagaaataagccaagtaaatcaacatcataaatctggctttaatgacaacagtgttaaatatcagcaaagaaaacatgaccctcacagaaaatttaaagaagagtgtaagagtcctaaagctgagtgttggtcccaaaaaatgtccaataagcagcctaactctggaattgagaactttttagcatctttgaatatctccaaagaaaatgaagtacagtcatctcatcatggggagcctccaagtgaagagcatttgtcaccacagtcatttgccatgaagggaacacggatgcttaaagaaattctaaaaattgatggctctaacactgtggaccataagaatgaaatcaaacagattgctaatgaaatccctgtttcctctaacagaagagatgaatatggattaccctctcagcctaaacaaaataagaaattagcatcttatatgaacaagcctcacagtgctaatgagtaccataatgttcagtctatggacaatatgtgttggcctgcccccagccagatccctcctgtatccacaccagtaactgaactttctcgaatttgttcccttgttggaatgccacaacctgatttctcctttcttaggatgccacagacaatgaccgtttgccaagtaaaattatctaatggcttactggtacatgggccacagtgccactctgaaaatgaagccaaagagaaagctgcactttttgctttacaacagttgggctccttaggcatgaatttccctttgccttcacaagtatttgcaaattatccttcagctgtaccacctggaaccattcctccagcctttcccccacctactgctaatataatgccttcgtcgtctcatctctttggctcaatgccatggggaccatcggtgccagttcctgggaagcccttccatcatactttatattctgggaccatgcccatggctgggggaataccagggggtgtgcacaatcagtttatacctctgcaggttactaaaaaaagggttgcaaacaaaaagaactttgagaataaggaagcccagagttctcaagccactccagttcagactagccagccagattcttccaacattgtcaaagtaagtccacgggagagctcatcagcttctttgaagtcctctccgattgctcaacctgcatcttcttttcaagttgaaactgcctctcaaggccatagtatatctcaccataagtcaacaccaatctcttcttcaagaagaaaatcaagaaaactggctgttaattttggtgtttctaaaccttctgagtaaatttggctcttagaattaagttaatttcttctctttccatctacctttttataaatacatatctatgtctcataaaaattagaatgtactattttaaaataayatgtgtaaattgaaatttttttcatttttaagttatcaggcacttttcatgctgtttaaaagactgtgtatcaaattgtgcactttaagtatgtgcagtttgttgtatgtcaattatacctcaataaatctgtaataaaaaactaaattaaaccttgcattaaaataatatcacagtatcagtggactaaacattaaaatgtaccactctaatcattggcctcatgattgaagcatcctgaactatgaattagacatcagttagcaataataagcattttttacactatcattgaggaataattacatggagcatgaaatttgggcctccagtataacttactgaatgtggattttatttctctttttaatgatgtaagaaaattgtcaggagaatggctcttatttatgtgtgttttaacttatgctttgttgcctctgagggtctttagacctgctgtgaaaggatcacatttgttgtggtgctgccagttttgctttattctaaattttgtaccaaagcaactttagaataatcagaatatttcatctaactgcttagaactataaatagcattctaaatttgagtaaatacaattttttaggttactcaagaaccagcattagtaatttctagtaaaattgtttcaaaatctacagggtacaatgattacaaattaatcttctaacaaaataaaatatgaaatattagtcatgttaattaataaactgtattattttgtatagctttttatttgcttacctgacattttatgagagcttcatagttggtcggtatgtagtgcttcttgggactgaagaaattctaattgttgtttaagttccaaggtgtgctacaatataggaggcacagtcatcagtttgtgacatacattatttactgcctatttcattctgattctatatttttagctttatgctgaactgttcaatgatgctgggattctctctttgcatgtcatatgtgaatgtgtggttcaagctgtaactgttgaaattattttagaatttatgacgatttctcagcagggcctatgtttatatatatatatatatttattctttagtttttgtgatatgcttatatttttaaggaagtaagttatagcatacttttttaaaagtaggaaccacaatctttatatggagcagcttgttatatctgattttcatgtaactcattggaaactctgccatgactcttaaagtagtcttacttgttttttaaaatgctggtattaaactaaatggactcctttcactaactgctgatttcagagtttaaatgttagcaggatatttgtgtattagcagtgccttcagtataagagagaaatattcattatctgtcatttatcatagtcgtataagtttccatgattttattttctgttattttcataagttcagatgtttatcagttcccaacattgtttctttatctgtagtgggatcttgagtaatgaggctcaagtaaatcctcaatgtgtataattattgcctcataaactctctctttgtttttaaaggaaacatctattatggtaatacaaagaaaagttaaattgtgacagtaatgttatattaacctcttcctactttaaagtgtgaaatgtttcacctcagctgtacaaactccagcattgagaatttgcctcactcattactcctgtgtgacagttatataaatagcatgcagctcacatctgttttagagcatagaagaagcggcacctgccatcttctgaaaactccaaagggaaatttcagtagacatagtgcactaaacccataaggatacttgaccaatatttgagcacagcaagctgacagttctatacagataggcagtgaaagagttttattttccagccaggcgcagtggctcaaatcccagcacttcgggaggctaaggcaggcggatcacttgaggtccggagttccagacaagcctggccaacatgatgaagccctgtctctactaaaaatacaaaaattaaaaaaagaaaaaagttttattatccttactttttttttaacattattattctaaaggtcaaaactgagaagagattaagataggagagagctccataatggctggatagtggtcaggcattctctattcttttccccctgtagacccattctaaatgtgggcctgaggtcaatgggagatgtgccctccctatggaggatgtaagaagcagaggccatttctgccccatgttgaggaaacaatctgttgatagacctggaatttagagtayatctgaaaagcagttggacttcaagaaatttaaaattctctctttgagatggggtggactaagaccacccccaaagtttaaaaatatgctcattcaacttgaatcttctgaggactttttgtgaaaatggtggactgtttagggcataggacagattccccaaattgctttatgcttccacataactagagcacttcaatctatttaagcctttgtctcctaactgaaacattatttctaaatatttctattcaataagttttttcttttttgagcaacttaagtgaattttgaagattgctccttccagtctcgttccttttcacattttcctgcattacctaataattacctcagcgttagaatttgaatgtattaattgatttaaacatcatgtagactaaagtcttaaacatctaagactcagttgtagttgcagaaaaaaattaaagtcacctctactgaaccttggtttcaatttaagatttttcttgcttttcaaaggggtaactaataaagattgaagggtttttttcccgattggtggaggaatgaagaactattgatgcaagtttttttattgtttctttctatgatcaggtacctgctttcattttagactgctacttccaaactaagctagattcttggttttaatgagaggaggcagagagagggaggcagatggaagaagaaaaacagttaaataagacatacccagtcactgcatttttggactataccgtatctttctagcacaaggaaatagataaactgtaaggtcttttttactcactttttatttatgtgttctatttgtgttagtcataactgtttatagtggttgtctaatttttacttttattatatgagatagagctgtgcagatcttcactcaagttagttctgtcacgcttcttcccattatttagagcacagttttttaaagcaactgtacaatttctcagccttatgagcttgctgtatttcttggtatcatgttgcttccaaattttgtttttactgtagaagacaattaatttattgtagagaagtggctgtgaaagtcgttctctgtctttaaaaatcaattgcagaagttcatttgtcatttttctagagataaattatagtactcaaactggcagtgctcagtatatacattttgtaagctttgtcagtgaaaccatcagttttgcaggagcttcctttcctagtcaagataaagcttaaaattccagaaattaatgtcgttcggactgactttattcatatttccatcaaacttctccaatacagtaagagatagtgttgaaccagcatcaagtctccagaaacatggcagagcagacaggccgttaagtttcacagacatcatagatccttttcttaaagaagaaaaacatgtataaaatagttttagtagtccaaaatgtcaactatctgtagctgcttttgtgtgtgtgtcagtgaacaaataataatgccttgctcaatcaatgcattcagccatctcaagtgcaatttgtgaaggagactatggtttccaaaagatacatttttttacaaagttaaacctgtaaaaagtctttttttttttccctccagccgtacaccaactgcacttggttgtttcagcagttggtatactattaaattgtccaggccaaataggtttctgtagctgttttagtaatttgaagccaaattctcatgctgtttctcattaaaaagaatgagaatttggtccatagttagctttaagttctctcttcctttctttcccttacagttaagggtttggtgggggatggggaggttgttttcgttttttggatttttttgtcttttggctttaagtatcatattttcttttgcctgtatccaactgcttctttgagtattttcatctagtttaatgtgagtaatagatgctgtgctgtcattgaagtgttcaacattttgttcatttaaacaaaagtgtaattcatacatatatagatacatatcttaattgatttctcaactattttataagtaactggaatttttcattagatcttatacagagaagtattttattaaaaattcaaaagggaagacttttatgtgctcattttgtaatttttgattttaaatatctttacattgtctgccaattaaagtgttttaaacttgcattggaatggactccgaatgtatttttgtggtgttacgttatccgtagatttctagcatgaagttagcctcacgatgctgtgcaaaggattttaaaatatgagagtcmctgaaagagtttaaacatctgttcatgttaaatgctctatggattttaattaaagacttgagaatgattttataagct

SEQ ID NO: 2213 - DNA, 9917 bp, Homo sapiens
aggctgcggcggagccccggcggggcgtttggtttcggtttsgccctgactgggattagtgttgacgatcgaaatgggagtccccaagttttacagatggatctcagagcggtatccctgtctcagcgaagtggtgaaagagcatcagattcctgaatttgacaacttgtacctggatatgaatggaattatacatcagtgctcccatcctaatgatgatgatgttcactttagaatttcagatgataaaatctttactgatatttttcactacctggaggtgttgtttcgcattattaaacccaggaaagtgttctttatggctgtagatggtgtggctcctcgagcaaaaatgaaccagcagcgtgggaggcgttttaggtcagcaaaggaggcagaagacaaaattaaaaaggcaatagagaagggagaaactcttcctacagaggccagatttgattccaactgtatcacaccaggaactgaatttatggccaggttacatgaacatctgaagtattttgtaaatatgaaaatttccacagacaagtcatggcaaggagttaccatctacttctcaggccatgagactcctggagaaggagagcataaaatcatggaatttatcagatccgagaaagcaaagccagatcatgatccaaacaccagacactgtctttatggtttagatgctgacttgattatgcttggattaacaagtcatgaggcacatttttctctcttaagagaagaagttcgatttggtggcaaaaaaacacaacgggtatgtgctccagaagaaactacatttcaccttctacacttgtctttaatgagagagtatattgactatgagttttcagtattaaaagaaaagatcacatttaaatatgatattgaaaggataatagatgattggattttgatggggtttcttgttggtaatgattttatccctcatctacctyatttacatattaatcatgatgcactgcctcttctttatggaacatatgttaccatcctgycagaacttgggggttatattaatgaaagtgggcacctcaacttacctcgatttgagaaataccttgtgaaactatcagattttgatcgggagcacttcagtgaagtttttgtggacctaaaatggtttgaaagcaaagttggtaacaagtacctcaatgaagcagcaggtgtcgcagcagaagaagccaggaactacaaggaaaagaaaaagttaaagggccaggaaaattctctgtgttggactgctttagacaaaaatgaaggcgaaatgataacttctaaggataatttagaagatgagactgaagatgatgacctatttgaaactgagtttagacaatataaaagaacatattacatgacgaagatgggggttgacgtagtatctgatgactttctggctgatcaagctgcatgttatgttcaggcaatacagtggattttgcactattactatcatggagttcagtcctggagctggtattatccttatcattatgcacctttcctgtctgatatacacaacatcagtacactcaaaatccattttgaactaggaaaaccttttaagccatttgaacagcttcttgctgtacttccagcagccagcaaaaatttacttcctgcatgctaccagcatttgatgaccaatgaagactcaccaattatagaatattacccacctgattttaaaactgacctaaatgggaaacaacaggaatgggaagctgtggtgttaatcccttttattgatgagaagcgattattggaagccatggagacatgtaaccactccctcaaaaaggaagagaggaaaagaaaccaacatagtgartgcctaatgtgctggtatgatagagacacagagtttatctatccttctccatggccagaaaagttccctgccatagaacgatgttgtacaaggtataaaataatatccttagatgcttggcgtgtagacataaacaaaaacaaaataaccagaattgaccagaaagcattatatttctgtggatttcctactctgaaacacatcagacacaaattttttttgaagaaargtggtgttcaagtattccagcaaagcagtcgtggagaaaacatgatgttggaaatcttagtggatgcagaatcagatgaacttaccgtagaaaatgtagcttcatcagtgcttggaaaatctgtctttgttaattggcctcaccttgaggaagctagagtcgtggctgtatcagatggagaaactaagttttacttggaagaacctccaggaacacagaagctttattcaggaagaactgccccaccatctaaagtggttcatcttggagataaagaacaatctaactgggcaaaagaagtacaaggaatttcagaacactacctgagaagaaaaggaataataataaatgaaacatctgcagttgtgtatgctcagttactcacaggtcgtaaatatcaaataaatcaaaatggtgaagttcgtctagagaaacagtggtcaaaacaagttgttccttttgtttatcaaactattgtcaaggacatccgagctttcgactcccgtttctccaatatcaaaacattggatgatttgtttcctctgagaagtatggtctttatgctgggaactccctattatggctgcactggagaagttcaggattcaggtgatgtgattacagaaggtaggattcgtgtgattttcagcattccatgtgaacccaatcttgatgctttaatacagaaccagcataaatattctataaagtacaacccaggatatgtgttggccagtcgccttggagtgagtggataccttgtttcaaggtttacaggaagtatttttattggaagaggatctaggagaaaccctcatggagaccataaagcaaatgtgggtttaaatctcaaattcaacaagaaaaatgaggaggtacctggatatactaagaaagttggaagtgaatggatgtattcatctgcagcagaacaacttctggcagagtacttagagagagctccagaactatttagttatatagccaaaaatagccaagaggatgtgttctatgaagatgacatttggcctggagaaaatgagaatggtgctgaaaaagttcaagaaattattacttggctaaaaggacatcctgtcagtactttatctcgttcttcttgtgatttacaaattctggatgcagctattgttgagaaaattgaggaagaagtcgaaaagtgcaagcaaagaaagaataataagaaggtgcgagtaacagtgaaaccccatttgctatacagacctttagaacagcaacatggagtcattcctgatcgggatgcagaattttgtctttttgaccgtgttgtaaatgtgagagaaaacttctcagttccagttggccttcgaggcaccatcataggaataaaaggagctaatagagaagccgatgtactatttgaagtattatttgatgaagaatttcctggagggttaacaataagatgctcacctggtagaggttatcgactgccaacaagtgccttggtgaacctttctcatgggagtcgctctgaaactggaaatcagaagttgacagccatcgtaaaaccacaaccagctgtacatcaacatagctcaagttcatcagtttcctctgggcatttgggagccctcaaccattcccctcaatcactttttgttcctactcaagtacctactaaagatgatgatgaattctgcaacatttggcagtccttacagggatctggaaagatgcaatactttcagccaactatacaagagaagggtgcagytctacctcaagaaataagccaagtaaatcaacatcataaatctggctttaatgacaacagtgttaaatatcagcaaagaaaacatgaccctcacagaaaatttaaagaagagtgtaagagtcctaaagctgagtgttggtcccaaaaaatgtccaataagcagcctaactctggaattgagaactttttagcatctttgaatatctccaaagaaaatgaagtacagtcatctcatcatggggagcctccaagtgaagagcatttgtcaccacagtcatttgccatgaagggaacacggatgcttaaagaaattctaaaaattgatggctctaacactgtggaccataagaatgaaatcaaacagattgctaatgaaatccctgtttcctctaacagaagagatgaatatggattaccctctcagcctaaacaaaataagaaattagcatcttatatgaacaagcctcacagtgctaatgagtaccataatgttcagtctatggacaatatgtgttggcctgcccccagccagatccctcctgtatccacaccagtaactgaactttctcgaatttgttcccttgttggaatgccacaacctgatttctcctttcttaggatgccacagacaatgaccgtttgccaagtaaaattatctaatggcttactggtacatgggccacagtgccactctgaaaatgaagccaaagagaaagctgcactttttgctttacaacagttgggctccttaggcatgaatttccctttgccttcacaagtatttgcaaattatccttcagctgtaccacctggaaccattcctccagcctttcccccacctactgctaatataatgccttcgtcgtctcatctctttggctcaatgccatggggaccatcggtgccagttcctgggaagcccttccatcatactttatattctgggaccatgcccatggctgggggaataccagggggtgtgcacaatcagtttatacctctgcaggttactaaaaaaagggttgcaaacaaaaagaactttgagaataaggaagcccagagttctcaagccactccagttcagactagccagccagattcttccaacattgtcaaagtaagtccacgggagagctcatcagcttctttgaagtcctctccgattgctcaacctgcatcttcttttcaagttgaaactgcctctcaaggccatagtatatctcaccataagtcaacaccaatctcttcttcaagaagaaaatcaagaaaactggctgttaattttggtgtttctaaaccttctgagtaaatttggctcttagaattaagttaatttcttctctttccatctacctttttataaatacatatctatgtctcataaaaattagaatgtactattttaaaataayatgtgtaaattgaaatttttttcatttttaagttatcaggcacttttcatgctgtttaaaagactgtgtatcaaattgtgcactttaagtatgtgcagtttgttgtatgtcaattatacctcaataaatctgtaataaaaaactaaattaaaccttgcattaaaataatatcacagtatcagtggactaaacattaaaatgtaccactctaatcattggcctcatgattgaagcatcctgaactatgaattagacatcagttagcaataataagcattttttacactatcattgaggaataattacatggagcatgaaatttgggcctccagtataacttactgaatgtggattttatttctctttttaatgatgtaagaaaattgtcaggagaatggctcttatttatgtgtgttttaacttatgctttgttgcctctgagggtctttagacctgctgtgaaaggatcacatttgttgtggtgctgccagttttgctttattctaaattttgtaccaaagcaactttagaataatcagaatatttcatctaactgcttagaactataaatagcattctaaatttgagtaaatacaattttttaggttactcaagaaccagcattagtaatttctagtaaaattgtttcaaaatctacagggtacaatgattacaaattaatcttctaacaaaataaaatatgaaatattagtcatgttaattaataaactgtattattttgtatagctttttatttgcttacctgacattttatgagagcttcatagttggtcggtatgtagtgcttcttgggactgaagaaattctaattgttgtttaagttccaaggtgtgctacaatataggaggcacagtcatcagtttgtgacatacattatttactgcctatttcattctgattctatatttttagctttatgctgaactgttcaatgatgctgggattctctctttgcatgtcatatgtgaatgtgtggttcaagctgtaactgttgaaattattttagaatttatgacgatttctcagcagggcctatgtttatatatatatatatatttattctttagtttttgtgatatgcttatatttttaaggaagtaagttatagcatacttttttaaaagtaggaaccacaatctttatatggagcagcttgttatatctgattttcatgtaactcattggaaactctgccatgactcttaaagtagtcttacttgttttttaaaatgctggtattaaactaaatggactcctttcactaactgctgatttcagagtttaaatgttagcaggatatttgtgtattagcagtgccttcagtataagagagaaatattcattatctgtcatttatcatagtcgtataagtttccatgattttattttctgttattttcataagttcagatgtttatcagttcccaacattgtttctttatctgtagtgggatcttgagtaatgaggctcaagtaaatcctcaatgtgtataattattgcctcataaactctctctttgtttttaaaggaaacatctattatggtaatacaaagaaaagttaaattgtgacagtaatgttatattaacctcttcctactttaaagtgtgaaatgtttcacctcagctgtacaaactccagcattgagaatttgcctcactcattactcctgtgtgacagttatataaatagcatgcagctcacatctgttttagagcatagaagaagcggcacctgccatcttctgaaaactccaaagggaaatttcagtagacatagtgcactaaacccataaggatacttgaccaatatttgagcacagcaagctgacagttctatacagataggcagtgaaagagttttattttccagccaggcgcagtggctcaaatcccagcacttcgggaggctaaggcaggcggatcacttgaggtccggagttccagacaagcctggccaacatgatgaagccctgtctctactaaaaatacaaaaattaaaaaaagaaaaaagttttattatccttactttttttttaacattattattctaaaggtcaaaactgagaagagattaagataggagagagctccataatggctggatagtggtcaggcattctctattcttttccccctgtagacccattctaaatgtgggcctgaggtcaatgggagatgtgccctccctatggaggatgtaagaagcagaggccatttctgccccatgttgaggaaacaatctgttgatagacctggaatttagagtayatctgaaaagcagttggacttcaagaaatttaaaattctctctttgagatggggtggactaagaccacccccaaagtttaaaaatatgctcattcaacttgaatcttctgaggactttttgtgaaaatggtggactgtttagggcataggacagattccccaaattgctttatgcttccacataactagagcacttcaatctatttaagcctttgtctcctaactgaaacattatttctaaatatttctattcaataagttttttcttttttgagcaacttaagtgaattttgaagattgctccttccagtctcgttccttttcacattttcctgcattacctaataattacctcagcgttagaatttgaatgtattaattgatttaaacatcatgtagactaaagtcttaaacatctaagactcagttgtagttgcagaaaaaaattaaagtcacctctactgaaccttggtttcaatttaagatttttcttgcttttcaaaggggtaactaataaagattgaagggtttttttcccgattggtggaggaatgaagaactattgatgcaagtttttttattgtttctttctatgatcaggtacctgctttcattttagactgctacttccaaactaagctagattcttggttttaatgagaggaggcagagagagggaggcagatggaagaagaaaaacagttaaataagacatacccagtcactgcatttttggactataccgtatctttctagcacaaggaaatagataaactgtaaggtcttttttactcactttttatttatgtgttctatttgtgttagtcataactgtttatagtggttgtctaatttttacttttattatatgagatagagctgtgcagatcttcactcaagttagttctgtcacgcttcttcccattatttagagcacagttttttaaagcaactgtacaatttctcagccttatgagcttgctgtatttcttggtatcatgttgcttccaaattttgtttttactgtagaagacaattaatttattgtagagaagtggctgtgaaagtcgttctctgtctttaaaaatcaattgcagaagttcatttgtcatttttctagagataaattatagtactcaaactggcagtgctcagtatatacattttgtaagctttgtcagtgaaaccatcagttttgcaggagcttcctttcctagtcaagataaagcttaaaattccagaaattaatgtcgttcggactgactttattcatatttccatcaaacttctccaatacagtaagagatagtgttgaaccagcatcaagtctccagaaacatggcagagcagacaggccgttaagtttcacagacatcatagatccttttcttaaagaagaaaaacatgtataaaatagttttagtagtccaaaatgtcaactatctgtagctgcttttgtgtgtgtgtcagtgaacaaataataatgccttgctcaatcaatgcattcagccatctcaagtgcaatttgtgaaggagactatggtttccaaaagatacatttttttacaaagttaaacctgtaaaaagtctttttttttttccctccagccgtacaccaactgcacttggttgtttcagcagttggtatactattaaattgtccaggccaaataggtttctgtagctgttttagtaatttgaagccaaattctcatgctgtttctcattaaaaagaatgagaatttggtccatagttagctttaagttctctcttcctttctttcccttacagttaagggtttggtgggggatggggaggttgttttcgttttttggatttttttgtcttttggctttaagtatcatattttcttttgcctgtatccaactgcttctttgagtattttcatctagtttaatgtgagtaatagatgctgtgctgtcattgaagtgttcaacattttgttcatttaaacaaaagtgtaattcatacatatatagatacatatcttaattgatttctcaactattttataagtaactggaatttttcattagatcttatacagagaagtattttattaaaaattcaaaagggaagacttttatgtgctcattttgtaatttttgattttaaatatctttacattgtctgccaattaaagtgttttaaacttgcattggaatggactccgaatgtatttttgtggtgttacgttatccgtagatttctagcatgaagttagcctcacgatgctgtgcaaaggattttaaaatatgagagtcmctgaaagagtttaaacatctgttcatgttaaatgctctatggattttaattaaagacttgagaatgattttataagct

SEQ ID NO: 2214 - DNA, 2736 bp, Homo sapiens
cccctacctctttcccggatggcctcttagacgaccttggattggttaaagttctttagaacccgcctatacactgttcctattggtccctggatacaaacaacgacgccattttcccaccagttctatggaaacagaaagttacgcctcaaggctttctgggaaataaagtccatactctggggccaacgcgcaaatcctcgtccgcgagaactgcaaggcccgcaatgccctgcgcctgcgtggaccggtaaacaagtgagaaccaaactttcacaggcatttaatcattggctgaaagttccagaggacaagctacagattattattgaagtgacagaaatgttgcataatgccagtttactcatcgatgayattgaagacaactcaaaactccgacgtggctttccagtggcccacagcatctatggaatcccatctgtcatcaattctgccaattacgtgtatttccttggcttggagaaagtcttaacccttgatcacccagatgcrgtgaagctttttacccgccagcttttggaactccatcagggacaaggcctagatatttactggagggataattacacttgtcccactgaagaagaatataaagctatggtgctgcagaaaacaggtggactgtttggattagcagtaggtctcatgcagttgttctctgattacaaagaagatttaaaaccgctacttaatacacttgggctctttttccaaattagggatgattatgctaatctacactccaaagaatatagtgaaaacaaaagtttttgtgaagatctgacagagggaaagttctcatttcctactattcatgctatttggtcaaggcctgaaagcacccaggtgcagaatatcttgcgccagagaacagaaaacatagatataaaaaaatactgtgtacattatcttgaggatgtaggttcttttgaatacactcgtaatacccttaaagagcttgaagctaaagcctataaacagattgatgcacgtggtgggaaccctgagctagtagccttagtaaaacacttaagtaagatgttcaaagaagaaaatgaataatgttaagccattcttgattggacctcatagcttattttagttaatcttttttttgtcttttagccttaccaccttttaaaaaatttgttattctccagaaacagtaaataggtgagtaggggtggtgcaagtgaattcgttttcatttagaagcccctctgtacagataatcaaaattcaaagttgaaagaatcaaaagcagccacagttatgtaggtctgatttgaatgtcataattgcagtgacaggacattgccmccaactctatcctactaccatcaatgttgtgtttattccgtcaataaaaaagacttgcttccaggaatttttatccatacactttctaactgtactatctgggcagttccaagccagtttctattagctagctggaccaaagaccacaaatctctttttttcctraacgctgctgtaaggaatatctcacttttccccccggaaacaccctcactgaagtcttctatgaaaaggctgataatgggctgggcgcggtggctcacgcctgtaatcccagcactttgggaggccgaggcgggcagatcacgaggtcaggagatcgagaccatcctgacacggtgaaaccctgtctctactaaaaatacaaaaaattagctgggcgtggtggtgggcgcctgtagtcccagctactcgggaggctgaggcaggagaatggtgtgaacccaggaggcggagcttgcagtgagccgagatagtgcctctgcactccagcctgggtgacagagcragactccgtctcaaaaaaaaagggctgataatgataaacagtgagcactccggtcctttttcttasgttttccttttttccttcctctccaccccacaagttttgctttttaaccaaggtgtctctgcttgatgaaattcacatgctagtctaaatctttttttctcccttgtaacatttatgtgccccaaactggttagtatatgggtacagcattccctttccaattgggaagcggaaaaagagagtatgggatattttagaagggagcctttgaaccttattatatttccccatcattgatagtgacaatcttaaaagggttgttttcttaccttaagtacaaaagcatggaaaaatgcgcttttccttcccgcccacatcaccaccccgacttgaagacagtaggtgcttgaatggaaagtgagtaggcatctttaatcgccctgattaaaggaaagtgttagcctgagagggcctgactgaaaagtaaccaaaggcttaatatcaaacactaattagctttttagtgccttaaccctgacctggttaccagttttctgtagtttctacacccaagccactgaagtcatctgtggcccaagaggtaggacaaaaaaaaaaaaaaaaaaagctgatttcaatatttgatttgttgacatcccaaaatgaaagttttatgtttcccttagaaacatgttttgcttggttctatagtatgttacttaggatctatttaccatatatttgtatgagaaatcctcacccaagcattcaacctaaatctttgaaaagttgggtgctgtctttagtaacttttaaaatagtttaaatctcccattttaatagtgataaggaaacctgttaaaatcatggctattgatgtt

SEQ ID NO: 2215 - DNA, 2829 bp, Homo sapiens
cccctacctctttcccggatggcctcttagacgaccttggattggttaaagttctttagaacccgcctatacactgttcctattggtccctggatacaaacaacgacgccattttcccaccagttctatggaaacagaaagttacgcctcaaggctttctgggaaataaagtccatactctggggccaacgcgcaaatcctcgtccgcgagaactgcaaggcccgcaatgccctgcgcctgcgtggaccgattagctttgaagtttaaatccaatggagaagactcaagaaacagtccaaagaattcttctagaaccctataaatacttacttcagttaccaggtaaacaagtgagaaccaaactttcacaggcatttaatcattggctgaaagttccagaggacaagctacagattattattgaagtgacagaaatgttgcataatgccagtttactcatcgatgayattgaagacaactcaaaactccgacgtggctttccagtggcccacagcatctatggaatcccatctgtcatcaattctgccaattacgtgtatttccttggcttggagaaagtcttaacccttgatcacccagatgcrgtgaagctttttacccgccagcttttggaactccatcagggacaaggcctagatatttactggagggataattacacttgtcccactgaagaagaatataaagctatggtgctgcagaaaacaggtggactgtttggattagcagtaggtctcatgcagttgttctctgattacaaagaagatttaaaaccgctacttaatacacttgggctctttttccaaattagggatgattatgctaatctacactccaaagaatatagtgaaaacaaaagtttttgtgaagatctgacagagggaaagttctcatttcctactattcatgctatttggtcaaggcctgaaagcacccaggtgcagaatatcttgcgccagagaacagaaaacatagatataaaaaaatactgtgtacattatcttgaggatgtaggttcttttgaatacactcgtaatacccttaaagagcttgaagctaaagcctataaacagattgatgcacgtggtgggaaccctgagctagtagccttagtaaaacacttaagtaagatgttcaaagaagaaaatgaataatgttaagccattcttgattggacctcatagcttattttagttaatcttttttttgtcttttagccttaccaccttttaaaaaatttgttattctccagaaacagtaaataggtgagtaggggtggtgcaagtgaattcgttttcatttagaagcccctctgtacagataatcaaaattcaaagttgaaagaatcaaaagcagccacagttatgtaggtctgatttgaatgtcataattgcagtgacaggacattgccmccaactctatcctactaccatcaatgttgtgtttattccgtcaataaaaaagacttgcttccaggaatttttatccatacactttctaactgtactatctgggcagttccaagccagtttctattagctagctggaccaaagaccacaaatctctttttttcctraacgctgctgtaaggaatatctcacttttccccccggaaacaccctcactgaagtcttctatgaaaaggctgataatgggctgggcgcggtggctcacgcctgtaatcccagcactttgggaggccgaggcgggcagatcacgaggtcaggagatcgagaccatcctgacacggtgaaaccctgtctctactaaaaatacaaaaaattagctgggcgtggtggtgggcgcctgtagtcccagctactcgggaggctgaggcaggagaatggtgtgaacccaggaggcggagcttgcagtgagccgagatagtgcctctgcactccagcctgggtgacagagcragactccgtctcaaaaaaaaagggctgataatgataaacagtgagcactccggtcctttttcttasgttttccttttttccttcctctccaccccacaagttttgctttttaaccaaggtgtctctgcttgatgaaattcacatgctagtctaaatctttttttctcccttgtaacatttatgtgccccaaactggttagtatatgggtacagcattccctttccaattgggaagcggaaaaagagagtatgggatattttagaagggagcctttgaaccttattatatttccccatcattgatagtgacaatcttaaaagggttgttttcttaccttaagtacaaaagcatggaaaaatgcgcttttccttcccgcccacatcaccaccccgacttgaagacagtaggtgcttgaatggaaagtgagtaggcatctttaatcgccctgattaaaggaaagtgttagcctgagagggcctgactgaaaagtaaccaaaggcttaatatcaaacactaattagctttttagtgccttaaccctgacctggttaccagttttctgtagtttctacacccaagccactgaagtcatctgtggcccaagaggtaggacaaaaaaaaaaaaaaaaaaagctgatttcaatatttgatttgttgacatcccaaaatgaaagttttatgtttcccttagaaacatgttttgcttggttctatagtatgttacttaggatctatttaccatatatttgtatgagaaatcctcacccaagcattcaacctaaatctttgaaaagttgggtgctgtctttagtaacttttaaaatagtttaaatctcccattttaatagtgataaggaaacctgttaaaatcatggctattgatgtt

SEQ ID NO: 2216 - DNA, 2690 bp, Homo sapiens
gaccgggatggcgcattttcttgcaccaactaatgcggtgtcgctggcggctgaggagggcggagagttctgtggtgaaatagtgggaaggattcatgtaggcatcgggaagagcctaagtccacattataaaataggaagttgatgcggggtacagttactcccggaccggcggcgtgaaagtcgtgatatcatcgttgaactgtaaacaagtgagaaccaaactttcacaggcatttaatcattggctgaaagttccagaggacaagctacagattattattgaagtgacagaaatgttgcataatgccagtttactcatcgatgayattgaagacaactcaaaactccgacgtggctttccagtggcccacagcatctatggaatcccatctgtcatcaattctgccaattacgtgtatttccttggcttggagaaagtcttaacccttgatcacccagatgcrgtgaagctttttacccgccagcttttggaactccatcagggacaaggcctagatatttactggagggataattacacttgtcccactgaagaagaatataaagctatggtgctgcagaaaacaggtggactgtttggattagcagtaggtctcatgcagttgttctctgattacaaagaagatttaaaaccgctacttaatacacttgggctctttttccaaattagggatgattatgctaatctacactccaaagaatatagtgaaaacaaaagtttttgtgaagatctgacagagggaaagttctcatttcctactattcatgctatttggtcaaggcctgaaagcacccaggtgcagaatatcttgcgccagagaacagaaaacatagatataaaaaaatactgtgtacattatcttgaggatgtaggttcttttgaatacactcgtaatacccttaaagagcttgaagctaaagcctataaacagattgatgcacgtggtgggaaccctgagctagtagccttagtaaaacacttaagtaagatgttcaaagaagaaaatgaataatgttaagccattcttgattggacctcatagcttattttagttaatcttttttttgtcttttagccttaccaccttttaaaaaatttgttattctccagaaacagtaaataggtgagtaggggtggtgcaagtgaattcgttttcatttagaagcccctctgtacagataatcaaaattcaaagttgaaagaatcaaaagcagccacagttatgtaggtctgatttgaatgtcataattgcagtgacaggacattgccmccaactctatcctactaccatcaatgttgtgtttattccgtcaataaaaaagacttgcttccaggaatttttatccatacactttctaactgtactatctgggcagttccaagccagtttctattagctagctggaccaaagaccacaaatctctttttttcctraacgctgctgtaaggaatatctcacttttccccccggaaacaccctcactgaagtcttctatgaaaaggctgataatgggctgggcgcggtggctcacgcctgtaatcccagcactttgggaggccgaggcgggcagatcacgaggtcaggagatcgagaccatcctgacacggtgaaaccctgtctctactaaaaatacaaaaaattagctgggcgtggtggtgggcgcctgtagtcccagctactcgggaggctgaggcaggagaatggtgtgaacccaggaggcggagcttgcagtgagccgagatagtgcctctgcactccagcctgggtgacagagcragactccgtctcaaaaaaaaagggctgataatgataaacagtgagcactccggtcctttttcttasgttttccttttttccttcctctccaccccacaagttttgctttttaaccaaggtgtctctgcttgatgaaattcacatgctagtctaaatctttttttctcccttgtaacatttatgtgccccaaactggttagtatatgggtacagcattccctttccaattgggaagcggaaaaagagagtatgggatattttagaagggagcctttgaaccttattatatttccccatcattgatagtgacaatcttaaaagggttgttttcttaccttaagtacaaaagcatggaaaaatgcgcttttccttcccgcccacatcaccaccccgacttgaagacagtaggtgcttgaatggaaagtgagtaggcatctttaatcgccctgattaaaggaaagtgttagcctgagagggcctgactgaaaagtaaccaaaggcttaatatcaaacactaattagctttttagtgccttaaccctgacctggttaccagttttctgtagtttctacacccaagccactgaagtcatctgtggcccaagaggtaggacaaaaaaaaaaaaaaaaaaagctgatttcaatatttgatttgttgacatcccaaaatgaaagttttatgtttcccttagaaacatgttttgcttggttctatagtatgttacttaggatctatttaccatatatttgtatgagaaatcctcacccaagcattcaacctaaatctttgaaaagttgggtgctgtctttagtaacttttaaaatagtttaaatctcccattttaatagtgataaggaaacctgttaaaatcatggctattgatgtt

SEQ ID NO: 2217 - DNA, 2816 bp, Homo sapiens
agtagggaggcggcaacgacgcctgcgcagtgtgaccgggatggcgcattttcttgcaccaactaatgcggtgtcgctggcggctgaggagggcggagagttctgtggtgaaatagtgggaaggattcatgtaggcatcgggaagagcctaagtccacattataaaataggaagttgatgcggggtacagttactcccggaccggcggcgtgaaagtcgtgatatcatcgttgaactattagctttgaagtttaaatccaatggagaagactcaagaaacagtccaaagaattcttctagaaccctataaatacttacttcagttaccaggtaaacaagtgagaaccaaactttcacaggcatttaatcattggctgaaagttccagaggacaagctacagattattattgaagtgacagaaatgttgcataatgccagtttactcatcgatgayattgaagacaactcaaaactccgacgtggctttccagtggcccacagcatctatggaatcccatctgtcatcaattctgccaattacgtgtatttccttggcttggagaaagtcttaacccttgatcacccagatgcrgtgaagctttttacccgccagcttttggaactccatcagggacaaggcctagatatttactggagggataattacacttgtcccactgaagaagaatataaagctatggtgctgcagaaaacaggtggactgtttggattagcagtaggtctcatgcagttgttctctgattacaaagaagatttaaaaccgctacttaatacacttgggctctttttccaaattagggatgattatgctaatctacactccaaagaatatagtgaaaacaaaagtttttgtgaagatctgacagagggaaagttctcatttcctactattcatgctatttggtcaaggcctgaaagcacccaggtgcagaatatcttgcgccagagaacagaaaacatagatataaaaaaatactgtgtacattatcttgaggatgtaggttcttttgaatacactcgtaatacccttaaagagcttgaagctaaagcctataaacagattgatgcacgtggtgggaaccctgagctagtagccttagtaaaacacttaagtaagatgttcaaagaagaaaatgaataatgttaagccattcttgattggacctcatagcttattttagttaatcttttttttgtcttttagccttaccaccttttaaaaaatttgttattctccagaaacagtaaataggtgagtaggggtggtgcaagtgaattcgttttcatttagaagcccctctgtacagataatcaaaattcaaagttgaaagaatcaaaagcagccacagttatgtaggtctgatttgaatgtcataattgcagtgacaggacattgccmccaactctatcctactaccatcaatgttgtgtttattccgtcaataaaaaagacttgcttccaggaatttttatccatacactttctaactgtactatctgggcagttccaagccagtttctattagctagctggaccaaagaccacaaatctctttttttcctraacgctgctgtaaggaatatctcacttttccccccggaaacaccctcactgaagtcttctatgaaaaggctgataatgggctgggcgcggtggctcacgcctgtaatcccagcactttgggaggccgaggcgggcagatcacgaggtcaggagatcgagaccatcctgacacggtgaaaccctgtctctactaaaaatacaaaaaattagctgggcgtggtggtgggcgcctgtagtcccagctactcgggaggctgaggcaggagaatggtgtgaacccaggaggcggagcttgcagtgagccgagatagtgcctctgcactccagcctgggtgacagagcragactccgtctcaaaaaaaaagggctgataatgataaacagtgagcactccggtcctttttcttasgttttccttttttccttcctctccaccccacaagttttgctttttaaccaaggtgtctctgcttgatgaaattcacatgctagtctaaatctttttttctcccttgtaacatttatgtgccccaaactggttagtatatgggtacagcattccctttccaattgggaagcggaaaaagagagtatgggatattttagaagggagcctttgaaccttattatatttccccatcattgatagtgacaatcttaaaagggttgttttcttaccttaagtacaaaagcatggaaaaatgcgcttttccttcccgcccacatcaccaccccgacttgaagacagtaggtgcttgaatggaaagtgagtaggcatctttaatcgccctgattaaaggaaagtgttagcctgagagggcctgactgaaaagtaaccaaaggcttaatatcaaacactaattagctttttagtgccttaaccctgacctggttaccagttttctgtagtttctacacccaagccactgaagtcatctgtggcccaagaggtaggacaaaaaaaaaaaaaaaaaaagctgatttcaatatttgatttgttgacatcccaaaatgaaagttttatgtttcccttagaaacatgttttgcttggttctatagtatgttacttaggatctatttaccatatatttgtatgagaaatcctcacccaagcattcaacctaaatctttgaaaagttgggtgctgtctttagtaacttttaaaatagtttaaatctcccattttaatagtgataaggaaacctgttaaaatcatggctattgatgtt

SEQ ID NO: 2218 - DNA, 848 bp, Homo sapiens
acccctcgtggcggtcccgcccgtccccgcgcaggcgcgctcgggctgccgcwggctcttcgcacgcggccatggccgactccgagctgcagctggttgagcagcggatccgcagcttccccgacttccccaccccaggcgtggtattcagggacatctcgcccgtcctgaaggaccccgcctccttccgcgccgccatcggcctcctggcgcgacacctgaaggcgacccacgggggccgcatcgactacatcgcaggcctagwctcccgaggcttcctctttggcccctccctggcccaggagcttggactgggctgcgtgctcatchgaaagcgggggaagctgccaggccccactctgtgggcctcctattccctggagtacgggaaggctgagcyggagattcagaaagacgccctggagccaggacagmgggtggtcgtcgtggatgatctgctggccactggtggaaccaygaacgctgcctgtgagctgctgggccgcctgcaggctgagktcctggagygcgtgagcctggtggagctgacctcgcttaagggcagggagaagctggcacctgtacccttcttctctctcctgcagtatgagtsaccrcagggcctcccagcccaacatctccagctggatcccagggaaatatcagccttgggcaactgcagtgaccaggggcaccggctgcccacagggaacacattcctttgctggggttcagcgcctctcctggggctggaagtgccaaagcctggggcaaagctgtgtttcagccacrctgaacccaattacacacagcgggagaacgcagtaaacagctttcccmcaagagcc

SEQ ID NO: 2219 - DNA, 2357 bp, Homo sapiens
cgccccgcagcccagccggaagggccggcggacgctcgctaggtcggctcgctggccggggctccgcggctcccgtggttgccatggcggcggttgtcgcggcgacgaggtrgtggcagctgttgctggtgctcagcgccgcggggatgggggcctcgggcgccccgcagccccccaacatcctgctcctgctcatggacgacatgggatggggtgacctcggggtgtatggagagccctccagagagaccccgaatttgraccggatggctgcagaaggghtgcttttcccaaacttctattctgccaaccstctgtgctyrccatcgagggcggcactgctcacaggacggctacccatccgcaatggcttctacaccaccaacgcccatgccagaaaygcctacacaccgyrggagwttgtgggcggcatcccagactcggagcagctcctgcyggagcttctgaagaaggccggctacgtcagsaagattgycrgcaagwggcatctgggtcacaggcccyagttccaccccctgaagcacrgatbtgatgagtggtttggatyccccaactgccastttrgaccttaygmcaacaaggccaggcccaacatccctgtgtacagggactgggrgatggttggcagatattatgaagaatttcctattaatctgaagaygggggaagccaasctcacccagatctacctgcaggaagccctggacttcattaagagacaggcacggcaccacccctttttcctctackgggstgtcgacgccacgcaygcacccgtctatgcctccaaacccttcttggrcaccagtcagcgagggyggtatggagacrccgtcmrggagattgatgacagcattgggaagatactggagctcctccaagacctgcacgtcgcggacaacaccttygtcktcttcacgtyggacaacggcgctgccctcatttycgcccccgaacaaggtkgcagcaacggcccctttctgtgtgggaagcagaccacgtttgaaggagggakgagggagcctgccctcgcatggtggccagggcacgtcactgcaggccaggtgagccacyagctgggcagcatcwtggacctcttcaccaccagcctggyccttgcgggcctgacgccgcccagcgacrgggccattgatggcctcaacctcctccccaccctcctgcagggccrgctgatggacaggcctatcttctattacygtggcgacacgctgatggcgkccaccsycgggcagcacaagrctcacttctggacctggaccmactcctsggagaacttcagacagggcattgatttctgccctgrgcagaacgtttcaggggtcacaactcacaatctggaagaccacacgaagctgcccctgatcttccacctgggacgggacccaggggwgaggttccccctcagctttgccagcgycgagtaccaggaggccctcagcaggatcacctcggtcgtcyagcagcaccaggargccttgktccccgcgcagccccagctcaacrtgtgcaactgggcggtcrtgaactgggcacctccgggctgtgaaaagttagggaagtgtctgacacctccagaatccattcccaagaagtgcctctggtcccactagcacctgcgcagactcaggccaggcctagaatctccrgttggccctgcaagtgcctggaggaaggatggctctggcctcggtcctcccccaaccctgcccaagccagacagacagcacctgcagacgcagggggactgcacaattccacctgcccaggacctgaccctggcgtgtgcttggccctcctcctcgcccacggcgcctcagatttcaggaccctcctsctcgccsacggcgcctcagacctcaggaccctgccgtctcacgcctttgtgaaccccaaatatctgagaccrgtctcagtttattttgccaaggttaaggatgcacctgtgacagcctcaggaggtcctgacaacaggtgccygaggtggctggggatacagtttgcctttatacatcttagggagacacaagatcagtatgtgtatggcgtacattggttcagtcagccttccactgaatacacgattgagtctggcccagtgaatccgcatttttatgtaaacagtaagggaacgggscaatcatataagcgtttgtctyaggggagccccagagggatgacttccagttccgtctgtcctttrtccacaaggaatttccctggrcgctaattatgagggaggcgtgtagcttcttatcattgtarctatgttatttagaaataaaacgggaggcaggtttgcctaattcccagsttga

SEQ ID NO: 2220 - DNA, 3411 bp, Homo sapiens
tcgggggcgggcgcggggcgcagccttctcgtcccggcctctgtgacaagcgccccggagccgggagcccgattgccgggctcggggtgggcgcggacgcaggcactgggctcgtgcggggccccgggcgtcgcgatgaacatcgtggtggagttcttcgtggtcactttcaaagtgctctgggcgttcgtgctggccgcggcgcgctggctggtgcggcccaaggagaagagcgtggcgggccaggtgtgcctcatcaccggcgccggcagcggcctgggccgcctcttcgcgctggagttcgcccggcgtcgggcgctgctggtgctgtgggacatcaacacgcaaagcaacgaggagacggctggcatggtgcgccacatctaccgcgacctggaggcggccgacgccgctgcgctgcaagctgggaatggtgaggaagaaattctgccccactgtaacttgcaggtttttacctacacctgtgacgtggggaagagggagaacgtctacctgacggctgaaagagtccgcaaggaggttggcgaagtctcagtcctggtcaataatgctggtgtggtctctgggcatcaccttctggaatgtcctgatgagctcattgagagaaccatgatggtcaattgccatgcacacttctggaccactaaggcttttcttcctacgatgctggagattaatcatggtcatattgtgacagttgcaagttccttgggattgttcagtactgccggagttgaggattactgtgccagtaaatttggagttgtgggttttcatgaatccctgagccatgaactaaaggctgctgaaaaggatggaattaaaacaaccttggtttgcccttatcttgtagacactggcatgttcagaggctgccgaatcaggaaagaaattgagccttttctgccacctctgaagcctgattactgtgtgaagcaggccatgaaggccatcctcactgaccagcccatgatctgcactccccgcctcatgtacatcgtgaccttcatgaagagcatcctaccatttgaagcagttgtgtgcatgtatcggttcctaggagcggacaagtgtatgtacccctttattgctcaaagaaagcaagccacaaacaataatgaagcaaaaaatggaatctaagaatctttttgtatggaatattacttctatcagaagatgatcaagatgtttcagtccagtgcacatcagcattgctgacattttatggattctaaacttgtgttgtttcttttttaaatcaactttttaaaaaaataaagtgtaaattaaccgactagagtacttggaaaatgtgatcagtacaagtgaacttaggttgttgccaacagggtccttttaggcagaacccagaaaccagtcaaatctgtagagaagcagtgtgacatcttcaggttaccattattttttaatgagcaggaagtctagaaatgataactagactgtatgtttcatgtgtgtgatttttcagaattcccagagtttactcattcttgttattaaactctagccagttgacatcttcgcaatttcaaggactgatagtgctgtattttctcacgttttctaagtttccgttttgcaaggcctaggtgactttttcatggtgtttgtatgtttagctcttttgaaaaggaattttgaaatctccatcaactgaagtaaatgatgtctgagtgttacagtaaaggtgaccaagtctctttcttaaagtcacaatgactaaagtattagttgaattttttttttttttttttttgatggagtctcgctctgtcaccaggctggagtgcagtagcacaatcacggctcactgcaatctctgcctcccggtttcaagtgattctgctgtctcagcctcccaagtagctgggactacaggcatgcgccaccacgcccagctaatttttgtatttttagtagagacggggtttcaccatgttggtcaggatggtctccatctcttgacattgtgatccacctgcctcggcctcccaaagtgctgggattacaggcatgagccactgcacccagccttgaatttttaattttatctctgatatacttcattaagtgtctggagacctaattatcctaaaagatcatacattttctacctatgaattttgctgcatacagaaagtgccctttcctcaggaagttgctgtgtttcatttctttggatggactcttatctagaatacatagcagctctgcaaagaaacagtttttaaaaatgggaacttctacattgaaaagtccccatttttgtgccaactatgattagtgagaggaagaaatcttattctatggcatatgtatggargggtgtaaagattcttttgaaaggtttattcacattgtagaacagcaaatgacatttttacagtatttttttgtaaagcaaactattttgtgccttgaatttggtatatgtgtattagtgaaacattgtaaaggtgaacttctacctctgtatctaaatgtataccatccacttgtaaatgactataaactattatgtgattgcttttttttttagaatgtcttgtttaaatagtggccaatgtytaaggctgttaaaataagccaacttttacwaatyggggagttttmtaaatgactgattaaatttamagaattaacttacatgcaattgtgtgattattagttatcagcagtgttgtaaggaaaattattgtgtttttttttatgatcattatcccactttaggtaaagaaaaatattggaatggaatagtgttgggaaacagacattaacaacctagggtgcctgcactcaaatagccgatgttactgtccctagattagagacttgattaagggcttgtttgtaccaaaagtggggaaacaatgccatgacctgtgttttagtttggctgcaccacagatcaaatctgcactgtgtctacatataggaaaggtcctggtgtgtgctaatgttcccaatgcaggacttgaggaagagctctgttatatgtttccatttctctttatcaaagataaccaaaccttatggcccttataacaatggaggcactggctgcctcttaattttcaatcatggacctaaagaagtactctgaagggtctcaacaatgccaggtggggacagatatactcagagattatccaggtctgcctcccagcgagcctggagtacaccagaccctcctagagaaatctgttataatttaacaacccacttatccaccttaaaactgaggaaagtcgtctttacatctaattttattcttgtgtgttataacttaaacctatttctatttttgtttgttattgcccttataagggtgtccatctccaagttcaataaactaattcatttaacttt

SEQ ID NO: 2221 - DNA, 3245 bp, Homo sapiens
ccggcctctgtgacaagcgccccggagccgggagcccgattgccgggctcggggtgggcgcggacgcaggcactgggctcgtgcggggccccgggcgtcgcgatgaacatcgtggtggagttcttcgtggtcactttcaaagtgctctgggcgttcgtgctggccgcggcgcgctggctggtgcggcccaaggagaagagcgtggcgggccaggtgtgcctcatcaccggcgccggcagcggcctgggccgcctcttcgcgctggagttcgcccggcgtcgggcgctgctggtgctgtgggacatcaacacgcaaagcaacgaggagacggctggcatggtgcgccacatctaccgcgacctggaggcggccgacgccgctgcgctgcaagctgggaatggtgaggaagaaattctgccccactgtaacttgcaggtttttacctacacctgtgacgtggggaagagggagaacgtctacctgacggctgaaagagtccgcaaggaggttggcgaagtctcagtcctggtcaataatgctggtgtggtctctgggcatcaccttctggaatgtcctgatgagctcattgagagaaccatgatggtcaattgccatgcacacttctggaccactaaggcttttcttcctacgatgctggagattaatcatggtcatattgtgacagttgcaagttccttgggattgttcagtactgccggagttgaggattactgtgccagtaaatttggagttgtgggttttcatgaatccctgagccatgaactaaaggctgctgaaaaggatggaattaaaacaaccttggtttgcccttatcttgtagacactggcatgttcagaggctgccgaatcaggaaagaaattgagccttttctgccacctctgaagcctgattactgtgtgaagcaggccatgaaggccatcctcactgaccagcccatgatctgcactccccgcctcatgtacatcgtgaccttcatgaagagcatcctaccatttgaagcagttgtgtgcatgtatcggttcctaggagcggacaagtgtatgtacccctttattgctcaaagaaagcaagccacaaacaataatgaagcaaaaaatggaatctaagaatctttttgtatggaatattacttctatcagaagatgatcaagatgtttcagtccagtgcacatcagcattgctgacattttatggattctaaacttgtgttgtttcttttttaaatcaactttttaaaaaaataaagtgtaaattaaccgactagagtacttggaaaatgtgatcagtacaagtgaacttaggttgttgccaacagggtccttttaggcagaacccagaaaccagtcaaatctgtagagaagcagtgtgacatcttcaggttaccattattttttaatgagcaggaagtctagaaatgataactagactgtatgtttcatgtgtgtgatttttcagaattcccagagtttactcattcttgttattaaactctagccagttgacatcttcgcaatttcaaggactgatagtgctgtattttctcacgttttctaagtttccgttttgcaaggcctaggtgactttttcatggtgtttgtatgtttagctcttttgaaaaggaattttgaaatctccatcaactgaagtaaatgatgtctgagtgttacagtaaaggtgaccaagtctctttcttaaagtcacaatgactaaagtattagttgaattttttttttttttttttttgatggagtctcgctctgtcaccaggctggagtgcagtagcacaatcacggctcactgcaatctctgcctcccggtttcaagtgattctgctgtctcagcctcccaagtagctgggactacaggcatgagccactgcacccagccttgaatttttaattttatctctgatatacttcattaagtgtctggagacctaattatcctaaaagatcatacattttctacctatgaattttgctgcatacagaaagtgccctttcctcaggaagttgctgtgtttcatttctttggatggactcttatctagaatacatagcagctctgcaaagaaacagtttttaaaaatgggaacttctacattgaaaagtccccatttttgtgccaactatgattagtgagaggaagaaatcttattctatggcatatgtatggargggtgtaaagattcttttgaaaggtttattcacattgtagaacagcaaatgacatttttacagtatttttttgtaaagcaaactattttgtgccttgaatttggtatatgtgtattagtgaaacattgtaaaggtgaacttctacctctgtatctaaatgtataccatccacttgtaaatgactataaactattatgtgattgcttttttttttagaatgtcttgtttaaatagtggccaatgtytaaggctgttaaaataagccaacttttacwaatyggggagttttmtaaatgactgattaaatttamagaattaacttacatgcaattgtgtgattattagttatcagcagtgttgtaaggaaaattattgtgtttttttttatgatcattatcccactttaggtaaagaaaaatattggaatggaatagtgttgggaaacagacattaacaacctagggtgcctgcactcaaatagccgatgttactgtccctagattagagacttgattaagggcttgtttgtaccaaaagtggggaaacaatgccatgacctgtgttttagtttggctgcaccacagatcaaatctgcactgtgtctacatataggaaaggtcctggtgtgtgctaatgttcccaatgcaggacttgaggaagagctctgttatatgtttccatttctctttatcaaagataaccaaaccttatggcccttataacaatggaggcactggctgcctcttaattttcaatcatggacctaaagaagtactctgaagggtctcaacaatgccaggtggggacagatatactcagagattatccaggtctgcctcccagcgagcctggagtacaccagaccctcctagagaaatctgttataatttaacaacccacttatccaccttaaaactgaggaaagtcgtctttacatctaattttattcttgtgtgttataacttaaacctatttctatttttgtttgttattgcccttataagggtgtccatctccaagttcaataaactaattcatttaacttt

SEQ ID NO: 2222 - DNA, 2929 bp, Homo sapiens
cgggggttccagaagtttccactgccgccgcggagtgcggcctcgcccagcagccttgcgcgtgctaccacgctgtcctgccttctcagcagacgccgcctgccctgcagccatgaggcccccgcagtgtctgctgcacacgccttccctggcttccccactccttctcctcctcctctggctcctgggtggaggagtgggggctgagggccgggaggatgcagagctgctggtgacggtgcgtgggggccggctgcggggcattcgcctgaagacccccgggggccctgtctctgctttcctgggcatcccctttgcggagccacccatgggaccccgtcgctttctgccaccggagcccaagcagccttggtcaggggtggtagacgctacaaccttccagagtgtctgctacyaatatgtggacaccctatacccaggttttsagggcaccgagatgtggaaccccaaccgtgagctgagcgaggactgcctgtacctcaacgtgtggacaccatacccccggcctacatcccccacccctgtcctcgtctggatctatgggggtggcttctacagtggggcctcctccttggacgtgtacgatggccgcttcttggtacaggccgagaggactgtgctggtgtccatgaactaccgggtgggagcctttggcttcctggccctgccggggagccgagaggccccgggcaatgtgggtctcctggatcagaggctggccctgcagtgggtgcaggagaacgtggcagccttcgggggtgacccgacatcagtgacgctgtttggggagagcgcgggagccgcctcggtgggcatgcacctgctgtccccgcccagccggggcctgttccacagggccgtgctgcagagcggtgcccccaatggaccctgggccacrgtgggcatgggagaggcccgtcgcagggccacgcagctggcccaccttgtgggctgtcctccaggcggcactggtgggaatgacacagagctggtagcctgccttcggacacgaccagcgcaggtcctggtgaaccacgaatggcacgtgctgcctcaagaaagcgtcttccggttctccttcgtgcctgwggtagatggagacttcctcagtgacaccccagaggccctcatcaacgcgggagacttcmacggcctgcaggtgctggtgggtgtggtgaaggatgagggctcgtattttctggtttacggggccccaggcttcagcaaagacaacgagtctctcatcagccgggccgagttcctggccggggtgcgggtcggggttccccaggtaagtgacctggcagccgaggctgtggtcctgcattacacagactggctgcatcccgaggacccggcacgcctgagggaggccctgagcgatgtggtgggcgaccacaatgtcgtgtgccccgtggcccagctggstgggcgactggctgcccagggtgcccgggtctacgcctacgtctttgaacaccgtgcttccacgctctcctggcccctgtggatgggggtgccycacggctacgagatcgagttcatctttgggatccccctggacccctctcgaaactacacggcagaggagaaaatcttcgcccagcgactgatgcgatactgggccaactttgcccgcacaggggatcccaatgagccccgagaccccaaggccccacaatggcccccgtacacggcgggggctcagcagtacgttagtctggacctgcggccgctggaggtgcggcgggggctgcgcgcccaggcctgcgccttctggaaccgcttcctccccaaattgctcagcgccaccgcctcggaggctcccagcacctgcccaggcttcacccatggggaggctgctcsgaggcccggcctccccctgcccctcctcctcctccaccagcttctcctcctcttcctctcccacctccggcggctgtgaacacggcctcttcccctacggccacaggggcccctcctctaatgagtggtcggaccgtggggaagggccccactcagggatctcagacctagtgctcccttcctcctcaaaccgagagactcacactggacagggcaggaggagggggccgtgcctcccacccttctcagggacccccacgcctttgttgtttgaatggaaatggaaaagccagtattcttttataaaattatcttttggaacctgagcctgacattggggggaagtgggaggccccggacggggtagcaccccccattggggctataacggtcaaccatttctgtctcttctttttcccccaacctccccctcctgtcccctctgttcccgtcttccggtcattcttttctcctcctctctccttcctgctgtccttctccggccccgcctctgccctcatcctccctctcgtctttcgcacattctcctgatcctcttgccaccgtcccacgtggtcgcctgcatttctccgtgcgtcctccctgcactcatacccccccttcaacccgcccaaatgtccgatccccgaccttcctcgtgccgtcctcccctcccgcctcgctgggcgccctggccgcagacacgctcgacgaggcggagcgccagtggaaggccgagttccaccgctggagctcctacatggtgcactggaagaaccagttcgaccactacagcaagcaggatcgctgctcagacctgtgaccccggcgggacccccatgtcctccgctccgcccggccccctagctgtatatactatttatttcagggctgggctataacacagacgagccccagactctgcccatccccaccccaccccgacgtcccccggggctcccggtcctctgcatgtctcaggctgagctccctcccccgcggtgccttcgcccctctgggctgccaataaactgttacagcc

SEQ ID NO: 2223 - DNA, 2182 bp, Homo sapiens
cgggggttccagaagtttccactgccgccgcggagtgcggcctcgcccagcagccttgcgcgtgctaccacgctgtcctgccttctcagcagacgccgcctgccctgcagccatgaggcccccgcagtgtctgctgcacacgccttccctggcttccccactccttctcctcctcctctggctcctgggtggaggagtgggggctgagggccgggaggatgcagagctgctggtgacggtgcgtgggggccggctgcggggcattcgcctgaagacccccgggggccctgtctctgctttcctgggcatcccctttgcggagccacccatgggaccccgtcgctttctgccaccggagcccaagcagccttggtcaggggtggtagacgctacaaccttccagagtgtctgctacyaatatgtggacaccctatacccaggttttsagggcaccgagatgtggaaccccaaccgtgagctgagcgaggactgcctgtacctcaacgtgtggacaccatacccccggcctacatcccccacccctgtcctcgtctggatctatgggggtggcttctacagtggggcctcctccttggacgtgtacgatggccgcttcttggtacaggccgagaggactgtgctggtgtccatgaactaccgggtgggagcctttggcttcctggccctgccggggagccgagaggccccgggcaatgtgggtctcctggatcagaggctggccctgcagtgggtgcaggagaacgtggcagccttcgggggtgacccgacatcagtgacgctgtttggggagagcgcgggagccgcctcggtgggcatgcacctgctgtccccgcccagccggggcctgttccacagggccgtgctgcagagcggtgcccccaatggaccctgggccacrgtgggcatgggagaggcccgtcgcagggccacgcagctggcccaccttgtgggctgtcctccaggcggcactggtgggaatgacacagagctggtagcctgccttcggacacgaccagcgcaggtcctggtgaaccacgaatggcacgtgctgcctcaagaaagcgtcttccggttctccttcgtgcctgwggtagatggagacttcctcagtgacaccccagaggccctcatcaacgcgggagacttcmacggcctgcaggtgctggtgggtgtggtgaaggatgagggctcgtattttctggtttacggggccccaggcttcagcaaagacaacgagtctctcatcagccgggccgagttcctggccggggtgcgggtcggggttccccaggtaagtgacctggcagccgaggctgtggtcctgcattacacagactggctgcatcccgaggacccggcacgcctgagggaggccctgagcgatgtggtgggcgaccacaatgtcgtgtgccccgtggcccagctggstgggcgactggctgcccagggtgcccgggtctacgcctacgtctttgaacaccgtgcttccacgctctcctggcccctgtggatgggggtgccycacggctacgagatcgagttcatctttgggatccccctggacccctctcgaaactacacggcagaggagaaaatcttcgcccagcgactgatgcgatactgggccaactttgcccgcacaggggatcccaatgagccccgagaccccaaggccccacaatggcccccgtacacggcgggggctcagcagtacgttagtctggacctgcggccgctggaggtgcggcgggggctgcgcgcccaggcctgcgccttctggaaccgcttcctccccaaattgctcagcgccaccgacacgctcgacgaggcggagcgccagtggaaggccgagttccaccgctggagctcctacatggtgcactggaagaaccagttcgaccactacagcaagcaggatcgctgctcagacctgtgaccccggcgggacccccatgtcctccgctccgcccggccccctagctgtatatactatttatttcagggctgggctataacacagacgagccccagactctgcccatccccaccccaccccgacgtcccccggggctcccggtcctctgcatgtctcaggctgagctccctcccccgcggtgccttcgcccctctgggctgccaataaactgttacagccacggga

SEQ ID NO: 2224 - DNA, 2199 bp, Homo sapiens
cggggggccggaggcggcggctgtcagagtcggctcagcctgcgccggggaacatcggccgcctccagctcccggcgcggcccggcccggcccggctcggccgcctcagacgccgcctgccctgcagccatgaggcccccgcagtgtctgctgcacacgccttccctggcttccccactccttctcctcctcctctggctcctgggtggaggagtgggggctgagggccgggaggatgcagagctgctggtgacggtgcgtgggggccggctgcggggcattcgcctgaagacccccgggggccctgtctctgctttcctgggcatcccctttgcggagccacccatgggaccccgtcgctttctgccaccggagcccaagcagccttggtcaggggtggtagacgctacaaccttccagagtgtctgctacyaatatgtggacaccctatacccaggttttsagggcaccgagatgtggaaccccaaccgtgagctgagcgaggactgcctgtacctcaacgtgtggacaccatacccccggcctacatcccccacccctgtcctcgtctggatctatgggggtggcttctacagtggggcctcctccttggacgtgtacgatggccgcttcttggtacaggccgagaggactgtgctggtgtccatgaactaccgggtgggagcctttggcttcctggccctgccggggagccgagaggccccgggcaatgtgggtctcctggatcagaggctggccctgcagtgggtgcaggagaacgtggcagccttcgggggtgacccgacatcagtgacgctgtttggggagagcgcgggagccgcctcggtgggcatgcacctgctgtccccgcccagccggggcctgttccacagggccgtgctgcagagcggtgcccccaatggaccctgggccacrgtgggcatgggagaggcccgtcgcagggccacgcagctggcccaccttgtgggctgtcctccaggcggcactggtgggaatgacacagagctggtagcctgccttcggacacgaccagcgcaggtcctggtgaaccacgaatggcacgtgctgcctcaagaaagcgtcttccggttctccttcgtgcctgwggtagatggagacttcctcagtgacaccccagaggccctcatcaacgcgggagacttcmacggcctgcaggtgctggtgggtgtggtgaaggatgagggctcgtattttctggtttacggggccccaggcttcagcaaagacaacgagtctctcatcagccgggccgagttcctggccggggtgcgggtcggggttccccaggtaagtgacctggcagccgaggctgtggtcctgcattacacagactggctgcatcccgaggacccggcacgcctgagggaggccctgagcgatgtggtgggcgaccacaatgtcgtgtgccccgtggcccagctggstgggcgactggctgcccagggtgcccgggtctacgcctacgtctttgaacaccgtgcttccacgctctcctggcccctgtggatgggggtgccycacggctacgagatcgagttcatctttgggatccccctggacccctctcgaaactacacggcagaggagaaaatcttcgcccagcgactgatgcgatactgggccaactttgcccgcacaggggatcccaatgagccccgagaccccaaggccccacaatggcccccgtacacggcgggggctcagcagtacgttagtctggacctgcggccgctggaggtgcggcgggggctgcgcgcccaggcctgcgccttctggaaccgcttcctccccaaattgctcagcgccaccgacacgctcgacgaggcggagcgccagtggaaggccgagttccaccgctggagctcctacatggtgcactggaagaaccagttcgaccactacagcaagcaggatcgctgctcagacctgtgaccccggcgggacccccatgtcctccgctccgcccggccccctagctgtatatactatttatttcagggctgggctataacacagacgagccccagactctgcccatccccaccccaccccgacgtcccccggggctcccggtcctctgcatgtctcaggctgagctccctcccccgcggtgccttcgcccctctgggctgccaataaactgttacagccacggga

SEQ ID NO: 2225 - DNA, 2946 bp, Homo sapiens
cggggggccggaggcggcggctgtcagagtcggctcagcctgcgccggggaacatcggccgcctccagctcccggcgcggcccggcccggcccggctcggccgcctcagacgccgcctgccctgcagccatgaggcccccgcagtgtctgctgcacacgccttccctggcttccccactccttctcctcctcctctggctcctgggtggaggagtgggggctgagggccgggaggatgcagagctgctggtgacggtgcgtgggggccggctgcggggcattcgcctgaagacccccgggggccctgtctctgctttcctgggcatcccctttgcggagccacccatgggaccccgtcgctttctgccaccggagcccaagcagccttggtcaggggtggtagacgctacaaccttccagagtgtctgctacyaatatgtggacaccctatacccaggttttsagggcaccgagatgtggaaccccaaccgtgagctgagcgaggactgcctgtacctcaacgtgtggacaccatacccccggcctacatcccccacccctgtcctcgtctggatctatgggggtggcttctacagtggggcctcctccttggacgtgtacgatggccgcttcttggtacaggccgagaggactgtgctggtgtccatgaactaccgggtgggagcctttggcttcctggccctgccggggagccgagaggccccgggcaatgtgggtctcctggatcagaggctggccctgcagtgggtgcaggagaacgtggcagccttcgggggtgacccgacatcagtgacgctgtttggggagagcgcgggagccgcctcggtgggcatgcacctgctgtccccgcccagccggggcctgttccacagggccgtgctgcagagcggtgcccccaatggaccctgggccacrgtgggcatgggagaggcccgtcgcagggccacgcagctggcccaccttgtgggctgtcctccaggcggcactggtgggaatgacacagagctggtagcctgccttcggacacgaccagcgcaggtcctggtgaaccacgaatggcacgtgctgcctcaagaaagcgtcttccggttctccttcgtgcctgwggtagatggagacttcctcagtgacaccccagaggccctcatcaacgcgggagacttcmacggcctgcaggtgctggtgggtgtggtgaaggatgagggctcgtattttctggtttacggggccccaggcttcagcaaagacaacgagtctctcatcagccgggccgagttcctggccggggtgcgggtcggggttccccaggtaagtgacctggcagccgaggctgtggtcctgcattacacagactggctgcatcccgaggacccggcacgcctgagggaggccctgagcgatgtggtgggcgaccacaatgtcgtgtgccccgtggcccagctggstgggcgactggctgcccagggtgcccgggtctacgcctacgtctttgaacaccgtgcttccacgctctcctggcccctgtggatgggggtgccycacggctacgagatcgagttcatctttgggatccccctggacccctctcgaaactacacggcagaggagaaaatcttcgcccagcgactgatgcgatactgggccaactttgcccgcacaggggatcccaatgagccccgagaccccaaggccccacaatggcccccgtacacggcgggggctcagcagtacgttagtctggacctgcggccgctggaggtgcggcgggggctgcgcgcccaggcctgcgccttctggaaccgcttcctccccaaattgctcagcgccaccgcctcggaggctcccagcacctgcccaggcttcacccatggggaggctgctcsgaggcccggcctccccctgcccctcctcctcctccaccagcttctcctcctcttcctctcccacctccggcggctgtgaacacggcctcttcccctacggccacaggggcccctcctctaatgagtggtcggaccgtggggaagggccccactcagggatctcagacctagtgctcccttcctcctcaaaccgagagactcacactggacagggcaggaggagggggccgtgcctcccacccttctcagggacccccacgcctttgttgtttgaatggaaatggaaaagccagtattcttttataaaattatcttttggaacctgagcctgacattggggggaagtgggaggccccggacggggtagcaccccccattggggctataacggtcaaccatttctgtctcttctttttcccccaacctccccctcctgtcccctctgttcccgtcttccggtcattcttttctcctcctctctccttcctgctgtccttctccggccccgcctctgccctcatcctccctctcgtctttcgcacattctcctgatcctcttgccaccgtcccacgtggtcgcctgcatttctccgtgcgtcctccctgcactcatacccccccttcaacccgcccaaatgtccgatccccgaccttcctcgtgccgtcctcccctcccgcctcgctgggcgccctggccgcagacacgctcgacgaggcggagcgccagtggaaggccgagttccaccgctggagctcctacatggtgcactggaagaaccagttcgaccactacagcaagcaggatcgctgctcagacctgtgaccccggcgggacccccatgtcctccgctccgcccggccccctagctgtatatactatttatttcagggctgggctataacacagacgagccccagactctgcccatccccaccccaccccgacgtcccccggggctcccggtcctctgcatgtctcaggctgagctccctcccccgcggtgccttcgcccctctgggctgccaataaactgttacagcc

SEQ ID NO: 2226 - DNA, 1686 bp, Homo sapiens
actcccgcgggccacagcctgacaygggcatgcccctaccccctggctcccacagccacctaccggaggcatggcacagggagggcctcgcctcactgtcacagcagcatggcacagcaagatcaacttcatgctcggtgccaaagctgatggcaagaccattctaaaaggcctccagtccattttccaggagcaggggatggcagagtctgcacacctggcaggttaatggctagttagcaacctacagacagaaacacaaaaacagcatctttgccaatttgagaatttacctacatggattggtgttgctggaccttcagagttacaatgatgacttgcagggcaaagaagagatcgacagcctttcaaacaatgtagaaaaaagaatgaaagaattgagtcaagacagtactgggctggtgaagcgattaccacctgtagtttgaagaggggccatcaacagacattggtccaccaccgatgggcgcctggttgaatatgacatagatgaagtggtgtacaatgaagattcaccttattggaacattacaattctacactagaagcaatttggaaatattctcatccttagtagggatgttgattcggcagagtgatttggcatatacctgggccatcacgggcagcagcaaagcagatttcactggcaaagaggtactgcttctcagaggctgagatgggggcatattatgagaaatagtcaaactaaaatcaaagatggtcactatggtagagattgaccaaatggtgattgatggatgtaagaaatatatgcaaaaaacatgtggtgatgttgtagacaatcttaaaggaggctgctatcaggctctgatagaagactgcattccaatactgaagaggcacaccaaagaagggagasaattggattgtgtgactaacgatttgacagctgttccaatctccacatctctggaacaagattccatgtgggagtttctcagactgatttttgacccatgaatgaatgtattgaaacaggatgggaaatattttacacaggcaaactgtgtcaatctgacagaagccctgccactctatgaagaacagcttgggtgcctgtattgccttgtggaattctcaaaggagatcgtctatgtcccttcaaacttcgaattgtgggtattttacgctgtctggaagaaagctaaaccctgaagatgaatatcccttaatcacaggtgctgcaaatggcctttttcacttccatatgctgtacatgacattgaaacaagtcaggcaattgattgtgaattccttgaagttttctttttaattattatttttaattttaaaaagcaaatggcaaatgtatattttgatgagcttagggtgtttttttttttgaaagccagctgaaggatggttcaacagcacagcaaagactgccaaatgcactaacaccctagaatgtgatttttgttactttttatttctccgtgggctttgtttttttgttttggttgtgatagactttcaatttggatgtttggaggaatgaacatcattgttttgttctggagggaagttcttggtggtgtttctttcacccaatattgacttagatattaaaatgtggtgcttataagacagagtttaaaaaaaatgaatagtaatacttcgattaaaattacaaaagagaca

SEQ ID NO: 2227 - DNA, 3293 bp, Homo sapiens
gctgttccgcggctacacgctgcggctggagcaggcggccacgctgaaggcgctggccgttctcagcctgctggcgggcgcgctggcgctggccgagctgctgggcgcgccggggcccgcgcccggcctggccaagggctcacacccggtgcactgcgtcctcttcctggcgctgctcgtggtaaccaacgtccggtccctgcaggtgccccagctgcagcaggtcggccagctggcgctgctcttcagcctcaccttcgcgctgctctgctgtcctttcgcgctgggcggccccgcccggggttccgccggggccgctggggggccagcgaccgccgaacaaggggtttggcagctccttttggtcaccttcgtgtcctatgccttgctgcccgtgcgcagcctgctggccataggctttgggctcgtggtggctgcgtcgcacttgctggtcacagccaccttggtccccgccaagcgcccacgtctctggaggacgctcggtgccaatgccttgctcttcgtcggtgtgaacatgtatggggtctttgtgcggattctgactgagcgttcacagaggaaggcgttcctgcaggcccggagctgcattgaggaccgactgaggctggaggatgagaacgagaagcaggagcggctcctcatgagcctcctgccccggaacgttgccatggagatgaaggaggacttcctgaagccccctgagaggattttccacaagatttacatccagaggcacgacaatgtgagcatcctgtttgctgacatcgtgggtttcacgggcttggcatcccagtgcacagcccaggagctggtgaaactcctcaatgagctcttcggcaagttcgatgaattagccacggagaaccactgtcgccgcatcaagattctcggggactgctactactgcgtgtcgggcctcacccagcccaagactgaccatgcccactgctgtgtggagatgggactcgacatgattgataccatcacatctgtggctgaagccaccgaggtggatctgaacatgcgtgtgggtctgcacacgggcagggtcctctgtggtgtcctgggcttgcgcaagtggcagtacgacgtgtggtccaatgatgtgaccttggccaatgtcatggaagccgctggcctgccagggaaggttcatatcacaaagacgaccctagcgtgcttgaatggggactacgaggtagaaccgggttacggacatgagaggaacagtttcttgaaaactcataacatcgaaaccttttttattgtgccatcccatcgccgaaagatatttccaggcctgattctctcagatataaaaccggccaaaaggatgaagttcaagactgtctgctacctgctggtgcagctcatgcactgccggaaaatgttyaaggccgagatccccttctccaatgtcatgacctgcgaggacgatgacaagcggagggcattaagaacagcctcggaaaaactcagaaaccgctcatctttttctaccaacgttgtctacaccaccccgggcactcgcgtcaacaggtacatcagccgcctcttagaagcccgccagacagagctggagatggcagacctgaacttctttaccctgaagtacaaacatgtcgaacgggagcaaaagtaccaccagcttcaggacgagtatttcaccagcgccgttgtcctcaccctcatcctggctgccttatttggccttgtctaccttctaatattcccacagagtgtggtcgtcctgctcctgctagtattctgcatctgcttcctggtggcctgtgtcctgtacctgcacatcacccgggtccagtgttttccagggtgcctgacgattcagattcgcactgtcctgtgtattttcatagtggtcttaatctactcagtagcccaaggttgtgtggtgggctgcctgccttgggcctggagctccaagcccaacagttccctggtggtcctttcgtctgggggccagcgcacagccctgcccaccctgccctgcgagtctacacaccatgccctgctctgctgcctggtgggcaccctcccgctagccatatttttccgggtgtcctccttgccaaaaatgatcctgctctccgggctcaccacgtcctacatcctcgttctggagctcagcggatacaccaggactgggggtggtgccgtctccgggcgcagctacgagccgattgtggccatcctgctcttctcctgtgcgctggccctgcatgccaggcaggtggacatcaggctgaggctggactacctctgggccgcacaggcaaaggaggagygagaggacatggagaaggtgaagctggacaacaggcgcatcctcttcaacctcctgccggcccacgtcgcccagcacttcctcatgtccaaccctcggaacatggacctctactaccagtcctactcccaggtgggcgtcatgtttgcctccatccccaacttcaatgacttctacatcgagctggacggcaacaacatgggggtggagtgtctgcggcttctcaaygagatcatcgccgactttgacgagctcatggaaaaagacttttacaaggacatagagaagatcaagaccatcgggagcacctacatggccgctgtggggctagcgcccacctcggggaccaagrctaagaagtccatctcctcccacctgagcacgctggcggactttgccattgagatgtttgacgttctggatgaaatcaactaccagtcttacaacgactttgtcctccgagttggcatcaatgttggccctgtggtggctggagtgattggcgctcgcaggccccagtacgacatctggggaaacacagtcaacgtggccagtcggatggatagcacaggggtccagggcagaatccaggtgactgaggaagtccaccggctgctgagaagrtgcccctaccactttgtgtgccgaggcaaagtcagtgtcaagggcaaaggcgagatgttgacatactttctagaaggcaggactgatggaaacggctcccaaatcaggtccctgggcttggatcggaaaatgtgtccatttgggagagctggccttcagggcagacgtccccccgtgtgccccatgcctggcgtctcagtcagggctgggctccctccacactccccaggccagtacctgccctctgcagcagctgggaaggaggcttagtggagcccacgtggssctctggggtgcacatggggtgggaatgctccgggggtgacacaggccacggtggctc

SEQ ID NO: 2228 - DNA, 2638 bp, Homo sapiens
ctggcagagtgcagattgcaggggcacatgcgcagagaagacgggccagggccagagtagagagcagctgctgctccggggacccacctggggtggccatgagagctggtggctggaggccgggaggacccgtgaccagaggtaatggcactgaggggcccagggctggagagaccacccctcacctgtccagagctgaggcaggagcagtgctgcggaggatgccaggtcgggggagctggccctgagaggagagggggcctgggagccagcaccctgagccctggccctgatccactccagccctgtgtagcccaacagcccttcccctccttgcccagtcccctccccctgcaaggcactctccactcttctcccccaggggccacaggcagacctcccctctgtctctctgaaccctcctctgtctctcccagacccagatgtttccttctgccctggggtagtcccaggccctgccccaggcaaagtcaaactgggggctccaggggctcccctgcaccaaggcctgcagagtcagtttcttcctcccgcaccacagagggcggggcttcctgcccaccccacccatgtcrctgcccaccagcgccatctcccacacagggcctggagaacagctggyrccagcaccgcgaggccrcggcgtatcygcatgggcgcctgcaggcactggggctgcagctcttcgtgaaggacccggcgctccggcttcccacagtcaccactgtggctgtacccgctggctatgactggwgagacatcgtcagctacgtcatrgaccacttcgacattgagatcatgggtgrccttgggccctccacggggaaggtgctgcggatcggcctgctgggctgcaatgccacccgcgagaatgtggaccgcgtgacggaggccctgagggcggccctgcagcactgccccaagaagaagctgtgacctgcccactggcacacarctggcactggcacamacctgtmccatgcccaccctgagggatcaggagcaaacagaccctgcaaggtcctccaggcctggggacaggaaagccactgacccagcccgggaggcagaaccaggcagcctccctggccccaggcagcccttttccctccagtggcacctcctggaaacagtccacttgggcgcaaaacccagtgccttccaaatgagctgcagtccccaggccatgagcctcccgggaatgtttaataaagggcctggccamctctcctcactgtgtggggtggtctgtgaaagagtgagaggagagcatctctgctccctgagctgcctgattgtggactttagggggacactcctcatcctggagcccacagggtagatcctcccctggaggaggtgctgtcaccacactctagccccagawgtcacacccccaaacgtcctcacgcaccacatccaggtgaacccacayrgcgcacagggctggttggagacccctgtcatggacaagggtacctgcgtgctggagagcgcacagccaggacctgagcccatgacacgtggaagcctccaatggaaggtcccctatgctcccatccagccagtgcccacccctcaactgcctgacttctgtgaccatagatcagcctggcatatttgaatttatttatttattttgaaacggagtttcactcttgttgcccasgctggagtgcagtggcaygatctcagctcactacaacctccacctcccgggttcaagcgattctcctgcctcaggctccggattagctgggactacaggtgtgcaccaccatgcccggctaatttttgtatttttagtacagatggggtttcactatattggccaggctggtctcgaactcctgacctcaagtgatccacctgcctcggcctcccaaagtgctgggattacaagcgtgagccactgtgcccagccatagttgaatttcatggtcagtggaacacacagcaggtcctccactgtgccagcttctttcacttactgtttttgacactcacatgtaccgtcgtgggcgccggtgtgtctttgttgctgagtgccgtcccgtcatatggacgtgcgtcrtgggcgccggtgtgtcttgttgctgagtgccgtyccgtcatatggacacctcatgatttgttggttcatcaccatagttgagcatctgggttatttctattttggggctgttatgaatacggaggtagtgaaattcttactcaagcctttgtgtggccatatattttcatttttcttggataaataactaggagtggaattgcagggtcatacaataggcttaaccttatacgagactgccacgaaattctccgaagtggctcttccatgtttcattcccgcagctacagcgtccagggtgctccacgtcctcacccacactccatgttgtctttttttgctagggggtgtaaaatcctgtctgatttggttttagtttgcatttccctgatgcctattgatgttgagcaacttctcataagctatcggccgtttgtagatcttctgaaaagtgtcagttcaaatattttgttcatatttgratttttatcttcttattgtcaatgtgtgatcattttaaaatatattctagatactatcaga

SEQ ID NO: 2229 - DNA, 3095 bp, Homo sapiens
ctgtcactcagccctgggggctccctctgcctgagggcttcgtcccctgctgcctggccgtgacccgcagcacaagcacagataagcctcagggaacaaaaggcagggctgccacggaagcccatccaccaatcctcacctctcacctctgtgtccgccctgctgggaaatattccaggctttggccaargccagtgcagccccaggttcccragcggcaggttgggtgcggaccatggcctctcacaagctgctggtgaccccccycaaggccctgctcaagcccctctccatccccarccagctcctgctggggcctggtccttccaacctgcctcctcgcatcatggcagccrkggggctgcagatgatcgggtccatgagcaaggatatgtaccagatcatggacgagatcaaggaaggcatccagtacgtgttccagaccaggaacccactcacactggtcatctctggctcggracactgtgccctggaggccgccctggtcaatgtgctggagcctggggactccttcctggttggggccaatggcatttgggggcagcgagccgtggacatcrgggagcgcataggagcccgagtgcacccgatgaccaaggaccctggaggccactacacactgcaggaggtggaggagggcctggcccagcacaagccagtgctgctgttcttaacccacrgggagtcgtccaccggcgtgctgcagccccttgatggcttcrgggaactctrccacaggtacaagtgcctgctcctggtgrattcggtggcatccctgggcgggacccccctttacatggaccrgcaaggcatcgacatcctgtacycgggctcccagaaggccctgaacgcccctccagggacctcrctcatctccttcagtgacaaggccaaaaagaagatgtactccyrcaagacraagcccttctccttctacctggacaycaagtggctggccaacttctggggctgtgacgaccagcccaggatgtaccatcacacaatccccgtcatcagcctgtacagcctgagagagagcctggccctcattgcggaacagggcctggagaacagctggyrccagcaccgcgaggccrcggcgtatcygcatgggcgcctgcaggcactggggctgcagctcttcgtgaaggacccggcgctccggcttcccacagtcaccactgtggctgtacccgctggctatgactggwgagacatcgtcagctacgtcatrgaccacttcgacattgagatcatgggtgrccttgggccctccacggggaaggtgctgcggatcggcctgctgggctgcaatgccacccgcgagaatgtggaccgcgtgacggaggccctgagggcggccctgcagcactgccccaagaagaagctgtgacctgcccactggcacacarctggcactggcacamacctgtmccatgcccaccctgagggatcaggagcaaacagaccctgcaaggtcctccaggcctggggacaggaaagccactgacccagcccgggaggcagaaccaggcagcctccctggccccaggcagcccttttccctccagtggcacctcctggaaacagtccacttgggcgcaaaacccagtgccttccaaatgagctgcagtccccaggccatgagcctcccgggaatgtttaataaagggcctggccamctctcctcactgtgtggggtggtctgtgaaagagtgagaggagagcatctctgctccctgagctgcctgattgtggactttagggggacactcctcatcctggagcccacagggtagatcctcccctggaggaggtgctgtcaccacactctagccccagawgtcacacccccaaacgtcctcacgcaccacatccaggtgaacccacayrgcgcacagggctggttggagacccctgtcatggacaagggtacctgcgtgctggagagcgcacagccaggacctgagcccatgacacgtggaagcctccaatggaaggtcccctatgctcccatccagccagtgcccacccctcaactgcctgacttctgtgaccatagatcagcctggcatatttgaatttatttatttattttgaaacggagtttcactcttgttgcccasgctggagtgcagtggcaygatctcagctcactacaacctccacctcccgggttcaagcgattctcctgcctcaggctccggattagctgggactacaggtgtgcaccaccatgcccggctaatttttgtatttttagtacagatggggtttcactatattggccaggctggtctcgaactcctgacctcaagtgatccacctgcctcggcctcccaaagtgctgggattacaagcgtgagccactgtgcccagccatagttgaatttcatggtcagtggaacacacagcaggtcctccactgtgccagcttctttcacttactgtttttgacactcacatgtaccgtcgtgggcgccggtgtgtctttgttgctgagtgccgtcccgtcatatggacgtgcgtcrtgggcgccggtgtgtcttgttgctgagtgccgtyccgtcatatggacacctcatgatttgttggttcatcaccatagttgagcatctgggttatttctattttggggctgttatgaatacggaggtagtgaaattcttactcaagcctttgtgtggccatatattttcatttttcttggataaataactaggagtggaattgcagggtcatacaataggcttaaccttatacgagactgccacgaaattctccgaagtggctcttccatgtttcattcccgcagctacagcgtccagggtgctccacgtcctcacccacactccatgttgtctttttttgctagggggtgtaaaatcctgtctgatttggttttagtttgcatttccctgatgcctattgatgttgagcaacttctcataagctatcggccgtttgtagatcttctgaaaagtgtcagttcaaatattttgttcatatttgratttttatcttcttattgtcaatgtgtgatcattttaaaatatattctagatactatcaga

SEQ ID NO: 2230 - DNA, 918 bp, Homo sapiens
atgatgaccagcgtgcaacggctcggtggtgatggtgaagacttagagggcgagcgcaggccagaaggcagtgaaggcgcagctgaagaacacggccaccgtcatggagaccgcagaagccgaccagggggcccattccaactgcgaacaggtgcaccagataaagtgagggaaacccaaagtgcaatgggtgttactgcgtataacctctgtccaaaaagcctgaacagaccgcaaagagtccatgctgcagagactttagaagaatttaaagtctatgcagaccccacaaatttgaatacacgcaacagggcagacagtcctcctggcgaggtcaacgcccaggctatggcagccgcttcctcatgtcagcgctgctccctccaccctcaccccttccacctcggggcagttcgaaatgaagctgttgtcatttctggaaggaaactggcccagcagatcaagcaggaagtgcggcaggaggtggaagagtgggtggcctcagacaaggatgtcgatgacttttatgtaattaatgtagggcaaatgtgtttggaccagtattccacgttaccagctgccccatggggtgtgtgggaaataattaagcaaactggcattcycaccctagggaagagtgtggttgtggctggaaggtcaaaaaatgttgaaatgccagttgcaatgttactgcacacagatggggcgcatgaaggtcccagaggtgatgctactgttacaatatctcatggatacactcccaaagagcagctgaagaarcataccattcttgcagatattgtaatatctgctgcagacattccaaatctcatcacagcacatatgatcaaggaaggagcagccatcattaatgtgggaataaatagagttcaagatcccgtaactgcaaacccaagt

SEQ ID NO: 2231 - DNA, 2180 bp, Homo sapiens
ctggagaacacagcagcatgcctgggaactgaactacaattcccagagtgcatctctaggaggattctgggaagtgtggcagaagcagcaatggtccctccagggaacggaagccgttgaacgtgaacatttggagtttcctcttttgtgctgattcctgaggactaggaaggtgccccgaaaagaattcagagacctgacaatgtccctgtattgtggaatagcttgcaggagaaaatttttttggtgctataggctgctgtcaacctatgttactaagacacggtatttatttgaactgaaggaagatgatgatgcatgtaaaaaagcccagcaaacaggagcgttttacctctttcatagtctggctcctctgcttcagacttcagcacatcaatacctggccccccggcacagcctgttagagttggaaaggctcctggrtaaatttggacaggatgcacaaagaatagaagattctgtgctgattggatgctctgagcagcaggaagcatggtttgctctggatctaggtctggatagctccttttccataagtgcctccttacacaaacctgaaatggagacagagctcaaggggtctttcattgagctgagaaaggcactctttcaactcaatgcaagggatgcctccttgctgtccacggctcaagctcttctccgctggcatgatgctcatcagttctgcagcagaagtgggcagcccaccaagaagaacgtggctggcagcaagcgtgtgtgcccttccaataatataatctattatccacagatggctcctgtggcgatcacgctggtgtcagatgggacccgatgcctgcttgcccgccaaagctcctttcccaagggaatgtattctgccttggcaggtttttgtgatataggtgaaagtgtggaagagaccatcygccgagaagttgcagaagaggtgggattggaggtggaaagcctgcagtactatgcatcccagyattggcccttccctagtggctcactcatgattgcttgccatgcaactgtgaaaccagggcagacagaaatccaggtgaacttgagagaattagagacagctgcctggttcagtcatgatgaggtagccacagccctgaagagaaagggcccctatactcagcaacagaatgggactttcccattctggctgccccctaagttagccatctcccaccaactgattaaggagtgggtggaaaaacagacctgttcttccctgcctgcttagcccggatcaagtcacttagatcgctccttggtattcctgagggacaaactagagatcagttgacaaaggagaagtgacaaaagataagctgcagaaggacctcagaagggcagagcaaagggtgagcctacagtaagacacttctatcagcagtgttaatggaagaaattcctaccaatgggcaatcaaaaaagccagtgtgagaagaaaactgatgagctgtcaactgtcaaaaatcagggggaagggggaagcattagtttggatgtaggcccttgttcagtcattttctctaaggccttggaagcaaacatcttctggcatatggcttgttaatgttgtgtttacactaactgccaaaatgtgcctgttgtaagtttggttaaaacttttatcttagtattgaaaatatatagcaagttttaagtcattactgagttacttgttacccttacagaattaagaaaaatagcacagtatgacattttaaaattcatgtacaggtgcattctagttacatgaacatgstagttaaataaaagtcacaattaagtcattatgactcagagtactttataataaatcagatgccctgaggctctgttgaggaagtagaatcccaatgggactccagacagtaaatctttttcgctgttttcagctctgtcacatgctcagtttgtgacccagggaaaagactattgctttgccatgcctgttttcctaaataaaacagttgctggcatttgcacatccacaacgtgttgattaacaaagggattggtggagataaacagatgccaaacctgacctatttcttaaactttatggaataaactaaatttaggatttctcatcattcatatatgatgccataagggagaagagtttatttggggaaaataaaagaaatttccac

SEQ ID NO: 2232 - DNA, 2218 bp, Homo sapiens
ctggagaacacagcagcatgcctgggaactgaactacaattcccagagtgcatctctaggaggattctgggaagtgtggcagaagcagcaatggtccctccagggaacggaagccgttgaacgtgaacatttggagtttcctcttttgtgctgattcctgaggactaggaaggtgccccgaaaagaattcagagacctgacaatgtccctgtattgtggaatagcttgcaggagaaaatttttttggtgctataggctgctgtcaacctatgttactaagacacggtatttatttgaactgaaggaagatgatgatgcatgtaaaaaagcccagcaaacaggagcgttttacctctttcatagtctggctcctctgcttcagacttcagcacatcaatacctggccccccggcacagcctgttagagttggaaaggctcctggrtaaatttggacaggatgcacaaagaatagaagattctgtgctgattggatgctctgagcagcaggaagcatggtttgctctggatctaggtctggatagctccttttccataagtgcctccttacacaaacctgaaatggagacagagctcaaggggtctttcattgagctgagaaaggcactctttcaactcaatgcaagggatgcctccttgctgtccacggctcaagctcttctccgctggcatgatgctcatcagttctgcagcagaagtgggcagcccaccaagaagaacgtggctggcagcaagcgtgtgtgcccttccaataatataatctattatccacagatggctcctgtggcgatcacgctggtgtcagatgggacccgatgcctgcttgcccgccaaagctcctttcccaagggaatgtattctgccttggcaggtttttgtgatatagcctacagggctgtcctgaattaatctgagtgcttgtaggtgaaagtgtggaagagaccatcygccgagaagttgcagaagaggtgggattggaggtggaaagcctgcagtactatgcatcccagyattggcccttccctagtggctcactcatgattgcttgccatgcaactgtgaaaccagggcagacagaaatccaggtgaacttgagagaattagagacagctgcctggttcagtcatgatgaggtagccacagccctgaagagaaagggcccctatactcagcaacagaatgggactttcccattctggctgccccctaagttagccatctcccaccaactgattaaggagtgggtggaaaaacagacctgttcttccctgcctgcttagcccggatcaagtcacttagatcgctccttggtattcctgagggacaaactagagatcagttgacaaaggagaagtgacaaaagataagctgcagaaggacctcagaagggcagagcaaagggtgagcctacagtaagacacttctatcagcagtgttaatggaagaaattcctaccaatgggcaatcaaaaaagccagtgtgagaagaaaactgatgagctgtcaactgtcaaaaatcagggggaagggggaagcattagtttggatgtaggcccttgttcagtcattttctctaaggccttggaagcaaacatcttctggcatatggcttgttaatgttgtgtttacactaactgccaaaatgtgcctgttgtaagtttggttaaaacttttatcttagtattgaaaatatatagcaagttttaagtcattactgagttacttgttacccttacagaattaagaaaaatagcacagtatgacattttaaaattcatgtacaggtgcattctagttacatgaacatgstagttaaataaaagtcacaattaagtcattatgactcagagtactttataataaatcagatgccctgaggctctgttgaggaagtagaatcccaatgggactccagacagtaaatctttttcgctgttttcagctctgtcacatgctcagtttgtgacccagggaaaagactattgctttgccatgcctgttttcctaaataaaacagttgctggcatttgcacatccacaacgtgttgattaacaaagggattggtggagataaacagatgccaaacctgacctatttcttaaactttatggaataaactaaatttaggatttctcatcattcatatatgatgccataagggagaagagtttatttggggaaaataaaagaaatttccac

SEQ ID NO: 2233 - DNA, 1094 bp, Homo sapiens
gtccctggaattctgggacactggctggggtttgaggagagaagccagtacctacctggctgcaggatgaagctggccagtggcttcttggttttgtggctcagccttgggggtggcctggctcagagcgacacgagccctgacacggaggagtcctattcagactggggccttcggcacctccggggaagctttgaatccgtcaatagctacttcgattcttttctggagctgctgggagggaagaatggagtctgtcagtacaggtgccgatatggaaaggcaccaatgcccagacctggctacaagccccaagagcccaatggctgcggctcctatttcctgggtctcaagatggacttgggcattccagcaatgacaaagtgctgcaaccagctggatgtctgttatgacacttgcggtgccaacaaatatcgctgtgatgcaaaattccgatggtgtctccactcgatctgctctgaccttaagcggagtctgggctttgtctccaaagtggaagcagcctgtgattccctggttgacactgtgttcaacaccgtgtggaccttgggctgccgcccctttatgaatagtcagcgggcagcttgcatctgtgcagaggaggagaaggaagagttatgaggaagaagtgattccttcctggttttgagtgacaccacagctgtcagccttcaagatgtcaagtcttcgagtcagcgtgactcattcrttcttccaacagtttggacaccacaaagcaggagaaagggaacatttttctacagctggaaagtgagtcctatcctttgaggaaatttgaaaaaagacatggagtggtttgaaagctactcttcatttaagactgctctccccaaccaagacacatttgcctggaaattcagttcttagcttaaagactaaaatgcaagcaaaccctgcaattcctggacctgatagttatattcatgagtgaaattgtggggagtccagccatttgggaggcaatgactttctgctggcccatgtttcagttgccagtaagcttctcacatttaataaagtgtactttttagaacatttggaaagagatgaat

SEQ ID NO: 2234 - DNA, 2436 bp, Homo sapiens
cccagtcgcgccgccagcgggctgagggtaggaagtagccgctccgagtggaggcgactgggggctgaagagcgcgccgccctctcgtcccattttgtaggtgtgtgatcctgtaaaattaaatcttccaagatgatctggtatatattaattataggaattctgcttccccagtctttggctcatccaggcttttttacttcaattggtcagatgactgatttgatccatactgagaaagatctggtgacttctctgaaagattatattaaggcagaagaggacaagttagaacaaataaaaaaatgggcagagaagttagatcggctaactagtacagcgacaaaagatccagaaggatttgttgggcatccagtaaatgcattcaaattaatgaaacgtctgaatactgagtggagtgagttggagaatctggtccttaaggatatgtcagatggctttatctctaacctaaccattcagagacagtactttcctaatgatgaagatcaggttggggcagccaaagctctgttacgtctccaggatwcctacaatttggatacagataccatctcaaagggtaatcttccaggagtgaaacacaaatcttttctaacggctgaggactgctttgagttgggcaaagtggcctatacagaagcagattattaccatacggaactgtggatggaacaagccctaaggcaactggatgaaggcgagatttctaccatagataaagtctctgttctrgattatttgagctatgcggtatatcagcagggagacctggataaggcacttttgctcacaaagaagcttcttgaactagatcctgaacatcagagagctaatggtaacttaaaatattttgagtatataatggctaaagaaaaagatgtcaataagtctgcttcagatgaccaatctgatcagaaaactacaccaaagaaaaaaggggttgctgtggattacctgccagagagacagaagtacgaaatgctgtgccgtggggagggtatcaaaatgacccctcggagacagaaaaaactcttttgccgctaccatgatggaaaccgtaatcctaaatttattctggctccagctaaacaggaggatgaatgggacaagcctcgtattattcgcttccatgatattatttctgatgcagaaattgaaatcgtcaaagacctagcaaaaccaaggctgagccgagctacagtacatgaccctgagactggaaaattgaccacagcacagtacagagtatctaagagtgcctggctctctggctatgaaaatcctgtggtgtstcgaattaatatgagaatacaagatctaacaggactagatgtttccacagcagaggaattacaggtagcaaattatggagttggaggacagtatgaaccccattttgactttgcacggaaagatgagccagatgctttcaaagagctggggacaggaaatagaattgctacatggctgttttatatgagtgatgtgtctgcaggaggagccactgtttttcctgaagttggagctagtgtttggcccaaaaaaggaactgctgttttctggtataatctgtttgccagtggagaaggagattatagtacacggcatgcagcctgtccagtrctagttggcaacaaatgggtatccaataaatggctccatgaacgtggacaagaatttcgaagaccttgtacsttgtcagaattggaatgacaaacaggcttccctttttctcctattgttgtactcttatgtgtctgatatacacatttcctagtcttaactttcaggagtttacaattgactaacactccatgatkgattcagtcatgaacctcatcccatgtttcatctgtggacaattgcttactttgtgggttcttttaaaagtaacacgaaatcatcatattgcataaaaccttaaagttctgttggtatcacagaagacaaggcagagtttaaagtgaggaattttatatttaaagaactttttggttggataaaaacataatttgagcatccagttttagtatttcactacatctcagttggtgggttctgttttctggatctgaagactagtaataaactaggacactaactgggttccatgtgattgccctttcatatgatcttctaagttgatttttttcctcccaagtcttttttaaagaaagtatactgtattttaccaaccccctctcttttctyttagctcytctgtggtgaattaaacgtacttgagttaaaatattttgggccttcttaactaaaatgctcaccacttagcctgtttttttatcccttttttaaaatgacagatgattttgttcaggaattttgctgtttttcttagtgctaataccttgcctcttattcctgctacagcagggtggtaatattggcattctg

SEQ ID NO: 2235 - DNA, 2742 bp, Homo sapiens
gcccagtcgcgccgccagcgggctgagggtaggaagtagccgctccgagtggaggcgactgggggctgaagagcgcgccgccctctcgtcccactttccaggtgtgtgatcctgtaaaattaaatcttccaagatgatctggtatatattaattataggaattctgcttccccagtctttggctcatccaggcttttttacttcaattggtcagatgactgatttgatccatactgagaaagatctggtgacttctctgaaagattatattaaggcagaagaggacaagttagaacaaataaaaaaatgggcagagaagttagatcggctaactagtacagcgacaaaagatccagaaggatttgttgggcatccagtaaatgcattcaaattaatgaaacgtctgaatactgagtggagtgagttggagaatctggtccttaaggatatgtcagatggctttatctctaacctaaccattcagagacagtactttcctaatgatgaagatcaggttggggcagccaaagctctgttacgtctccaggatwcctacaatttggatacagataccatctcaaagggtaatcttccaggagtgaaacacaaatcttttctaacggctgaggactgctttgagttgggcaaagtggcctatacagaagcagattattaccatacggaactgtggatggaacaagccctaaggcaactggatgaaggcgagatttctaccatagataaagtctctgttctrgattatttgagctatgcggtatatcagcagggagacctggataaggcacttttgctcacaaagaagcttcttgaactagatcctgaacatcagagagctaatggtaacttaaaatattttgagtatataatggctaaagaaaaagatgtcaataagtctgcttcagatgaccaatctgatcagaaaactacaccaaagaaaaaaggggttgctgtggattacctgccagagagacagaagtacgaaatgctgtgccgtggggagggtatcaaaatgacccctcggagacagaaaaaactcttttgccgctaccatgatggaaaccgtaatcctaaatttattctggctccagctaaacaggaggatgaatgggacaagcctcgtattattcgcttccatgatattatttctgatgcagaaattgaaatcgtcaaagacctagcaaaaccaaggctgagccgagctacagtacatgaccctgagactggaaaattgaccacagcacagtacagagtatctaagagtgcctggctctctggctatgaaaatcctgtggtgtstcgaattaatatgagaatacaagatctaacaggactagatgtttccacagcagaggaattacaggtagcaaattatggagttggaggacagtatgaaccccattttgactttgcacggaaagatgagccagatgctttcaaagagctggggacaggaaatagaattgctacatggctgttttatatgagtgatgtgtctgcaggaggagccactgtttttcctgaagttggagctagtgtttggcccaaaaaaggaactgctgttttctggtataatctgtttgccagtggagaaggagattatagtacacggcatgcagcctgtccagtrctagttggcaacaaatgggtatccaataaatggctccatgaacgtggacaagaatttcgaagaccttgtacsttgtcagaattggaatgacaaacaggcttccctttttctcctattgttgtactcttatgtgtctgatatacacatttcctagtcttaactttcaggagtttacaattgactaacactccatgatkgattcagtcatgaacctcatcccatgtttcatctgtggacaattgcttactttgtgggttcttttaaaagtaacacgaaatcatcatattgcataaaaccttaaagttctgttggtatcacagaagacaaggcagagtttaaagtgaggaattttatatttaaagaactttttggttggataaaaacataatttgagcatccagttttagtatttcactacatctcagttggtgggtgttaagctagaatgggctgtgtgataggaaacaaatgccttacagatgtgcctaggtgttctgtttacctagtgtcttactctgttttctggatctgaagactagtaataaactaggacactaactgggttccatgtgattgccctttcatatgatcttctaagttgatttttttcctcccaagtcttttttaaagaaagtatactgtattttaccaaccccctctcttttctyttagctcytctgtggtgaattaaacgtacttgagttaaaatatttcgattttttttttttttttaayggaaagtcctgcataacaacactgggccttcttaactaaaatgctcaccacttagcctgtttttttatcccttttttaaaatgacagatgattttgttcaggaattttgctgtttttcttagtgctaataccttgcctcttattcctgctacagcagggtggtaatattggcattctgattaaatactgtgccttaggagactggaagtttaaaaatgtacaagtcctttcagtgatgagggaattgattttttttaaaagtctttttcttagaaagccaaaatgtttgtttttttaagattctgaaatgtgttgtgacaacaatgacctatttatgatcttaaatcttttttaaaaaa

SEQ ID NO: 2236 - DNA, 2436 bp, Homo sapiens
cccagtcgcgccgccagcgggctgagggtaggaagtagccgctccgagtggaggcgactgggggctgaagagcgcgccgccctctcgtcccattttgtaggtgtgtgatcctgtaaaattaaatcttccaagatgatctggtatatattaattataggaattctgcttccccagtctttggctcatccaggcttttttacttcaattggtcagatgactgatttgatccatactgagaaagatctggtgacttctctgaaagattatattaaggcagaagaggacaagttagaacaaataaaaaaatgggcagagaagttagatcggctaactagtacagcgacaaaagatccagaaggatttgttgggcatccagtaaatgcattcaaattaatgaaacgtctgaatactgagtggagtgagttggagaatctggtccttaaggatatgtcagatggctttatctctaacctaaccattcagagacagtactttcctaatgatgaagatcaggttggggcagccaaagctctgttacgtctccaggatwcctacaatttggatacagataccatctcaaagggtaatcttccaggagtgaaacacaaatcttttctaacggctgaggactgctttgagttgggcaaagtggcctatacagaagcagattattaccatacggaactgtggatggaacaagccctaaggcaactggatgaaggcgagatttctaccatagataaagtctctgttctrgattatttgagctatgcggtatatcagcagggagacctggataaggcacttttgctcacaaagaagcttcttgaactagatcctgaacatcagagagctaatggtaacttaaaatattttgagtatataatggctaaagaaaaagatgtcaataagtctgcttcagatgaccaatctgatcagaaaactacaccaaagaaaaaaggggttgctgtggattacctgccagagagacagaagtacgaaatgctgtgccgtggggagggtatcaaaatgacccctcggagacagaaaaaactcttttgccgctaccatgatggaaaccgtaatcctaaatttattctggctccagctaaacaggaggatgaatgggacaagcctcgtattattcgcttccatgatattatttctgatgcagaaattgaaatcgtcaaagacctagcaaaaccaaggctgaggcgagccaccatttcaaacccaataacaggagacttggagacggtacattacagaattagcaaaagtgcctggctctctggctatgaaaatcctgtggtgtstcgaattaatatgagaatacaagatctaacaggactagatgtttccacagcagaggaattacaggtagcaaattatggagttggaggacagtatgaaccccattttgactttgcacggaaagatgagccagatgctttcaaagagctggggacaggaaatagaattgctacatggctgttttatatgagtgatgtgtctgcaggaggagccactgtttttcctgaagttggagctagtgtttggcccaaaaaaggaactgctgttttctggtataatctgtttgccagtggagaaggagattatagtacacggcatgcagcctgtccagtrctagttggcaacaaatgggtatccaataaatggctccatgaacgtggacaagaatttcgaagaccttgtacsttgtcagaattggaatgacaaacaggcttccctttttctcctattgttgtactcttatgtgtctgatatacacatttcctagtcttaactttcaggagtttacaattgactaacactccatgatkgattcagtcatgaacctcatcccatgtttcatctgtggacaattgcttactttgtgggttcttttaaaagtaacacgaaatcatcatattgcataaaaccttaaagttctgttggtatcacagaagacaaggcagagtttaaagtgaggaattttatatttaaagaactttttggttggataaaaacataatttgagcatccagttttagtatttcactacatctcagttggtgggttctgttttctggatctgaagactagtaataaactaggacactaactgggttccatgtgattgccctttcatatgatcttctaagttgatttttttcctcccaagtcttttttaaagaaagtatactgtattttaccaaccccctctcttttctyttagctcytctgtggtgaattaaacgtacttgagttaaaatattttgggccttcttaactaaaatgctcaccacttagcctgtttttttatcccttttttaaaatgacagatgattttgttcaggaattttgctgtttttcttagtgctaataccttgcctcttattcctgctacagcagggtggtaatattggcattctg

SEQ ID NO: 2237 - DNA, 1181 bp, Homo sapiens
cggggagcaggacagttgacaggagacagggagttggagggagaagcagcaagaagaaaatggcagtgtaagataaggagccagagatggcctaggccatctgatgcttacrgcctctgaaggaggtcacagtaggagggggttctggggaatggggaacaggaattcacttccgggagcgggcatcttgatgctgaagctccggcccctctcccactcatctcagagcaaggcagaacrtggccataaggtccggctggcagtgggcagcgggctgcgcccagatacctgggagcgttttgtgcggcgcttcgggcccctgcaggtsctggagacatatggactgacagagggcaacgtggccaccatcaactacacaggacagcggggcgctgtggggcgtgcttcctggctttacaaggtgagccagggctgctggtggccccggtaagccagcartccccattcctgggctatgctggcgggccagagctggcccaggggaagttgctaaaggatgtcttccggcctggggatgttttcttcaacactggggacctgctggtctgcgatgaccaaggttttctccgcttccatgatcgtactggagacaccttcaggtggaagggggagaatgtggccacaaccgaggtggcagaggtcttcgaggccctagattttcttcaggaggtgaacgtctatggagtcactgtgccagggcatgaaggcagggctggaatggcagccctagttctgcgtcccccccacgctttggaccttatgcagctctacacccacgtgtctgagaacttgccaccttatgcccggccccgattcctcaggctccaggagtctttggccaccacagagaccttcaaacagcagaaagttcggatggcaaatgagggcttcgaccccagcaccctgtytgacccactgtacgttytggaccaggctgtaggtgcctacctgcccctcacaactgcccggtacagcrccctcctggcaggaaaccttcgaatctgagaacttccacacctgaggcacctgaragaggaactctgtggggtgggggccgttgcaggtgtactgggctgtcagggatcttttctataccagaactgcggtcactattttgtaataaatgtggctggagctgatccagctgtctctgacctaca

SEQ ID NO: 2238 - DNA, 2443 bp, Homo sapiens
tttgggagagagcmatggtaccttcccttaacgggaaaacgagaaatattgaggggaagatggactgcgatccaaacgccctggctctcaggcctggactctagggcttagccagatgcctaaaccgcccaagccgagaaacaacttagaagacagacataaccctgggattcagggaaggcgcgagcaccgcccaggacctggtagggtgcgagccgcgagcagtccgggagggagcgcgcctagggcggagcgtaggctgtggggggagggctgggagtccggggccgccccacacccgcactcctcccgggtttctgctctccgcccgtgtggagtggtgggggcctgggtgggaatgggcgtgtgccagcgcacgcgcgctccctggaaggagaagtctcagctagaacgagcggccctaggttttcggaagggaggatcagggatgtttgcgagcggctggaaccagacggtgccgatagaggaagcgggctccatggctgccctcctgctgctgcccctgctgctgttgctaccgctgctgctgctgaagctacacctctggccgcagttgcgctggcttccggcggacttggcctttgcggtgcgagctctgtgctgcaaaagggctcttcgagctcgcgccctggccgcggctgccgccgacccggaaggtcccgaggsgggctgcagcctggcctggcgcctcgcggaactggcccagcagcgcgccgcgcacacytttctcattcacggctcgcggcgctttagctactcagaggcggagcgcgagagtaacagggctgcacgcgccttcctacgtgcgctaggctgggactggggacccgacggcggcgacagcggcgaggggagcgctggagaaggcgagcgggcagcgccgggagccggagatgcagcggccggaagcggcgcggagtttgccggaggggacggtgccgccagaggtggaggagccgccgcccctctgtcacctggagcaactgtggcgctgctcctccccgctggcccagagtttctgtggctctggttcgggctggccaaggccggcctgcgcactgcctttgtgcccaccgccctgcgccggggccccctgctgcactgcctccgcagctgcggcgcgcgcgcgctggtgctggcgccagagtttctggagtccctggagccggacctgcccgccctgagagccatggggctccacctgtgggctgcasgcccaggaacccaccctgctggaattagcgatttgctggctgaagtgtccgctgaagtggatgggccagtgccaggatacctctcttccccccagagcataacagacacgtgcctgtacatcttcacctctggcaccacgggcctccccaaggctgctcggatcagtcatctgaagatcctgcaatgccagggcttctatcagctgtgtggtgtccaccaggaagatgtgatctacctcgccctcccactctaccacatgtccggttccctgctgggcatcgtgggctgcatgggcattggggccacagtggtgctgaaatccaagttctcggctggtcagttctgggaagattgccagcagcacagggtgacggtgttccagtacattggggagctgtgccgataccttgtcaaccagcccccgagcaaggcagaacrtggccataaggtccggctggcagtgggcagcgggctgcgcccagatacctgggagcgttttgtgcggcgcttcgggcccctgcaggtsctggagacatatggactgacagagggcaacgtggccaccatcaactacacaggacagcggggcgctgtggggcgtgcttcctggctttacaagcatatcttccccttctccttgattcgctatgatgtcaccacaggagagccaattcgggacccccaggggcactgtatggccacatctccaggtgagccagggctgctggtggccccggtaagccagcartccccattcctgggctatgctggcgggccagagctggcccaggggaagttgctaaaggatgtcttccggcctggggatgttttcttcaacactggggacctgctggtctgcgatgaccaaggttttctccgcttccatgatcgtactggagacaccttcaggtggaagggggagaatgtggccacaaccgaggtggcagaggtcttcgaggccctagattttcttcaggaggtgaacgtctatggagtcactgtgccagggcatgaaggcagggctggaatggcagccctagttctgcgtcccccccacgctttggaccttatgcagctctacacccacgtgtctgagaacttgccaccttatgcccggccccgattcctcaggctccaggctgtaggtgcctacctgcccctcacaactgcccggtacagcrccctcctggcaggaaaccttcgaatc

SEQ ID NO: 2239 - DNA, 2700 bp, Homo sapiens
tgtcagtccaggaacaggcaagtaagagaagagggagagagagacaaggaagtgagagtgtggaggatgagatctttggggctgggaagtagggaaagggcattcacctcttctaaggctggggacaggggccgggggaggggaaagagggccagcacggcttcctgacggtgtgactcccacagtgggcccttcccagggaaagactacagtgatggctggggtctggaaagaggggcttgggctccccactcygctcctaatcttacctcycttcttcccccctgcccacttctggcaggggccacagtggtgctgaaatccaagttctcggctggtcagttctgggaagattgccagcagcacagggtgacggtgttccagtacattggggagctgtgccgataccttgtcaaccagcccccggtgcgtgggcacagatcctgggcagagctgctgacacagggctagctcacggggagcaggacagttgacaggagacagggagttggagggagaagcagcaagaagaaaatggcagtgtaagataaggagccagagatggcctaggccatctgatgcttacrgcctctgaaggaggtcacagtaggagggggttctggggaatggggaacaggaattcacttccgggagcgggcatcttgatgctgaagctccggcccctctcccactcatctcagagcaaggcagaacrtggccataaggtccggctggcagtgggcagcgggctgcgcccagatacctgggagcgttttgtgcggcgcttcgggcccctgcaggtsctggagacatatggactgacagagggcaacgtggccaccatcaactacacaggacagcggggcgctgtggggcgtgcttcctggctttacaaggtgaggggcagagaggaaactgaaaacccgtggaacagcagagggctggcaggagagggggctcatgtgactgcaatgatccagtacccaggtctccctttccccagcatatcttccccttctccttgattcgctatgatgtcaccacaggagagccaattcgggacccccaggggcactgtatggccacatctccaggttggtggtgttctggtggggtgggcggggtgctgaagctggcacaggaggactggaattggagactggggtggatgggggcagaaggctctgggaaaggtgacaccactcctgaccctggtgactctgccaggtgagccagggctgctggtggccccggtaagccagcartccccattcctgggctatgctggcgggccagagctggcccaggggaagttgctaaaggatgtcttccggcctggggatgttttcttcaacactggggacctgctggtctgcgatgaccaaggttttctccgcttccatgatcgtactggagacaccttcaggtatctgtccataactggtttttcatcctggacatctgatctctgtgatccaaagcttctgaacctcaactctctaatctgccacctcaacctgggtcctaagctaatctctcattctcagatctcaccatttcatccctgtgacactgacctctgacctcatctccccaccaagcccataaggccctgacccctgactcccagtttcagatctctgytctctgacaggtggaagggggagaatgtggccacaaccgaggtggcagaggtcttcgaggccctagattttcttcaggaggtgaacgtctatggagtcactgtgccaggtgcctaggcatggaaggtgggggaggcacccagccaccaccccgaattggtagtacttgggcgcagggagcacgaggccttcgtggtggtcagccatggaggggcttactctgtctcccacacccaccagggcatgaaggcagggctggaatggcagccctagttctgcgtcccccccacgctttggaccttatgcagctctacacccacgtgtctgagaacttgccaccttatgcccggccccgattcctcaggctccaggtaaccggccacttcccccgccggcccctcaccccatatatcctcaccccacatatccaccccgtgtatcaacttaggagtttgatggctcccaaactccacaaagggacccccaacgtaatacactccgtgaagagaaaaaacacggagacacaagctcttcaccccacttctttccttatccctgccttcttctggcctggctctttctcctccctgtcacctcctcccctaaaccttgacctcacactccctttcccaagacttgctccttaacaaaattcaggcaactcccctgaaccacgtgggcagagtccccttccctccaaatccctgaccctcctgtccccaggagtctttggccaccacagagaccttcaaacagcagaaagttcggatggcaaatgagggcttcgaccccagcaccctgtytgacccactgtacgttytggaccaggctgtaggtgcctacctgcccctcacaactgcccggtacagcrccctcctggcaggaaaccttcgaatctgagaacttccacacctgaggcacctgaragaggaactctgtggggtgggggccgttgcaggtgtactgggctgtcagggatcttttctataccagaactgcggtcactattttgtaataaatgtggctggagctgatccagctgtctctgacctacagt

SEQ ID NO: 2240 - DNA, 2706 bp, Homo sapiens
tttgggagagagcmatggtaccttcccttaacgggaaaacgagaaatattgaggggaagatggactgcgatccaaacgccctggctctcaggcctggactctagggcttagccagatgcctaaaccgcccaagccgagaaacaacttagaagacagacataaccctgggattcagggaaggcgcgagcaccgcccaggacctggtagggtgcgagccgcgagcagtccgggagggagcgcgcctagggcggagcgtaggctgtggggggagggctgggagtccggggccgccccacacccgcactcctcccgggtttctgctctccgcccgtgtggagtggtgggggcctgggtgggaatgggcgtgtgccagcgcacgcgcgctccctggaaggagaagtctcagctagaacgagcggccctaggttttcggaagggaggatcagggatgtttgcgagcggctggaaccagacggtgccgatagaggaagcgggctccatggctgccctcctgctgctgcccctgctgctgttgctaccgctgctgctgctgaagctacacctctggccgcagttgcgctggcttccggcggacttggcctttgcggtgcgagctctgtgctgcaaaagggctcttcgagctcgcgccctggccgcggctgccgccgacccggaaggtcccgaggsgggctgcagcctggcctggcgcctcgcggaactggcccagcagcgcgccgcgcacacytttctcattcacggctcgcggcgctttagctactcagaggcggagcgcgagagtaacagggctgcacgcgccttcctacgtgcgctaggctgggactggggacccgacggcggcgacagcggcgaggggagcgctggagaaggcgagcgggcagcgccgggagccggagatgcagcggccggaagcggcgcggagtttgccggaggggacggtgccgccagaggtggaggagccgccgcccctctgtcacctggagcaactgtggcgctgctcctccccgctggcccagagtttctgtggctctggttcgggctggccaaggccggcctgcgcactgcctttgtgcccaccgccctgcgccggggccccctgctgcactgcctccgcagctgcggcgcgcgcgcgctggtgctggcgccagagtttctggagtccctggagccggacctgcccgccctgagagccatggggctccacctgtgggctgcasgcccaggaacccaccctgctggaattagcgatttgctggctgaagtgtccgctgaagtggatgggccagtgccaggatacctctcttccccccagagcataacagacacgtgcctgtacatcttcacctctggcaccacgggcctccccaaggctgctcggatcagtcatctgaagatcctgcaatgccagggcttctatcagctgtgtggtgtccaccaggaagatgtgatctacctcgccctcccactctaccacatgtccggttccctgctgggcatcgtgggctgcatgggcattggggccacagtggtgctgaaatccaagttctcggctggtcagttctgggaagattgccagcagcacagggtgacggtgttccagtacattggggagctgtgccgataccttgtcaaccagcccccgagcaaggcagaacrtggccataaggtccggctggcagtgggcagcgggctgcgcccagatacctgggagcgttttgtgcggcgcttcgggcccctgcaggtsctggagacatatggactgacagagggcaacgtggccaccatcaactacacaggacagcggggcgctgtggggcgtgcttcctggctttacaagcatatcttccccttctccttgattcgctatgatgtcaccacaggagagccaattcgggacccccaggggcactgtatggccacatctccaggtgagccagggctgctggtggccccggtaagccagcartccccattcctgggctatgctggcgggccagagctggcccaggggaagttgctaaaggatgtcttccggcctggggatgttttcttcaacactggggacctgctggtctgcgatgaccaaggttttctccgcttccatgatcgtactggagacaccttcaggtggaagggggagaatgtggccacaaccgaggtggcagaggtcttcgaggccctagattttcttcaggaggtgaacgtctatggagtcactgtgccagggcatgaaggcagggctggaatggcagccctagttctgcgtcccccccacgctttggaccttatgcagctctacacccacgtgtctgagaacttgccaccttatgcccggccccgattcctcaggctccaggagtctttggccaccacagagaccttcaaacagcagaaagttcggatggcaaatgagggcttcgaccccagcaccctgtytgacccactgtacgttytggaccaggctgtaggtgcctacctgcccctcacaactgcccggtacagcrccctcctggcaggaaaccttcgaatctgagaacttccacacctgaggcacctgaragaggaactctgtggggtgggggccgttgcaggtgtactgggctgtcagggatcttttctataccagaactgcggtcactattttgtaataaatgtggctggagctgatccagctgtctctgacctaca

SEQ ID NO: 2241 - DNA, 3761 bp, Homo sapiens
tttgggagagagcmatggtaccttcccttaacgggaaaacgagaaatattgaggggaagatggactgcgatccaaacgccctggctctcaggcctggactctagggcttagccagatgcctaaaccgcccaagccgagaaacaacttagaagacagacataaccctgggattcagggaaggcgcgagcaccgcccaggacctggtagggtgcgagccgcgagcagtccgggagggagcgcgcctagggcggagcgtaggctgtggggggagggctgggagtccggggccgccccacacccgcactcctcccgggtttctgctctccgcccgtgtggagtggtgggggcctgggtgggaatgggcgtgtgccagcgcacgcgcgctccctggaaggagaagtctcagctagaacgagcggccctaggttttcggaagggaggatcagggatgtttgcgagcggctggaaccagacggtgccgatagaggaagcgggctccatggctgccctcctgctgctgcccctgctgctgttgctaccgctgctgctgctgaagctacacctctggccgcagttgcgctggcttccggcggacttggcctttgcggtgcgagctctgtgctgcaaaagggctcttcgagctcgcgccctggccgcggctgccgccgacccggaaggtcccgaggsgggctgcagcctggcctggcgcctcgcggaactggcccagcagcgcgccgcgcacacytttctcattcacggctcgcggcgctttagctactcagaggcggagcgcgagagtaacagggctgcacgcgccttcctacgtgcgctaggctgggactggggacccgacggcggcgacagcggcgaggggagcgctggagaaggcgagcgggcagcgccgggagccggagatgcagcggccggaagcggcgcggagtttgccggaggggacggtgccgccagaggtggaggagccgccgcccctctgtcacctggagcaactgtggcgctgctcctccccgctggcccagagtttctgtggctctggttcgggctggccaaggccggcctgcgcactgcctttgtgcccaccgccctgcgccggggccccctgctgcactgcctccgcagctgcggcgcgcgcgcgctggtgctggcgccagagtttctggagtccctggagccggacctgcccgccctgagagccatggggctccacctgtgggctgcasgcccaggaacccaccctgctggaattagcgatttgctggctgaagtgtccgctgaagtggatgggccagtgccaggatacctctcttccccccagagcataacagacacgtgcctgtacatcttcacctctggcaccacgggcctccccaaggctgctcggatcagtcatctgaagatcctgcaatgccagggcttctatcagctgtgtggtgtccaccaggaagatgtgatctacctcgccctcccactctaccacatgtccggttccctgctgggcatcgtgggctgcatgggcattggtcagtctccccaaccccaccttcattaattcatccagtagacatttattaagcacgtactatggtgtgagtcctccagggtagataatctagaggacggatggggcagagccctactcaccaggagctctgtacaatagggcaatgtcacctgcctagacctacagactgaggaacggtgaggggggccatacagccacataactccaggctgcagggtcaaaggcagggaaggactgtgtcagtccaggaacaggcaagtaagagaagagggagagagagacaaggaagtgagagtgtggaggatgagatctttggggctgggaagtagggaaagggcattcacctcttctaaggctggggacaggggccgggggaggggaaagagggccagcacggcttcctgacggtgtgactcccacagtgggcccttcccagggaaagactacagtgatggctggggtctggaaagaggggcttgggctccccactcygctcctaatcttacctcycttcttcccccctgcccacttctggcaggggccacagtggtgctgaaatccaagttctcggctggtcagttctgggaagattgccagcagcacagggtgacggtgttccagtacattggggagctgtgccgataccttgtcaaccagcccccggtgcgtgggcacagatcctgggcagagctgctgacacagggctagctcacggggagcaggacagttgacaggagacagggagttggagggagaagcagcaagaagaaaatggcagtgtaagataaggagccagagatggcctaggccatctgatgcttacrgcctctgaaggaggtcacagtaggagggggttctggggaatggggaacaggaattcacttccgggagcgggcatcttgatgctgaagctccggcccctctcccactcatctcagagcaaggcagaacrtggccataaggtccggctggcagtgggcagcgggctgcgcccagatacctgggagcgttttgtgcggcgcttcgggcccctgcaggtsctggagacatatggactgacagagggcaacgtggccaccatcaactacacaggacagcggggcgctgtggggcgtgcttcctggctttacaaggtgaggggcagagaggaaactgaaaacccgtggaacagcagagggctggcaggagagggggctcatgtgactgcaatgatccagtacccaggtctccctttccccagcatatcttccccttctccttgattcgctatgatgtcaccacaggagagccaattcgggacccccaggggcactgtatggccacatctccaggttggtggtgttctggtggggtgggcggggtgctgaagctggcacaggaggactggaattggagactggggtggatgggggcagaaggctctgggaaaggtgacaccactcctgaccctggtgactctgccaggtgagccagggctgctggtggccccggtaagccagcartccccattcctgggctatgctggcgggccagagctggcccaggggaagttgctaaaggatgtcttccggcctggggatgttttcttcaacactggggacctgctggtctgcgatgaccaaggttttctccgcttccatgatcgtactggagacaccttcaggtggaagggggagaatgtggccacaaccgaggtggcagaggtcttcgaggccctagattttcttcaggaggtgaacgtctatggagtcactgtgccagggcatgaaggcagggctggaatggcagccctagttctgcgtcccccccacgctttggaccttatgcagctctacacccacgtgtctgagaacttgccaccttatgcccggccccgattcctcaggctccaggagtctttggccaccacagagaccttcaaacagcagaaagttcggatggcaaatgagggcttcgaccccagcaccctgtytgacccactgtacgttytggaccaggctgtaggtgcctacctgcccctcacaactgcccggtacagcrccctcctggcaggaaaccttcgaatctgagaacttccacacctgaggcacctgaragaggaactctgtggggtgggggccgttgcaggtgtactgggctgtcagggatcttttctataccagaactgcggtcactattttgtaataaatgtggctggagctgatccagctgtctctgacctaca

SEQ ID NO: 2242 - DNA, 6545 bp, Homo sapiens
tgctgatcgctcgtgccggtgcggccgttaaccgcccttgccggagccctaggctcaaaagcagccccttacccttcctgggcttcccccaacccctttcccggtctgccctggggcatgagcagcgatggccggctgcatccctgaggagaaaacttaccggcgcttcctggagctattcctgggcgagtttcgcggaccgtgcggcggcggcgagccggagccggaacccgaacccgaacccgaacccgaacccgaacccgagyccgagyccgagcccgaaccygaactggtagaagctgaggcggccgaggcttcggtagaggaacccggggaggaggcggccacggtagccgcgacggaggagggggaccaggagcaagacccggagcccgaggaggaggcggcggttgagggtgaggaggaggaggagggcgcggcgacggcggcggcagccccggggcactcggccgtgccgccgccgccgccccagctgccgcctttgcccccgctcccgcgaccgctgtcagagcgcatcacccgcgaggaggtggagggcgaaagcctggacctgtgcctgcagcagctctacaaatataattgcccttcctttttggctgctgctttagccagagccacatcagatgaagtccttcagagtgatctttctgcacattatatcccaaaggaaacggatggcacagaagggactgtggagattgagacagtgaaattggcccgttctgtcttcagcaaactacacgagatttgctgcagctgggtgaaagacttccccctccgcaggagaccccagctttattatgagacatcaatccatgccatcaaaaacatgcgcaggaaaatggaggacaaacatgtctgcattcctgactttaatatgctcttcaacctagaggaccaggaagaacaagcttactttgcagtgtttgatggccatgggggagtagatgctgctatttatgcctccattcacctccacgttaacttagtccgccaggagatgttcccccatgatcctgctgaggccctgtgcagggccttccgggtcactgatgagcggtttgtgcagaaagcagccagggagagcttaagatgtgggaccacaggagtggtgactttcatcagaggcaacatgctacatgtggcctgggtgggtgattcccaggttatgcttgtgagaaagggccaagctgttgaactaatgaagccacacaaaccagacagagaggatgaaaagcagagaattgaggcccttggaggttgcgtagtctggtttggtgcctggagggtgaatggaagtctgtcggtttccagagctattggagatgctgaacataagccatatatctgtggggatgcagattctgcctccactgttctggatgggaccgaagactacctcattctggcctgtgatggcttctatgacaccgtgaaccctgatgaggcagtgaaagttgtgtccgaccacctgaaagagaataatggagacagcagcatggttgcccacaaattagtggcatcagctcgtgatgctgggtcaagtgataacatcacggttattgtggtattcctgagggacatgaacaaagctgtaaatgttagtgaggaatcagattggacagagaactcttttcaaggagggcaagaagatggtggggatgataaggagaatcatggagagtgcaaacgcccttggcctcagcaccagtgctcagcaccagccgacctaggctatgatgggcgtgtggattcattcactgatagaactagcctgagcccagggtcccaaatcaacgtgctggaagacccaggctacctagatctcacacaaatagaagcaagcaaacctcacagtgcccagtttttgctaccagttgagatgtttggtcctggtgcaccaaagaaagcaaatyttattaatgagttaatgatggagaaaaaatcagttcagtcatcattgcctgaatggagtggtgctggagagtttcccactgctttcaatttgggttcaacaggggagcagatatacagaatgcagagcttgtctcctgtctgttcagggttggaaaatgaacagttcaaatccccrggaaacagagtttytagattgtctcatttacgccaccactactcaaagaagtggcacagattcaggtttaatccaaagttttattcatttctctctgctcaagagccttcccacaaaataggcactagcctgtcctcacttactggaagtgggaagagaaataggataagaagttctctgccatggaggcaaaatagttggaaagggtacagtgaaaacatgaggaagctcagaaagactcatgatattccatgcccagatcttccttggagctataaaatagaataatttttctttcaagtaggttagctagctctcccccaataaaaataccactatcagagtagaaacaaggtagacatttctaaaacatatgtgcttcattatgaatccatggatggctcaattcttaaatgtaaatagatctctaggaaactcaaagtacagtgttttcaatctaaaaagaagtattggcagtttcacttgcaaaattacacagctggtccctgtgatgtgtctcgacaccaatacacaacccccttcccaccatccttcatgtcactagatacacaacccccttcccaccatcccttcagtcactagtggaagctttcaagttagttatttcagtcaggatatacagtgttgaaatctcaatgcagttgaaatctggtctgatgtgcctaatttatctgtggaaaatttaatgctgaattacatttggttgggaaatgtccctcaaaatcctgggcactatgaaggaaccccctgccccctcacctttttgggtaggtaaaagactaaaagccatatggattttaactgataacaatgaaagtggtaaatcagtgtaaaagtgtcatattctcagacttgtgaggcggtttatagtcagaaagatttacggatttttttcctgtaacataaaagattgtgaactttttttaattaaaaaatatttcctagggctgtagttatttgggagtttcataacctgttatggtgcttttggtggaatttttattatttagcattttaggagaccgctgtcaactggttttaatctatgatgctaatgtgttttccactgtaccctcatctcaggaataaaactgctttaacggagatgatgtcaggtacaaatacactatagagtcaaaataccatttacaaagaaaatcaaaagcatttctatattttgtctttttttagttcagacagcaaaggcatgtactactataaaatacaaagtgattttagagaatgaaaaatgctacttttatcttctctaaaattatttcccccaaggtagtgaagtaattggaatgaaggaggctgaaagtattgtctaaagtgagcccagaggccactgagaatgcagattactgacagccaggtctgtttagttgtaattggaagacacatgagtgtcctgcttacatgtagcttcagactgcagagacaggacgtgtgcttttcatttcaatatttagttatatttgatattttgaaactgtctgctttttgctatttctgcagtttcaagttagttagaagcatgttgtcaactaaagacaacaaactatcagattcattcattcagtgaagcagcctctgattctctaagagtcacgaatgtcttagtgttaccctcccctagtcaacagcagaccagcctggccaatgcctatgggtggcccctctggagtgctcactaacaagggtgagtgctctcgctaagaagtgtcccccgcctaatcatgtgtttataggatagtacacgttccccaggcccataacagaggactaaaatctctgaattttaaagacacagatgactggcatattttggataccagtatagctatatcaaatagacaaaaacagcttcactttagcaatgatcagattgttaatctacagattttattttttaaaatttggatgtaagtagagactttcagtatttgttttctcttgattttgaagtcatttcttcttctcacgtctgtgacaaatggttgaaaaggagtcaacatggccccaactatagtgccggaaccttttcatcattctgaggctttgccccacacatggtcctcactcatatctgtcaccttctgaagcctagatcttgttaacccatcaggtgcagtgtcagtttcaaatcaaattatctaagaaaacaagaaaacaaaggcagcagactattggtacacattatagtccaaagtgcttagcgaagtaaaaaaaaaagctttttaaaatttctattgttgtctattggtaatgtttttgatcagaataaagagggtaaagggaaaaagttactacacatgctaggctttctcagtggggaaaaaaatggctggatagaactgggacaaacacagacccatctttaggggtctggattttgtaggtccgactacacagcagtgttaactcatttctcatgccattagctctctacaaaataaagcaaagtagttctagtgtggtcgttataaaccaatattgtgaaaaatagcaactattcatttgttcacaacatgcgtatttatagagtagttaggtaccatttgtaaggtaaatcctttaaaattctataatacatactaaaatagtggttattggtctgatatatgctgctcttggttctataaactagataaaagcagtgctttgtgaaatgcagtgttctctcttaacgccactggtgataggaagtagttcccttcagttcaaatcctgtgcccttatttgctgcttgctgacgtaagcaataagtaaccctctaactaatggtatctacatatttctgtaacttgtatttaatgatggtgtacctggtgattgtaaaaatattagacagatataaaagtatctatataatatctataaactgttaatgctgaggtatagtctgtgaattatgtgttttgtatttttattcattgtgtaatttagtggtggtgaaagttctacactcaatccttaaagagtggcagtatccctttttcaatttaacatggtctgcatcaatctgtttgcctgctaaacaagttagaataggaaatagtaaaataaatccaaacaagagtgtaatattggttagggaaacaaacttcargtcaccaactgaagtcattacaaactccttgtacattcactgtgagtttcaaagggagtcagtccctaatttacaggtttcctttgttcactttctagatgtgtacttttgagggacatgaggttaggcaacattacagcaacacacactggggctattaatcccatttaggtctgtactaaagaggatgggtagaaacacatatgtatataccttttctttacctagaagtgccatccattgtccttgaattattatgattaaagttactgttgcatttaggaggctccttgaaagtaacaccttttccaaggacaatggcaacaatgtcaatgtcaacactgagtctaattttgaccacatttatagtggtatagtgtcaatactgcattttcatgacaaccacactccactgttgaaacactgtgccagtgagaagtgcaacatccagtgggcagatgaaaatgatgcatggccaagttcagtgtttacagataaaactgctgtggttcaagtgcttccttccccatcaaatccttgataaggctttgtgggaaaatgatctaaattattgttttaatttttaaacctaatttattcactcagtgaacattcttacctaagcaaggctataaaagggaatactacagttttgtccacactttaatttgagaccatttttctttgaatcgtaagttagcaaaagaaatttttttcacctttgaaaatcacgtgatgtkaaaggacaaatgcccactcttctattctgatctgcaaatagcttaaatgtctcttgcaaaacaaagtaagataccaccagtattacaacacaatgattttccagacaaatggtatggtgttgaaaaataactgttacttcttaaagcagcatttkatcttctattttgaagactatttattgtaataattagaaaacatgaaatagggaactccagactgacacagcagttgtttttgaaaaggaaataaactttgatgaattagataatccagatacatcattgtaaactcttactctaggtgctctttggtgagagacaggctttgttctcttgttcataacatttctctgcaaagaattctctatggagtgaagcgaatgaagtgaataatttcttaccaaataaatttatcaatttacaaatctgctctacatctcacttttgagttcagttgtagtcatgagtgatccttcatattttattaaaagtgttcattcaggtaaggtgtatgttgaaattttgccaattatcttaataaaacctggcaatttaaaaa

SEQ ID NO: 2243 - DNA, 6356 bp, Homo sapiens
agcaaagagcggagctgagggtacccggtttgaagtcgtgcgggtcggaggactgcygcctccgctaccgtcttggacccctgcttaccggccgccgcggggacgagctcgggtaggcggcagggcagatgcccgrgggcctgcgctggaacgccccacgccgcaccggccgctcccctgtgctccgcggcctgggcctgcgccgctcagctctctggaaactagcgcctcagctgcgcggcgcgtaggtcgcggggagctccgaaccgccggcgcccggccatggcggtctccaggctagatcgcctttttattttactggatactggcactactcctgttacaagaaaagctgctgcacagcaacttggagaagtggtgaagcttcatccccatgaactaaataatctcctgtctaaagtgttgatatatttaaggagtgcaaattgggatacccggattgcagcaggacaagctgttgaagctatagtgaaaaatgtacctgagtggaatccagtgccgagaaccagacaagaacctacttccgaaagttctatggaagattcacctactacagagcgattgaattttgacagatttgatatatgtagattgttacaacatggtgcatcactcctgggatctgctggtgccgaatttgaagtccaagatgaaaaatcaggtgaagtggatcctaaagagaggatagcacgccaacgaaaattattacagaagaaacttggccttaatatgggagaagcaattggaatgagtactgaagaacttttcaatgatgaggatttggattataccccaacttcagcatcctttgttaacaaacaacctactcttcaggcagctgaattgattgactcagagtttcgagcaggaatgagcaatagacaaaagaacaaagctaaaagaatggccaagttatttgcaaaacagagatccagggatgcagtggaaactaatgagaagagcaatgatagcactgatggggagccagaagaaaagagacggaaaatagcaaatgttgttattaatcagtctgcaaatgattccaaagtcttgattgataatattccagacagctcttccttaattgaagagacaaatgaatggcctttggaaagcttttgtgaagaactttgcaatgacctttttaatccctcctgggaggttcgacatggtgcaggcactggacttagggaaattcttaaagctcatgggaaaagtggtggtaaaatgggtgacagcactttagaagagatgattcagcagcatcaagagtggttggaagacttggttattagactcctttgtgtttttgcattagacagatttggagactttgtttctgatgaagttgtggcaccagttcgtgaaacttgtgctcaaacattaggtgtggttttaaaacacatgaacgaaacaggagttcataagactgtggatgtgctgctaaaattacttacacaagaacaatgggaagttagacatggtggtctgctgggaataaaatatgctttggcagtccgtcaggatgtaattaatactttattgcctaaagttttaactagaataattgaaggactccaggatcttgatgatgatgtcagagctgttgctgcagcatcattagtgcctgtagtagaaagccttgtctatcttcagacacaaaaggtgcccttcattataaatacattgtgggatgctcttctggaattagatgatctaacagcttcaacaaatagtattatgactctcctttcatccttgttaacttaccctcaggtccaacaatgcagtattcagcagtcactgacagttttagttccacgtgtctggccttttttgcatcacactatatcatcagttcgaagagcagcattggaaactctgtttacgttattatcaacacaggaccagaactcttcatcttggcttatacctatactgcctgatatgctccgacacatttttcagttctgtgttttggaaagcagccaggaaattctggaccttattcacaaggtttggatggaactgttgagtaaggcttcagttcagtatgtggtagcagctgcttgcccatggatgggtgcttggctttgcttgatgatgcagccttctcatttacctatcgatttaaatatgttgctagaagtaaaagctagagccaaggaaaaaacaggtggtaaggtgcgccaaggccaaagccagaataaagaagtacttcaggagtatattgcaggtgccgacaccatcatggaagacccagccaccagggattttgtagttatgcgggccagaatgatggcagccaagttgttaggagcactttgttgctgtatttgtgatccaggtgtaaatgtggtaactcaagaaattaaaccagctgaatccctgggccagttactactcttccatttgaactccaagtctgctttacagaggattagtgtagctttggtaatctgtgaatgggctgctttacaaaaggagtgtaaagctgttaccttagctgtgcagccgcgtttacttgatatcctttcagaacatttatattatgacgaaattgccgttccattcacacgaatgcagaatgaatgtaaacaacttatatcatcattagctgatgtacatattgaagttggtaatcgagtaaacaacaatgttttaacaatagatcaagctagtgacttggtcactactgtttttaatgaagccacatcatctttcgatttaaatcctcaagtgttacaacagttagatagtaaacgacagcaggtccaaatgacagttacagagaccaaccaggagtggcaagtgttgcagttgagagtgcatacttttgctgcctgtgcagttgtgagcttgcagcagcttccggagaaattaaatcctatcataaaaccattaatggagacaattaaaaaagaagagaatacactagtgcaaaactatgcagctcagtgcatagctaaactccttcagcagtgcacaacaaggacgccctgtcccaattcaaaaattattaaaaacctctgtagctcactttgtgtggacccatatctaactccttgtgtcacatgtccagtaccaacacaaagtggccaggaaaattctaaaggatccacctcagaaaaagatggaatgcaccatactgtcaccaagcacagaggtataattacactctacaggcaccagaaagctgcctttgctatcacaagtaggcgaggtcctacccccaaagcagtaaaagctcaaatagcagatcttcctgcaggaagtagtggaaatattcttgttgaacttgatgaggcccagaagccttacctggtacaacggagaggagctgaatttgctttgacaactatagtaaagcattttggtggtgaaatggcagtgaagttgccacatctcygggatgctatggttggcccattgaggaatacaatcgacataaataattttgatggaaaatccctcctggataagggagatagccctgctcaagaattggtgaattctctgcaggtttttgaaacagcagcagcttcaatggattctgagcttcatcccttgttggtccagcatttgccacatctttatatgtgccttcaataccccagtactgcagtgaggcacatggctgctcgttgtgtaggtgtcatgagcaaaatagctaccatggaaacaatgaatatttttttggagaaggttcttccgtggctgggagcaattgatgacagtgtcaaacaagagggtgcaattgaagcacttgcctgtgtaatggaacaactagatgttggtattgttccatatattgtccttttagttgttcctgtattaggaagaatgagtgatcagacagacagtgtgagattcatggccacgcagtgctttgcaacgctaattagactcatgccacttgaggcaggcattccagaccctccaaacatgtcagcagaattaatccaattgaaagccaaggagcgacactttttggagcaattgttagatgggaaaaaattggaaaattataaaattccagtaccaatcaatgctgaactcagaaaatatcagcaggatggtgtgaactggttagcatttcttaataagtataaacttcatggaattctgtgtgatgacatgggtttaggaaaaactttacagtccatctgcattctagcaggagatcattgtcatagggcccaggaatatgcaagatcaaaattagcagaatgtatgccacttccttccttagtggtttgtccgccaacattaacaggccattgggtggatgaagtaggtaaattttgctctagagaatatctcaacccgttgcattacactggacctcccactgaaagaataaggttacagcaccaagtaaaaaggcacaatctaatagtggcttcatatgatgttgtgaggaatgacatagatttctttagaaatattaaatttaactactgcattcttgatgaaggccatgtcatcaaaaatggaaaaacaaagttgtcaaaagcagtaaaacaactgactgctaattataggattattctttctggaacaccaatccagaacaacgttttggagctgtggtcattatttgatttcctcatgccaggatttttgggtactgaacgccagtttgctgctcgatatggtaaacctatattagcaagtagggatgctcgaagctccagtcgagagcaagaagcaggtgttcttgctatggatgcgctgcaccgccaagtactaccgtttcttttgagaagaatgaaagaagatgttttgcaggatcttccacctaaaattattcaagactattattgtactcttagtcctctccaggttcagctctatgaagattttgctaagtctcgtgccaagtgtgatgttgatgaaacagtttcttcagctacactttctgaagaaactgaaaaaccaaagcttaaagctacaggccacgtattccaggcattacagtacttacgtaaactgtgcaaccatccagcattagtcttaacacctcaacatccagaattcaagaccactgccgaaaaactggcagttcagaattcttctctacatgatattcaacatgcccctaagctctcagctttgaaacaattgctgttggactgcggtttgggaaatggcagcacttccgagagtggcacagagtctgttgtggcccagcacaggatactgatattctgtcagctgaaaagcatgcttgatatagtagagcatgatctcctcaaacctcacttgccctctgtcacttatttgagattagatggcagcatacctcctggtcagaggcattccattgtttcccggtttaataatgatccatcyatagacgttctgttacttaccactcacgttggtggcctgggacttaatttgacaggcgctgacacagtagtatttgtggagcatgactggaatcctatgcgagatctacaagccatggaccgggcccatcgcattgggcagaaacgtgtggttaacgtataccgattgataaccagaggaacattggaagaaaaaataatggggttgcagaaattcaagatgaacatagcgaatactgttattagccaagagaattctagtttgcagagcatggggactgatcagcttcttgatctgtttactcttgataaggatggcaaagcagaaaaagctgacacctctacttctgggaaagcaagtatgaaatcaattcttgaaaacctgagtgatctttgggatcaagagcagtatgattcagagtacagcctggaaaattttatgcattctctcaagtaactatcaaatattgtaaatgcaattgctgctagttcagttacatttctgctgatattcagcaaatttctaagtttatggtgaacttttaactcaatgtgtaaatagatctggagaatattcagcataatgctggctcttgtttcactgggggaaacaagttattctcaaatatttgcactgtattaaatttaaatgttaatgtgaaatggtttaaattttacatgctgaaaagctgcagagcagaggaaccaaaccaggtttatttgtgctaccaggaggtgttcttaatgggaacaggcctcctatctttagtcactttgtacaggatgatatccatgagtactttagtgtttgtatatgttttttcttttaaatagaacttgtttttataattgatttaaaatagggctttttttctataaaagccttaatgagccataattttaagaatataagaataatgactatgatattggtcagtcttagaacatgaaaatatgcatagtgtttttcaaatcttyaac

SEQ ID NO: 2244 - DNA, 5929 bp, Homo sapiens
ctttccccttactccgctcccctcttttccctccctctcctccccttccctctgttctctcctcctcttcccctcccctcccccgtccggagcactctatattcaagccaccgtttcctgcttcacaaaatggccaccgcacgcgacacctacggtcacgtggcctgccgccctctcagtttcgggaatctgcctagctcccactaaggggaggctacccgcggaagagcgagggcagattagaccggagaaatcccaccacatctccaagcccgggaactgagagaggaagaagagtgaaggccagtgttaggaaaaaaaaaacaaaaacaaaaaaaacgaaaaacgaaagctgagtgcatagagttggaaaggggagcgaatgcgtaaggttggaaaggggggcgaagaggcctaggttaacattttcaggcgtcttagccggtggaaagcgggagacgcaagttctcgcgagatctcgagaactccgaggctgagactagggttttagcggagagcacgggaagtgtagctcgagagaactgggacagcatttcgcaccctaagctccaaggcaggactgctaggggcgacaggactaagtaggaaatcccttgagcttasacctgagggagcgcgcagtagccgggcagaagtcgccgcgacagggaattgcggtgtgagagggagggcacacgttgtacgtgctgacgtagccggctttccagcgggtatattagatccgtggccgcgcggtgcgctccagagccgcagttctcccgtragagggccttcgcggtggaacaaacactcgcttagcagcggaagactccgagttctcggtactcttcagggatgagtcatgtggcagtggaaaatgcgctcgggctggaccagcagtttgctggcctagacctgaactcttcagataatcagagtggaggaagtacagccagcaaagggcgctatattcctcctcatttaaggaaccgagaagctactaaaggtttctacgataaagacagttcagggtggagttctagcaaagataaggatgcgtatagcagttttggatctcgtagtgattcaagagggaagtctagcttcttcagtgatcgtggaagtggatcaaggggaaggtttgatgatcgtggacggagtgattacgatggcattggcagccgtggtgacagaagtggctttggcaaatttgaacgtggtggaaacagtcgctggtgtgacaaatcagatgaagatgattggtcaaaaccactcccaccaagtgaacgcttggaacaggaactcttttctggaggcaacactgggattaattttgagaaatacgatgacattccagttgaggcaacaggcaacaactgtcctccacatattgaaagtttcagtgatgttgagatgggagaaattatcatgggaaacattgagcttactcgttatactcgcccaactccagtgcaaaagcatgctattcctattatcaaagagaaaagagacttgatggcttgtgcccaaacagggtctggaaaaactgcagcatttctgttgcccatcttgagtcagatttattcagatggtccaggcgaggctttgagggccatgaaggaaaatggaaggtatgggcgccgcaaacaatacccaatctccttggtattagcaccaacgagagagttggcagtacagatctacgaggaagccagaaaattttcataccgatctagagttcgtccttgcgtggtttatggtggtgccgatattggtcagcagattcgagacttggaacgtggatgccatttgttagtagccactccaggacgtctagtggatatgatggaaagaggaaagattggattagacttttgcaaatacttggtgttagatgaagctgatcggatgttggatatggggtttgagcctcagattcgtagaatagtcgaacaagatactatgcctccaaagggtgtccgccacactatgatgtttagtgctacttttcctaaggaaatacagatgctggctcgtgatttcttagatgaatatatcttcttggctgtaggaagagttggctctacctctgaaaacatcacacagaaagtagtttgggtggaagaatcagacaaacggtcatttctgcttgacctcctaaatgcaacaggcaaggattcactgaccttagtgtttgtggagaccaaaaagggtgcagattctctggaggatttcttataccatgaaggatacgcatgtaccagcatccatggagaccgttctcagagggatagagaagaggcccttcaccagttccgctcaggaaaaagcccaattttagtggctacagcagtagcagcaagaggactggacatttcaaatgtgaaacatgttatcaattttgacttgccaagtgatattgaagaatatgtacatcgtattggtcgtacgggacgtgtaggaaaccttggcctggcaacctcattctttaacgagaggaacataaatattactaaggatttgttggatcttcttgttgaagctaaacaagaagtgccgtcttggttagaaaacatggcttatgaacaccactacaagggtagcagtcgtggacgttctaagagtagcagatttagtggagggtttggtgccagagactaccgacaaagtagcggtgccagcagttccagcttcagcagcagccgcgcaagcagcagccgcagtggcggaggtggccacggtagcagcagaggatttggtggaggtggctatggaggcttttacaacagtgatggatatggaggaaattataactcccagggggttgactggtggggtaactgagcctgctttgcagtaggtcaccctgccaaacaagctaatatggaaaccacatgtaacttagccagactataccttgtgtagcttcaagaactcgcagtacattaccagctgtgattctccactgaaattttttttttaagggagctcaaggtcacaagaagaaatgaaaggaacaatcagcagccctgttcagaaggtggtttgaagacttcattgctgtagtttggattaactcccctcccgcctacccccatcccaaactgcatttataattttgtgactgaggatcatttgtttgttaatgtactgtgcctttaactttagacaactttttattttgatgtcctgttggctcagtaatgctcaagatatcaattgttttgacaaaataaatttactgaacttgggctaaaatcaaaccttggcacacaggtgtgatacaacttaacaggaatcatcgattcrtccataaataatataaggaaaaacttatgcggtagcctgcattagggctttttgatacttgcagattgggggaaaacaacaaatgtcttgaagcatattaatggaattagtttctaatgtggcaaactgtattaagttaaagttctgatttgctcactctatcctggataggtatttagaacctgatagtctttaagccattccagtcatgatgaggtgatgtatgaatacatgcatacattcaaagyactgttttcaaagttaatgcaagtaaatacagcaattcctctttcaacgtttaggcagatcattaattatgagctagccaaatgtgggcatactattacagggaaagtttaaaggtctgataacttgaaataggtttttaggagaattcatctacttagactttttaaatgcctgccataaatgaaattgaaatggtagaatggctgaccacagcaatgaccagccctcattagggccctggatgatttttggtctaataacgcatgctagtgttgatgttttttggtcaagagggtatgaacaggaagaattaaatgcagcaggctttattttaaatgccgattcacattactctgttcaagctgcgttgagatgttaaactggcttactatagacttcgtaaaaatggctccagaagagtaacaaactgaaatctttgagatcacacaggttggaaatatgtacataactgcacaaggtgtcaattctgctctacagtgcagttttagtcagttttagttgcataggtttccattgtatttatagtctgtttatgctaaatctggccaaagatgagcattgtccaccactaaaatgcctctgccactttgaattctgtgctaattttgtggccagaatgcggtgatcaaaacgctccatctttttacagtggcataggaagacggcaaaaatttcctaaagtgcaatagattttcaagtgtattgtgccttgttctaaaacttttattaagtaggtgcacttgacagtattgaggtcatttgttatggtgctatttcaattagtctaggtttaggcccttgtacattttgcccataactttttacaaagtacttcttttattgcacattcagagaattttatatatatgtcttgtgtgcgtgtccttaaacttccaatcttactttgtctcttggagattgttgaacgcagcttgtctaggaaggggatgggactagattctaaaatttatttgggaccatgggaatgatagttgggaagaaaactatttgcacacgacagatttctagatactttttgctgctagttttatgtaatatttattgaacattttgacaaatatttatttttgtaagcctaaaagtgattctttgaaagtttaaagaaacttgaccaaaagacagtacaaaaacactggcacttgaatgttgaatgtcaccgtatgcgtgaaattatatatttcggggtagtgtgagcttttaatgtttaagtcatattaaactcttaagtcaaattaagcagacccggcgttggcagtgtagccataactttctgatgttagtaaaaacaaaattggcgacttgaaattaaatcatgccaaggttttgatacacttgtcttaagatattaatgaaacacttcaaaacactgatgtgaagtgtccagattctcagatgtttgttgtgtggattttgtttagttgtgtgtttttttttttttttcagtgaatgtctggcacattgcaatcctcaaacatgtggttatctttgttgtattggcataatcagtgacttgtacattcagcaatagcatttgagcaagttttatcagcaagcawtattttcagttaataaggtttcaaaaatcatgtaaggatttaaacttgctgaatgtaaagattgaacctcaagtcmctgtagctttagtaattgcttattgtattagtttagatgctagcmctgcatgtgctgtgcatattytgattttattaaaataaaaagttgaactgcacagtctcctttgttgttgtcaattgtggtttattttcagaggtgtaaataaagtgctcttgcctgaaaaattgtaaaatgttattttttgcttgtcatccagtgctattttttgagatgcctcttggatacagaatgactcataccataagtatttgcaatgaaagatgaagatagtattagtttgaaatacagtgaaacaggatttttgtaatagacggaaatctaaaaggcccttactgataatacagcatgtattagaaattggcttatactttgaacaatttgacatgggtgggagtctctttgttctttgaagtatctattatgaaggatggttgaacagtggaagaatgagcaggataaaagtcaagtgtgtcagtagtccaacaagtgatggtaagtatatacttagggaaggaatcaagactatttgggccaggtgtgatgattacatagtcctatagtgctagtttacttggaagctgaggggcaggaagattgcttgagcccacgagttcaagtccagcctgggcaacgtatagcaagaccttatctctgaaaacaggtaataagacatctatgcttactgtacacactg

SEQ ID NO: 2245 - DNA, 4357 bp, Homo sapiens
ctttccccttactccgctcccctcttttccctccctctcctccccttccctctgttctctcctcctcttcccctcccctcccccgtccggagcactctatattcaagccaccgtttcctgcttcacaaaatggccaccgcacgcgacacctacggtcacgtggcctgccgccctctcagtttcgggaatctgcctagctcccactaaggggaggctacccgcggaagagcgagggcagattagaccggagaaatcccaccacatctccaagcccgggaactgagagaggaagaagagtgaaggccagtgttaggaaaaaaaaaacaaaaacaaaaaaaacgaaaaacgaaagctgagtgcatagagttggaaaggggagcgaatgcgtaaggttggaaaggggggcgaagaggcctaggttaacattttcaggcgtcttagccggtggaaagcgggagacgcaagttctcgcgagatctcgagaactccgaggctgagactagggttttagcggagagcacgggaagtgtagctcgagagaactgggacagcatttcgcaccctaagctccaaggcaggactgctaggggcgacaggactaagtaggaaatcccttgagcttasacctgagggagcgcgcagtagccgggcagaagtcgccgcgacagggaattgcggtgtgagagggagggcacacgttgtacgtgctgacgtagccggctttccagcgggtatattagatccgtggccgcgcggtgcgctccagagccgcagttctcccgtragagggccttcgcggtggaacaaacactcgcttagcagcggaagactccgagttctcggtactcttcagggatgagtcatgtggcagtggaaaatgcgctcgggctggaccagcagtttgctggcctagacctgaactcttcagataatcagagtggaggaagtacagccagcaaagggcgctatattcctcctcatttaaggaaccgagaagctactaaaggtttctacgataaagacagttcagggtggagttctagcaaagataaggatgcgtatagcagttttggatctcgtagtgattcaagagggaagtctagcttcttcagtgatcgtggaagtggatcaaggggaaggtttgatgatcgtggacggagtgattacgatggcattggcagccgtggtgacagaagtggctttggcaaatttgaacgtggtggaaacagtcgctggtgtgacaaatcagatgaagatgattggtcaaaaccactcccaccaagtgaacgcttggaacaggaactcttttctggaggcaacactgggattaattttgagaaatacgatgacattccagttgaggcaacaggcaacaactgtcctccacatattgaaagtttcagtgatgttgagatgggagaaattatcatgggaaacattgagcttactcgttatactcgcccaactccagtgcaaaagcatgctattcctattatcaaagagaaaagagacttgatggcttgtgcccaaacagggtctggaaaaactgcagcatttctgttgcccatcttgagtcagatttattcagatggtccaggcgaggctttgagggccatgaaggaaaatggaaggtatgggcgccgcaaacaatacccaatctccttggtattagcaccaacgagagagttggcagtacagatctacgaggaagccagaaaattttcataccgatctagagttcgtccttgcgtggtttatggtggtgccgatattggtcagcagattcgagacttggaacgtggatgccatttgttagtagccactccaggacgtctagtggatatgatggaaagaggaaagattggattagacttttgcaaatacttggtgttagatgaagctgatcggatgttggatatggggtttgagcctcagattcgtagaatagtcgaacaagatactatgcctccaaagggtgtccgccacactatgatgtttagtgctacttttcctaaggaaatacagatgctggctcgtgatttcttagatgaatatatcttcttggctgtaggaagagttggctctacctctgaaaacatcacacagaaagtagtttgggtggaagaatcagacaaacggtcatttctgcttgacctcctaaatgcaacaggcaaggattcactgaccttagtgtttgtggagaccaaaaagggtgcagattctctggaggatttcttataccatgaaggatacgcatgtaccagcatccatggagaccgttctcagagggatagagaagaggcccttcaccagttccgctcaggaaaaagcccaattttagtggctacagcagtagcagcaagaggactggacatttcaaatgtgaaacatgttatcaattttgacttgccaagtgatattgaagaatatgtacatcgtattggtcgtacgggacgtgtaggaaaccttggcctggcaacctcattctttaacgagaggaacataaatattactaaggatttgttggatcttcttgttgaagctaaacaagaagtgccgtcttggttagaaaacatggcttatgaacaccactacaagggtagcagtcgtggacgttctaagagtagcagatttagtggagggtttggtgccagagactaccgacaaagtagcggtgccagcagttccagcttcagcagcagccgcgcaagcagcagccgcagtggcggaggtggccacggtagcagcagaggatttggtggaggtggctatggaggcttttacaacagtgatggatatggaggaaattataactcccagggggttgactggtggggtaactgagcctgctttgcagtaggtcaccctgccaaacaagctaatatggaaaccacatgtaacttagccagactataccttgtgtagcttcaagaactcgcagtacattaccagctgtgattctccactgaaattttttttttaagggagctcaaggtcacaagaagaaatgaaaggaacaatcagcagccctgttcagaaggtggtttgaagacttcattgctgtagtttggattaactcccctcccgcctacccccatcccaaactgcatttataattttgtgactgaggatcatttgtttttaatgcaagtaaatacagcaattcctctttcaacgtttaggcagatcattaattatgagctagccaaatgtgggcatactattacagggaaagtttaaaggtctgataacttgaaataggtttttaggagaattcatctacttagactttttaaatgcctgccataaatgaaattgaaatggtagaatggctgaccacagcaatgaccagccctcattagggccctggatgatttttggtctaataacgcatgctagtgttgatgttttttggtcaagagggtatgaacaggaagaattaaatgcagcaggctttattttaaatgccgattcacattactctgttcaagctgcgttgagatgttaaactggcttactatagacttcgtaaaaatggctccagaagagtaacaaactgaaatctttgagatcacacaggttggaaatatgtacataactgcacaaggtgtcaattctgctctacagtgcagttttagtcagttttagttgcataggtttccattgtatttatagtctgtttatgctaaatctggccaaagatgagcattgtccaccactaaaatgcctctgccactttgaattctgtgctaattttgtggccagaatgcggtgatcaaaacgctccatctttttacagtggcataggaagacggcaaaaatttcctaaagtgcaatagattttcaagtgtattgtgccttgttctaaaacttttattaagtaggtgcacttgacagtattgaggtcatttgttatggtgctatttcaattagtctaggtttaggcccttgtacattttgcccataactttttacaaagtacttcttttattgcacattcagagaattttatatatatgtcttgtgtgcgtgtccttaaacttccaatcttactttgtctcttggagattgttgaacgcagcttgtctaggaaggggatgggactagattctaaaatttatttgggaccatgggaatgatagttgggaagaaaactatttgcacacgacagatttctagatactttttgctgctagttttatgtaatatttattgaacattttgacaaatatttatttttgtaagcctaaaagtgattctttgaaagtttaaagaaacttgaccaaaagacaatatttcggggtagtgtgagcttttaatgtttaagtcatattaaactcttaagtcaaattaagca

SEQ ID NO: 2246 - DNA, 3406 bp, Homo sapiens
ctttccccttactccgctcccctcttttccctccctctcctccccttccctctgttctctcctcctcttcccctcccctcccccgtccggagcactctatattcaagccaccgtttcctgcttcacaaaatggccaccgcacgcgacacctacggtcacgtggcctgccgccctctcagtttcgggaatctgcctagctcccactaaggggaggctacccgcggaagagcgagggcagattagaccggagaaatcccaccacatctccaagcccgggaactgagagaggaagaagagtgaaggccagtgttaggaaaaaaaaaacaaaaacaaaaaaaacgaaaaacgaaagctgagtgcatagagttggaaaggggagcgaatgcgtaaggttggaaaggggggcgaagaggcctaggttaacattttcaggcgtcttagccggtggaaagcgggagacgcaagttctcgcgagatctcgagaactccgaggctgagactagggttttagcggagagcacgggaagtgtagctcgagagaactgggacagcatttcgcaccctaagctccaaggcaggactgctaggggcgacaggactaagtaggaaatcccttgagcttasacctgagggagcgcgcagtagccgggcagaagtcgccgcgacagggaattgcggtgtgagagggagggcacacgttgtacgtgctgacgtagccggctttccagcgggtatattagatccgtggccgcgcggtgcgctccagagccgcagttctcccgtragagggccttcgcggtggaacaaacactcgcttagcagcggaagactccgagttctcggtactcttcagggatgagtcatgtggcagtggaaaatgcgctcgggctggaccagcagtttgctggcctagacctgaactcttcagataatcagagtggaggaagtacagccagcaaagggcgctatattcctcctcatttaaggaaccgagaagctactaaaggtttctacgataaagacagttcagggtggagttctagcaaagataaggatgcgtatagcagttttggatctcgtagtgattcaagagggaagtctagcttcttcagtgatcgtggaagtggatcaaggggaaggtttgatgatcgtggacggagtgattacgatggcattggcagccgtggtgacagaagtggctttggcaaatttgaacgtggtggaaacagtcgctggtgtgacaaatcagatgaagatgattggtcaaaaccactcccaccaagtgaacgcttggaacaggaactcttttctggaggcaacactgggattaattttgagaaatacgatgacattccagttgaggcaacaggcaacaactgtcctccacatattgaaagtttcagtgatgttgagatgggagaaattatcatgggaaacattgagcttactcgttatactcgcccaactccagtgcaaaagcatgctattcctattatcaaagagaaaagagacttgatggcttgtgcccaaacagggtctggaaaaactgcagcatttctgttgcccatcttgagtcagatttattcagatggtccaggcgaggctttgagggccatgaaggaaaatggaaggtatgggcgccgcaaacaatacccaatctccttggtattagcaccaacgagagagttggcagtacagatctacgaggaagccagaaaattttcataccgatctagagttcgtccttgcgtggtttatggtggtgccgatattggtcagcagattcgagacttggaacgtggatgccatttgttagtagccactccaggacgtctagtggatatgatggaaagaggaaagattggattagacttttgcaaatacttggtgttagatgaagctgatcggatgttggatatggggtttgagcctcagattcgtagaatagtcgaacaagatactatgcctccaaagggtgtccgccacactatgatgtttagtgctacttttcctaaggaaatacagatgctggctcgtgatttcttagatgaatatatcttcttggctgtaggaagagttggctctacctctgaaaacatcacacagaaagtagtttgggtggaagaatcagacaaacggtcatttctgcttgacctcctaaatgcaacaggcaaggattcactgaccttagtgtttgtggagaccaaaaagggtgcagattctctggaggatttcttataccatgaaggatacgcatgtaccagcatccatggagaccgttctcagagggatagagaagaggcccttcaccagttccgctcaggaaaaagcccaattttagtggctacagcagtagcagcaagaggactggacatttcaaatgtgaaacatgttatcaattttgacttgccaagtgatattgaagaatatgtacatcgtattggtcgtacgggacgtgtaggaaaccttggcctggcaacctcattctttaacgagaggaacataaatattactaaggatttgttggatcttcttgttgaagctaaacaagaagtgccgtcttggttagaaaacatggcttatgaacaccactacaagggtagcagtcgtggacgttctaagagtagcagatttagtggagggtttggtgccagagactaccgacaaagtagcggtgccagcagttccagcttcagcagcagccgcgcaagcagcagccgcagtggcggaggtggccacggtagcagcagaggatttggtggaggtggctatggaggcttttacaacagtgatggatatggaggaaattataactcccagggggttgactggtggggtaactgagcctgctttgcagtaggtcaccctgccaaacaagctaatatggaaaccacatgtaacttagccagactataccttgtgtagcttcaagaactcgcagtacattaccagctgtgattctccactgaaattttttttttaagggagctcaaggtcacaagaagaaatgaaaggaacaatcagcagccctgttcagaaggatcatgctcctctgtggagcaagtgcctccatgaaatgccatattttgtgaagaaagtgcatgcaggaatattcaggagtccagcatgtagtcatggcagccttaggtatttgagaccgaccaaccctcctgatgaagacaaccataactcatgcaggcatgagtctaacttggagcgtgatgcccagaagtgtgtgaactggtctgtgaccacaaagatgagaaccgcatgctgagattggtggaatggagacttcagtgagcctacatgcagatgacatggtgacacccgtgcccagcctgagctgttttcttctggccctcttattacatgagaaaaataaacacctatgcaccttggcctc

SEQ ID NO: 2247 - DNA, 3397 bp, Homo sapiens
ctttccccttactccgctcccctcttttccctccctctcctccccttccctctgttctctcctcctcttcccctcccctcccccgtccggagcactctatattcaagccaccgtttcctgcttcacaaaatggccaccgcacgcgacacctacggtcacgtggcctgccgccctctcagtttcgggaatctgcctagctcccactaaggggaggctacccgcggaagagcgagggcagattagaccggagaaatcccaccacatctccaagcccgggaactgagagaggaagaagagtgaaggccagtgttaggaaaaaaaaaacaaaaacaaaaaaaacgaaaaacgaaagctgagtgcatagagttggaaaggggagcgaatgcgtaaggttggaaaggggggcgaagaggcctaggttaacattttcaggcgtcttagccggtggaaagcgggagacgcaagttctcgcgagatctcgagaactccgaggctgagactagggttttagcggagagcacgggaagtgtagctcgagagaactgggacagcatttcgcaccctaagctccaaggcaggactgctaggggcgacaggactaagtaggaaatcccttgagcttasacctgagggagcgcgcagtagccgggcagaagtcgccgcgacagggaattgcggtgtgagagggagggcacacgttgtacgtgctgacgtagccggctttccagcgggtatattagatccgtggccgcgcggtgcgctccagagccgcagttctcccgtragagggccttcgcggtggaacaaacactcgcttagcagcggaagactccgagttctcggtactcttcagggatgagtcatgtggcagtggaaaatgcgctcgggctggaccagcagtttgctggcctagacctgaactcttcagataatcagagtggaggaagtacagccagcaaagggcgctatattcctcctcatttaaggaaccgagaagctactaaaggtttctacgataaagacagttcagggtggagttctagcaaagataaggatgcgtatagcagttttggatctcgtagtgattcaagagggaagtctagcttcttcagtgatcgtggaagtggatcaaggggaaggtttgatgatcgtggacggagtgattacgatggcattggcagccgtggtgacagaagtggctttggcaaatttgaacgtggtggaaacagtcgctggtgtgacaaatcagatgaagatgattggtcaaaaccactcccaccaagtgaacgcttggaacaggaactcttttctggaggcaacactgggattaattttgagaaatacgatgacattccagttgaggcaacaggcaacaactgtcctccacatattgaaagtttcagtgatgttgagatgggagaaattatcatgggaaacattgagcttactcgttatactcgcccaactccagtgcaaaagcatgctattcctattatcaaagagaaaagagacttgatggcttgtgcccaaacagggtctggaaaaactgcagcatttctgttgcccatcttgagtcagatttattcagatggtccaggcgaggctttgagggccatgaaggaaaatggaaggtatgggcgccgcaaacaatacccaatctccttggtattagcaccaacgagagagttggcagtacagatctacgaggaagccagaaaattttcataccgatctagagttcgtccttgcgtggtttatggtggtgccgatattggtcagcagattcgagacttggaacgtggatgccatttgttagtagccactccaggacgtctagtggatatgatggaaagaggaaagattggattagacttttgcaaatacttggtgttagatgaagctgatcggatgttggatatggggtttgagcctcagattcgtagaatagtcgaacaagatactatgcctccaaagggtgtccgccacactatgatgtttagtgctacttttcctaaggaaatacagatgctggctcgtgatttcttagatgaatatatcttcttggctgtaggaagagttggctctacctctgaaaacatcacacagaaagtagtttgggtggaagaatcagacaaacggtcatttctgcttgacctcctaaatgcaacaggcaaggattcactgaccttagtgtttgtggagaccaaaaagggtgcagattctctggaggatttcttataccatgaaggatacgcatgtaccagcatccatggagaccgttctcagagggatagagaagaggcccttcaccagttccgctcaggaaaaagcccaattttagtggctacagcagtagcagcaagaggactggacatttcaaatgtgaaacatgttatcaattttgacttgccaagtgatattgaagaatatgtacatcgtattggtcgtacgggacgtgtaggaaaccttggcctggcaacctcattctttaacgagaggaacataaatattactaaggatttgttggatcttcttgttgaagctaaacaagaagtgccgtcttggttagaaaacatggcttatgaacaccactacaagggtagcagtcgtggacgttctaagagtagcagatttagtggagggtttggtgccagagactaccgacaaagtagcggtgccagcagttccagcttcagcagcagccgcgcaagcagcagccgcagtggcggaggtggccacggtagcagcagaggatttggtggaggtggctatggaggcttttacaacagtgatggatatggaggaaattataactcccagggggttgactggtggggtaactgagcctgctttgcagtaggtcaccctgccaaacaagctaatatggaaaccacatgtaacttagccagactataccttgtgtagcttcaagaactcgcagtacattaccagctgtgattctccactgaaattttttttttaagggagctcaaggtcacaagaagaaatgaaaggaacaatcagcagccctgttcagaaggatcatgctcctctgtggagcaagtgcctccatgaaatgccatattttgtgaagaaagtgcatgcaggaatattcaggagtccagcatgtagtcatggcagccttaggtatttgagaccgaccaaccctcctgatgaagacaaccataactcatgcagaacttggagcgtgatgcccagaagtgtgtgaactggtctgtgaccacaaagatgagaaccgcatgctgagattggtggaatggagacttcagtgagcctacatgcagatgacatggtgacacccgtgcccagcctgagctgttttcttctggccctcttattacatgagaaaaataaacacctatgcaccttggcctca

SEQ ID NO: 2248 - DNA, 1812 bp, Homo sapiens
ccctcatcaggattacagctttatcaggactgcatcttcttcagaaatgaatatttmtcttacaacgcaaagaaagaaaaatcaaaataaattttctgattgaaaatgtaaaaaggcaaatatttttacagttttaactttaattttttattgaggaccaactrtttgaaaaattctcattagtcattcctttaaattatgtgtatgtgagagaaagaygtmagatggttaattatttcaaatgatgcagtataaagaaggggsattatcacggcagaaacgaaaaaagatatttgtagctggaggtttttatagtctaacatatggttgctatttgttctacaaatccttttgaataatttaatatagagatttmgaatagaaaataatactttagatagaaattaatgagtttattataaccatatattataataatttacttaggaattctctttgataagaaacaaatgaactgaatgcarttttctccacagaccatataagactgcctrtgtacctcctcctacatgccattggttaaccatcagtcagtttgcaggggtggggggaggggtttcctgcccattgtttytgtaatctctgaggagaagcagcagcaaacatttgctagtcagacaagtgacagggaatggattccaaacascagtgtgtaaagctaaatgatggccacttcatgcctgtattgggatttggcacctatgcacctccagaggttccragaagtaaagctttgkaggtcacaaarttagcaatagaagctgggttccgccatatagattctgctcatttatacaataatgaggagcaggttggrctggccatccraagcaagattgcagatggcagtgtgaagagagaagacatattctacacttcaaagctttggtccacttttcatcgaccagagttggtccgaccagccttggaaaactcactgaaraaarctcaattggactatgttgacctctatcttattcattctccaatgtctctaaagccaggtgaggaactttcaccaacagatgaaaatggaaaagtaatatttgacatagtggatctctgtaccacctgggaggccatggagaartgtaaggatgcaggattggccaagtccattggggtrtcaaacttcaaccgcaggcagctggagatsatcctcaacaagycaggactcawgtacaagcctgtctgcaaccaggtagaatgtcatccgtatttcaaccggagtaaattgctagatttctgcaagtcgaaagatattgttctggttgcctatagtgctctgggatctcaacgagacaaacgatgggtggacccgaactccccggtgctcttggaggacccagtcctttgtgccttggcaaaaaagcacaagcgaaccccagccctgattgccctgygctaccagctgcagcgtggggttgtggtcctggccaagagctacaatgagcagcgcatcagacagaacgtgcaggtttttgagttccagttgactgcagaggacatkaaagccatagatggcctagacagaaatctccactattttaacagtgatagttttgctagccaccctaattatccatattcagatgaatattaacatggagrgctttgcctgatgtctaccagaagccctgtgtgtggatggtgackcagaggacgtctctatgccggtgactggacatatcacctctacttaaatccgtcctgtttagcgacttcagtcaactacagctgagtccataggccagaaagacaataaatttttatcattttgaaataattgaa

SEQ ID NO: 2249 - DNA, 1351 bp, Homo sapiens
cgcctagtcccgggctggcgggagtgcagttctgagtcccgcccggcgtgcgcggagcggggcagccagcagcggaggcgcggcgcgcagcacacccggggttgttcccccaccccctgggaagtgctggaaggagcccggccctcgagccctcggcatagtggctgtgggagccctgatggccctgagccaggggtgacccctccccagatccccagagctgattccccacacctccttatttggccagcacaccccagcaacaggctgctctacccccggcaggtgggctgcggctggtgggggccgggctcacacggcctcatggggaccccgcggtcacagggccactgggagctgcaagatcctcgtccgagaaacggggatgcaggccccgggccgtgcagacagggccgtcagaggtgatggtgtgcatctttagcaggtggcacaactggcrctgggaaccgggggtcccttccctcaggagtccttatggaggcagaccctcacccagtgagggcacggagcccccgggggccctggagggaggagcgaccgcaggctctctgggccccgtgactgctgtgactcaggttcctttgcaggtgtgcacagcagggacgccctgactctcgccctctccctggcaggaggtggtccaggccacgctggtggtcctggccttggccatggtgcccatcctgctgcttggcacacccctgcacctgctgcaccgccaccgccgccgcctgcggaggaggcccgctgacygacaggaggaaaacaaggccgggttgctggacctgcctgacgcatctgtgaatggctggagctccgatgaggaaaaggcagggggcctggatgatgaagaggaggccgagctcgtcccctccgaggtgctcatgcaccaggccatccacaccatcgagttctgcctgggctgcgtctccaacaccgcctcctacctgcgcctgtgggccctgagcctggcccacgcccrgtggaattccagaacaagttctactcaggcacgggctacaagctgagtcccttcaccttcgctgccacagatgactagggcccactgcaggtcctgccagacctccttcctgacctctgaggcaggagaggaataaagacggtccgccctggcagtgatgtctcgtctctcttccctcctttttagctgaggcaggtggcagggtagaaggcatggtgtaggatctgggacctcaaaagtcaaggcctggacctgagcagatctgcaataatgtcagactcttggggtgaaaaggggcagaaaagggccaaggagagatgtttccagcacattctaacttggagtgag

SEQ ID NO: 2250 - DNA, 3038 bp, Homo sapiens
cgcctagtcccgggctggcgggagtgcagttctgagtcccgcccggcgtgcgcggagcggggcagccagcagcggaggcgcggcgcgcagcacacccggggttgttcccccaccccctgggaagtgctggaaggagcccggccctcgagccctcggcatagtggctgtgggagccctgatggccctgagccaggggtgacccctccccagatccccagagctgattccccacacctccttatttggccagcacagccccaaagggagccaggaccatgggctccatgttccggagcgaggaggtggccctggtccagctctttctgcccacagcggctgcctacacctgcgtgagtcggctgggcgagctgggcctcgtggagttcagagacctcaacgcctcggtgagcgccttccagagacgctttgtggttgatgttyggcgctgtgaggagctggagaagaccttcaccttcctgcaggaggaggtgcggcgggctgggctggtcctgcccccgccaaaggggaggctgccggcacccccaccccgggacctgctgcgcatccaggaggagacggagcgcctggcccaggagctgcgggatgtgcggggcaaccagcaggccctgcgggcccagctgcaccagctgcagctccaygccgccgtgctacgccagggccatgaayctcagctggcagccgcccacacagatggggcctcagagaggacgcccctgctccaggcccccggggggcygcaccaggacctgagggtcaactttgtggcaggtgccgtggagccccacaaggcccctgccctagagcgcctgctctggagggcctgccgcggcttcctcattgccagcttcagggagctggagcagccgctggagcaccccgtgacgggcgagccagccacgtggatgaccttcctcatctcctactggggtgagcagatcggacagaagatccgcaagatcacggactgcttccactgccacgtcttcccgtttctgcagcaggaggaggcccgcctcggggccctgcagcagctgcaacagcagagccaggagctgcaggaggtcctcggggagacagagcggttcctgagccaggtgctaggccgggtgctgcagctgctgccgccagggcaggtgcaggtccacaagatgaaggccgtgtacctggccctgaaccagtgcagcgtgagcaccacgcacaagtgcctcattgccgaggcctggtgctctgtgcgagacctgcccgccctgcaggaggccctgcgggacagctcgatgkaggagggagtgagtgccgtggctcaccgcatcccctgccgggacatgccccccacactcatccgcaccaaccgcttcacggccagcttcyagggcatcgtggatgcctacggcgtgggccgctaccaggaggtcaaccccgctccctacaccatcatcaccttccccttcctgtttgctgtgatgttcrgggatgtgggccacgggctgctcatgttcctsttcgccctggccatggtccttgcggagaaccgaccggctgtgaaggccgcgyagaacgagatctggcagactttcttcaggggccgctacctgctcctgcttatgggcctgttctccatctacaccggcttcatctacaacgagtgmttcagtcgcgccaccagcatcttcccctcgggctggagtgtggccgccatggccaaccagtctggctggagtgatgcattcctggcccarcacacgatgcttaccctggatcccaacgtcacyggtgtcttcctgggaccctamccctttggcatcgatcctatttggagcctggctgccaaccacttgagcttcctcaactccttcaagatgaagatgtccgtcatcctgggcgtcgtgcacatggcctttggggtggtcctcggagtcttcaaccacstgcactttggccagaggcaccggctgctgctggagaygctgccggagctcaccttcctgctgggactcttcggttacctcgtgttcctagtcatctacaagtggctgtgtgtctrggctgccagggccgcctcggcccccagcatcctcatccacttcatcaacatgttcctcttctcccacagccccagcaacaggctgctctacccccggcaggaggtggtccaggccacgctggtggtcctggccttggccatggtgcccatcctgctgcttggcacacccctgcacctgctgcaccgccaccgccgccgcctgcggaggaggcccgctgacygacaggaggaaaacaaggccgggttgctggacctgcctgacgcatctgtgaatggctggagctccgatgaggaaaaggcagggggcctggatgatgaagaggaggccgagctcgtcccctccgaggtgctcatgcaccaggccatccacaccatcgagttctgcctgggctgcgtctccaacaccgcctcctacctgcgcctgtgggccctgagcctggcccacgcccagctgtccgaggttctgtgggccatggtgatgcgcataggcctgggcctgggccgggaggtgggcgtggcggctgtggtgctggtccscatctttgccgcctttgccgtgatgaccgtggctatcctgctggtgatggagggactctcagccttcctgcacgccctgcggctgcactgrgtggaattccagaacaagttctactcaggcacgggctacaagctgagtcccttcaccttcgctgccacagatgactagggcccactgcaggtcctgccagacctccttcctgacctctgaggcaggagaggaataaagacggtccgccctggcagtgatgtctcgtctctcttccctcctttttagctgaggcaggtggcagggtagaaggcatggtgtaggatctgggacctcaaaagtcaaggcctggacctgagcagatctgcaataatgtcagactcttggggtgaaaaggggcagaaaagggccaaggagagatgtttccagcacattctaacttggagtgag

SEQ ID NO: 2251 - DNA, 2685 bp, Homo sapiens
ctggcagccgcccacacagatggggcctcagagaggacgcccctgctccaggcccccggggggcygcaccaggacctgagggtcaagtgagtgagggatgacctcatgccctttctggccagcccagaacccctggccagtcgctgggctgggccaggctgagctccgactccttgtccagtgctctccccaggctggccccgcctcctccttcaggcccggaacttcccacagtcccaagccctagccctagggggttctcctcttctggtcctgcccgggaggcctcctgccttcccctgtgggcagggccagtgtgcccaattgcccgattgcccgtgctgggcagggtcctgcccggggggcctggtgggggaggcagggcaggaggttggagcagccctgcccagccccgtggccgccagctttgtggcaggtgccgtggagccccacaaggcccctgccctagagcgcctgctctggagggcctgccgcggcttcctcattgccagcttcagggagctggagcagccgctggagcaccccgtgacgggcgagccagccacgtggatgaccttcctcatctcctactggggtgagcagatcggacagaagatccgcaagatcacggactgcttccactgccacgtcttcccgtttctgcagcaggaggaggcccgcctcggggccctgcagcagctgcaacagcagagccaggagctgcaggaggtcctcggggagacagagcggttcctgagccaggtgctaggccgggtgctgcagctgctgccgccagggcaggtgcaggtccacaagatgaaggccgtgtacctggccctgaaccagtgcagcgtgagcaccacgcacaagtgcctcattgccgaggcctggtgctctgtgcgagacctgcccgccctgcaggaggccctgcgggacagctcgatgkaggagggagtgagtgccgtggctcaccgcatcccctgccgggacatgccccccacactcatccgcaccaaccgcttcacggccagcttcyagggcatcgtggatgcctacggcgtgggccgctaccaggaggtcaaccccgctccctacaccatcatcaccttccccttcctgtttgctgtgatgttcrgggatgtgggccacgggctgctcatgttcctsttcgccctggccatggtccttgcggagaaccgaccggctgtgaaggccgcgyagaacgagatctggcagactttcttcaggggccgctacctgctcctgcttatgggcctgttctccatctacaccggcttcatctacaacgagtgmttcagtcgcgccaccagcatcttcccctcgggctggagtgtggccgccatggccaaccagtctggctggagtgatgcattcctggcccarcacacgatgcttaccctggatcccaacgtcacyggtgtcttcctgggaccctamccctttggcatcgatcctatttggagcctggctgccaaccacttgagcttcctcaactccttcaagatgaagatgtccgtcatcctgggcgtcgtgcacatggcctttggggtggtcctcggagtcttcaaccacstgcactttggccagaggcaccggctgctgctggagaygctgccggagctcaccttcctgctgggactcttcggttacctcgtgttcctagtcatctacaagtggctgtgtgtctrggctgccagggccgcctcggcccccagcatcctcatccacttcatcaacatgttcctcttctcccacagccccagcaacaggctgctctacccccggcaggaggtggtccaggccacgctggtggtcctggccttggccatggtgcccatcctgctgcttggcacacccctgcacctgctgcaccgccaccgccgccgcctgcggaggaggcccgctgacygacaggaggaaaacaaggccgggttgctggacctgcctgacgcatctgtgaatggctggagctccgatgaggaaaaggcagggggcctggatgatgaagaggaggccgagctcgtcccctccgaggtgctcatgcaccaggccatccacaccatcgagttctgcctgggctgcgtctccaacaccgcctcctacctgcgcctgtgggccctgagcctggcccacgcccagctgtccgaggttctgtgggccatggtgatgcgcataggcctgggcctgggccgggaggtgggcgtggcggctgtggtgctggtccscatctttgccgcctttgccgtgatgaccgtggctatcctgctggtgatggagggactctcagccttcctgcacgccctgcggctgcactgrgtggaattccagaacaagttctactcaggcacgggctacaagctgagtcccttcaccttcgctgccacagatgactagggcccactgcaggtcctgccagacctccttcctgacctctgaggcaggagaggaataaagacggtccgccctggcagtgatgtctcgtctctcttccctcctttttagctgaggcaggtggcagggtagaaggcatggtgtaggatctgggacctcaaaagtcaaggcctggacctgagcagatctgcaataatgtcagactcttggggtgaaaaggggcagaaaagggccaaggagagatgtttccagcacattctaacttggagtgag

SEQ ID NO: 2252 - DNA, 3377 bp, Homo sapiens
cgcctagtcccgggctggcgggagtgcagttctgagtcccgcccggcgtgcgcggagcggggcagccagcagcggaggcgcggcgcgcagcacacccggggttgttcccccaccccctgggaagtgctggaaggagcccggccctcgagccctcggcatagtggctgtgggagccctgatggccctgagccaggggtgacccctccccagatccccagagctgattccccacacctccttatttggccagcacagccccaaagggagccaggaccatgggctccatgttccggagcgaggaggtggccctggtccagctctttctgcccacagcggctgcctacacctgcgtgagtcggctgggcgagctgggcctcgtggagttcagagacctcaacgcctcggtgagcgccttccagagacgctttgtggttgatgttyggcgctgtgaggagctggagaagaccttcaccttcctgcaggaggaggtgcggcgggctgggctggtcctgcccccgccaaaggggaggctgccggcacccccaccccgggacctgctgcgcatccaggaggagacggagcgcctggcccaggagctgcgggatgtgcggggcaaccagcaggccctgcgggcccagctgcaccagctgcagctccaygccgccgtgctacgccagggccatgaayctcagctggcagccgcccacacagatggggcctcagagaggacgcccctgctccaggcccccggggggcygcaccaggacctgagggtcaagtgagtgagggatgacctcatgccctttctggccagcccagaacccctggccagtcgctgggctgggccaggctgagctccgactccttgtccagtgctctccccaggctggccccgcctcctccttcaggcccggaacttcccacagtcccaagccctagccctagggggttctcctcttctggtcctgcccgggaggcctcctgccttcccctgtgggcagggccagtgtgcccaattgcccgattgcccgtgctgggcagggtcctgcccggggggcctggtgggggaggcagggcaggaggttggagcagccctgcccagccccgtggccgccagctttgtggcaggtgccgtggagccccacaaggcccctgccctagagcgcctgctctggagggcctgccgcggcttcctcattgccagcttcagggagctggagcagccgctggagcaccccgtgacgggcgagccagccacgtggatgaccttcctcatctcctactggggtgagcagatcggacagaagatccgcaagatcacggactgcttccactgccacgtcttcccgtttctgcagcaggaggaggcccgcctcggggccctgcagcagctgcaacagcagagccaggagctgcaggaggtcctcggggagacagagcggttcctgagccaggtgctaggccgggtgctgcagctgctgccgccagggcaggtgcaggtccacaagatgaaggccgtgtacctggccctgaaccagtgcagcgtgagcaccacgcacaagtgcctcattgccgaggcctggtgctctgtgcgagacctgcccgccctgcaggaggccctgcgggacagctcgatgkaggagggagtgagtgccgtggctcaccgcatcccctgccgggacatgccccccacactcatccgcaccaaccgcttcacggccagcttcyagggcatcgtggatgcctacggcgtgggccgctaccaggaggtcaaccccgctccctacaccatcatcaccttccccttcctgtttgctgtgatgttcrgggatgtgggccacgggctgctcatgttcctsttcgccctggccatggtccttgcggagaaccgaccggctgtgaaggccgcgyagaacgagatctggcagactttcttcaggggccgctacctgctcctgcttatgggcctgttctccatctacaccggcttcatctacaacgagtgmttcagtcgcgccaccagcatcttcccctcgggctggagtgtggccgccatggccaaccagtctggctggagtgatgcattcctggcccarcacacgatgcttaccctggatcccaacgtcacyggtgtcttcctgggaccctamccctttggcatcgatcctatttggagcctggctgccaaccacttgagcttcctcaactccttcaagatgaagatgtccgtcatcctgggcgtcgtgcacatggcctttggggtggtcctcggagtcttcaaccacstgcactttggccagaggcaccggctgctgctggagaygctgccggagctcaccttcctgctgggactcttcggttacctcgtgttcctagtcatctacaagtggctgtgtgtctrggctgccagggccgcctcggcccccagcatcctcatccacttcatcaacatgttcctcttctcccacagccccagcaacaggctgctctacccccggcaggaggtggtccaggccacgctggtggtcctggccttggccatggtgcccatcctgctgcttggcacacccctgcacctgctgcaccgccaccgccgccgcctgcggaggaggcccgctgacygacaggaggaaaacaaggccgggttgctggacctgcctgacgcatctgtgaatggctggagctccgatgaggaaaaggcagggggcctggatgatgaagaggaggccgagctcgtcccctccgaggtgctcatgcaccaggccatccacaccatcgagttctgcctgggctgcgtctccaacaccgcctcctacctgcgcctgtgggccctgagcctggcccacgcccagctgtccgaggttctgtgggccatggtgatgcgcataggcctgggcctgggccgggaggtgggcgtggcggctgtggtgctggtccscatctttgccgcctttgccgtgatgaccgtggctatcctgctggtgatggagggactctcagccttcctgcacgccctgcggctgcactgrgtggaattccagaacaagttctactcaggcacgggctacaagctgagtcccttcaccttcgctgccacagatgactagggcccactgcaggtcctgccagacctccttcctgacctctgaggcaggagaggaataaagacggtccgccctggcagtgatgtctcgtctctcttccctcctttttagctgaggcaggtggcagggtagaaggcatggtgtaggatctgggacctcaaaagtcaaggcctggacctgagcagatctgcaataatgtcagactcttggggtgaaaaggggcagaaaagggccaaggagagatgtttccagcacattctaacttggagtgag

SEQ ID NO: 2253 - DNA, 2895 bp, Homo sapiens
tcccgcctgcccggaaaggagtgagcggcgcctagtcccgggctggcgggagtgcagttctgagtcccgcccggcgtgcgcggagcggggcagccagcagcggaggcgcggcgcgcagcacacccggggaccatgggctccatgttccggagcgaggaggtggccctggtccagctctttctgcccacagcggctgcctacacctgcgtgagtcggctgggcgagctgggcctcgtggagttcagagacctcaacgcctcggtgagcgccttccagagacgctttgtggttgatgttyggcgctgtgaggagctggagaagaccttcaccttcctgcaggaggaggtgcggcgggctgggctggtcctgcccccgccaaaggggaggctgccggcacccccaccccgggacctgctgcgcatccaggaggagacggagcgcctggcccaggagctgcgggatgtgcggggcaaccagcaggccctgcgggcccagctgcaccagctgcagctccaygccgccgtgctacgccagggccatgaayctcagctggcagccgcccacacagatggggcctcagagaggacgcccctgctccaggcccccggggggcygcaccaggacctgagggtcaactttgtggcaggtgccgtggagccccacaaggcccctgccctagagcgcctgctctggagggcctgccgcggcttcctcattgccagcttcagggagctggagcagccgctggagcaccccgtgacgggcgagccagccacgtggatgaccttcctcatctcctactggggtgagcagatcggacagaagatccgcaagatcacggactgcttccactgccacgtcttcccgtttctgcagcaggaggaggcccgcctcggggccctgcagcagctgcaacagcagagccaggagctgcaggaggtcctcggggagacagagcggttcctgagccaggtgctaggccgggtgctgcagctgctgccgccagggcaggtgcaggtccacaagatgaaggccgtgtacctggccctgaaccagtgcagcgtgagcaccacgcacaagtgcctcattgccgaggcctggtgctctgtgcgagacctgcccgccctgcaggaggccctgcgggacagctcgatgkaggagggagtgagtgccgtggctcaccgcatcccctgccgggacatgccccccacactcatccgcaccaaccgcttcacggccagcttcyagggcatcgtggatgcctacggcgtgggccgctaccaggaggtcaaccccgctccctacaccatcatcaccttccccttcctgtttgctgtgatgttcrgggatgtgggccacgggctgctcatgttcctsttcgccctggccatggtccttgcggagaaccgaccggctgtgaaggccgcgyagaacgagatctggcagactttcttcaggggccgctacctgctcctgcttatgggcctgttctccatctacaccggcttcatctacaacgagtgmttcagtcgcgccaccagcatcttcccctcgggctggagtgtggccgccatggccaaccagtctggctggagtgatgcattcctggcccarcacacgatgcttaccctggatcccaacgtcacyggtgtcttcctgggaccctamccctttggcatcgatcctatttggagcctggctgccaaccacttgagcttcctcaactccttcaagatgaagatgtccgtcatcctgggcgtcgtgcacatggcctttggggtggtcctcggagtcttcaaccacstgcactttggccagaggcaccggctgctgctggagaygctgccggagctcaccttcctgctgggactcttcggttacctcgtgttcctagtcatctacaagtggctgtgtgtctrggctgccagggccgcctcggcccccagcatcctcatccacttcatcaacatgttcctcttctcccacagccccagcaacaggctgctctacccccggcaggaggtggtccaggccacgctggtggtcctggccttggccatggtgcccatcctgctgcttggcacacccctgcacctgctgcaccgccaccgccgccgcctgcggaggaggcccgctgacygacaggaggaaaacaaggccgggttgctggacctgcctgacgcatctgtgaatggctggagctccgatgaggaaaaggcagggggcctggatgatgaagaggaggccgagctcgtcccctccgaggtgctcatgcaccaggccatccacaccatcgagttctgcctgggctgcgtctccaacaccgcctcctacctgcgcctgtgggccctgagcctggcccacgcccagctgtccgaggttctgtgggccatggtgatgcgcataggcctgggcctgggccgggaggtgggcgtggcggctgtggtgctggtccscatctttgccgcctttgccgtgatgaccgtggctatcctgctggtgatggagggactctcagccttcctgcacgccctgcggctgcactgrgtggaattccagaacaagttctactcaggcacgggctacaagctgagtcccttcaccttcgctgccacagatgactagggcccactgcaggtcctgccagacctccttcctgacctctgaggcaggagaggaataaagacggtccgccctggcagtgatgtctcgtctctcttccctcctttttagctgaggcaggtggcagggtagaaggcatggtgtaggatctgggacctcaaaagtcaaggcctggacctgagcagatctgcaataatgtcagactcttggggtgaaaaggggcagaaaagggccaaggagagatgtttccagcacattctaacttggagtgag

SEQ ID NO: 2254 - DNA, 2422 bp, Homo sapiens
atcaacctctgttattttttgactttttaatgatagccattcttgctggtgtgagatggtatctcattgtggttttgatttgcatgtgtctgatgattagtgatgatgagcattttttcacatgtttgttggccacttgtatgtcttctagtgagagtgtctgttcatgtcctttgcgcataaaagtggattaattgaatcaaargccatgaacattttaaaagaacgaagtatatatttagaaatctcctttttgaaaggttgtagtaatctaccctccctccagcccaatagtgagagggcccatcttagacttaggtcaccaaaatgtggtgaataatctctgattttagtttcagtttttgggttttttttttttgtttttttggtttttgtttgtttttttgagactccatctcaaagaaaaaaggaaaaaagatcagagagttgccctggggactctgtatccaggctcagaagcctgggtggctttctggaacagggctgtcctgtgaggtgagcatatggcctgagtgacaggctgggatggtggccagractgcagtattgacaaacagcaggagtaaagccgagagacctgagccctgcttcctcccatgtctcactcctgcctcccacttccattcccctgctgctctggtctctcgacagcttgcccgctacaccaaggaaggcttcctgcacttgggtgccctggggaccaccacactcctccctgacacccgctgcctggtggacaactccaagagtcggctgccccagctcctggactgcgacaaggtcaagagcagcctgtacaagcgctggaacttcatccagaatggagccatcatgaacaagggcacgggacgctgcctggaggtggagaaccggggcctggctggcatcgacctcatcctccgcagctgcacaggtcagaggtggaccattaagaactccatcaagtagagggagggagctggggcactggagcctggcccccaggacatggctsctccccccaacatctggaccagctgccctggcggagagacagcaaggggccggcaggtgctcgatggsccccccagggcttctccagggcagcacagggaccccggatgaagactctgtcccccctcaggcattcagctgcccacaagtttcctgcaccctggaaaagccccccacccttcctctgggaaactgacagctgtcttccacagcctctgatgtggacctggtactgaggagcaagactgtccagttctcctccacatctcccatcccagaatcaggatctgggactggcagggtcccctcctgtgtctcatctcttgcagcagcagctgctgaactccagccatcaacacggtgggaggcagcgggggcttcagccatgtcctagctccccgccctaaaaggaggcagtgaggaccaggcactatttcctccgaggttacttctacccagatgacacctgcctgttcacgccccaaggcagctactgcccctaacccttcccaccagggtagctttgggcactgcagctctggacttttctggcccctcctgagatgacctgatggagctgatgctttctctcctaatccctgggcactaggctcttatcartgtgcttgggccagctctcctgcctgtgtctagaggaagccagagacagaaataggctaagcctgcagtaggatctcagccacaagggccccgcaggatggagctgggtcaaggaccagggagccctgactcccagaggctgccaccggggagaagcagcggtcctccatccagaacctaagggctgaagcaaaggctgccaggacccttgaagatgcttttggctcacctcatttcaccccacgctctgctggctggcagaggagaaggcagtcgtttcctctctgaagagtatttttttcgattgccctctggttagggtgcacatataaatcagagttaatatatgaacgcgtgtgcatgcacaaktgtgtgtgtgcctgcgtgctgtgcgtggcagggtgtgtgtgtgtgtgtctggctgtgcgttccggagtgtgtgacgatgctgacctagctgtgtggccttgggcttgctgcttcattactcacctggatggggacgagggatgagaagggtgtgggtttggccccatgtcactggccggaaggatgtgtctcagccctgccctgtggggtgcccccgatgggaggctgtcccatctcccagtccccatctctttttccccacactgtccctggccaagccctgcccagagctgaaccctgtagctgcccccttgccctgtgtgggattcgcagtgtctcatttggtgacgtcttactggtgatcatctcctcaccccatctcccaccttgtggaataaatacatgttagcacttccca

SEQ ID NO: 2255 - DNA, 3876 bp, Homo sapiens
cgggctccccgagcgggcttcccctctgcccggcgcgatggagcgggtcggtgagcggaacaaaggcgcctgcccgggggagcgggtcttccgctgaagagcgcgggtggcgcgccgcgacggccgcctgcgggccaaggtgggaggctgtgcggccccaggcgcggcgcgctccgccgtgggcgggcggcgatccctgagcccggcacctgtgcgccgctccctctgtgcctcccgggcagccccgcctgccggcctcggagtccgcggcgccggcggctagaggtccagaggcgaaccacttgctggtgcagaagagaaaccctcaaatccctggcctttcgcggagacgcctggaaggggccgtgcgccgtggactgagcaggcgtctcggggagcacttctgcagagcgaggacttccatgtgagcgattccgttctccccaccaccaatccgacctcccagccgtctccgccgcccgagcatccttgaggtgggacgagcaggggcytggatccctgccggccgtctggtgtgtgaggcttgcacggcccctggctgccccgcgcctcgccggagcccgagggggcgcaggtccggggcgagggccggccgggctgtttgatggcttcactgagaagagtcaaagtgctgttggtgttgaacttgatcgcggtagccggcttcgtgctcttcctggccaagtgccggcccatcgcrgtgcgcagcggagacgccttccacgagatccggccgcgcgccgaggtggccaacctcagcgcgcacagcgccagccccatccaggatgcggtcctgaagcgcctgtcgctgctggaggacatcgtgtaccggcagctgaatggcttatccaaatcccttgggctcattgaaggttatggtgggcggggtaaagggggccttccggctactctttccccggctgaagaagaaaaggctaagggaccccatgagaagtatggctacaattcatacctcagtgaaaaaatttcactggaccgttccattccggattatcgtcccaccaagtgtaaggagctcaagtactccaaggacctgccccagatatccatcatattcatcttcgtgaacgaggccctgtcggtgatcctgcggtccgtgcacagtgccgtcaatcacacgcccacacacctgctgaaggaaatcattctggtggatgacaacagcgacgaagaggagctgaaggtccccctagaggagtatgtccacaaacgctaccccgggctggtgaaggtggtaagaaatcagaagagggaaggcctgatccgcgctcgcattgagggctggaaggtggctaccgggcaggtcactggcttctttgatgcccacgtggaattcaccgctggctgggctgagccggttctatcccgcatccaggaaaaccggaagcgtgtgatcctcccctccattgacaacatcaaacaggacaactttgaggtgcagcggtaygagaactcggcccacgggtacagctgggagctgtggtgcatgtacatcagccccccaaaagactggtgggacgccggagacccttctctccccatcaggaccccagccatgataggctgctcgttcgtggtcaacaggaagttcttcggtgaaattggtcttctggatcctggcatggatgtatacggaggagaaaatattgaactgggaatcaaggtatggctctgtgggggcagcatggaggtccttccttgctcacgggtggcccacattgagcggaagaagaagccatataatagcaacattggcttctacaccaagaggaatgctcttcgcgttgctgaggtctggatggacgattacaagtctcatgtgtacatagcgtggaacctgccgctggagaatccgggaattgacatcggtgatgtmtccgaaagaagagcattaaggaaaagtttaaagtgtaagaatttccagtggtacctggaycatgtttacccagaaatgagaagatacaataataccgttgcttacggggagcttcgcaacaacaaggcaaaagaygtctgcttggaccaggggccgctggagaaccacacagcaatattgtatccgtgccatggctggggaccacagcttgcccgctacaccaaggaaggcttcctgcacttgggtgccctggggaccaccacactcctccctgacacccgctgcctggtggacaactccaagagtcggctgccccagctcctggactgcgacaaggtcaagagcagcctgtacaagcgctggaacttcatccagaatggagccatcatgaacaagggcacgggacgctgcctggaggtggagaaccggggcctggctggcatcgacctcatcctccgcagctgcacaggtcagaggtggaccattaagaactccatcaagtagagggagggagctggggcactggagcctggcccccaggacatggctsctccccccaacatctggaccagctgccctggcggagagacagcaaggggccggcaggtgctcgatggsccccccagggcttctccagggcagcacagggaccccggatgaagactctgtcccccctcaggcattcagctgcccacaagtttcctgcaccctggaaaagccccccacccttcctctgggaaactgacagctgtcttccacagcctctgatgtggacctggtactgaggagcaagactgtccagttctcctccacatctcccatcccagaatcaggatctgggactggcagggtcccctcctgtgtctcatctcttgcagcagcagctgctgaactccagccatcaacacggtgggaggcagcgggggcttcagccatgtcctagctccccgccctaaaaggaggcagtgaggaccaggcactatttcctccgaggttacttctacccagatgacacctgcctgttcacgccccaaggcagctactgcccctaacccttcccaccagggtagctttgggcactgcagctctggacttttctggcccctcctgagatgacctgatggagctgatgctttctctcctaatccctgggcactaggctcttatcartgtgcttgggccagctctcctgcctgtgtctagaggaagccagagacagaaataggctaagcctgcagtaggatctcagccacaagggccccgcaggatggagctgggtcaaggaccagggagccctgactcccagaggctgccaccggggagaagcagcggtcctccatccagaacctaagggctgaagcaaaggctgccaggacccttgaagatgcttttggctcacctcatttcaccccacgctctgctggctggcagaggagaaggcagtcgtttcctctctgaagagtatttttttcgattgccctctggttagggtgcacatataaatcagagttaatatatgaacgcgtgtgcatgcacaaktgtgtgtgtgcctgcgtgctgtgcgtggcagggtgtgtgtgtgtgtgtctggctgtgcgttccggagtgtgtgacgatgctgacctagctgtgtggccttgggcttgctgcttcattactcacctggatggggacgagggatgagaagggtgtgggtttggccccatgtcactggccggaaggatgtgtctcagccctgccctgtggggtgcccccgatgggaggctgtcccatctcccagtccccatctctttttccccacactgtccctggccaagccctgcccagagctgaaccctgtagctgcccccttgccctgtgtgggattcgcagtgtctcatttggtgacgtcttactggtgatcatctcctcaccccatctcccaccttgtggaataaatacatgttagcacttcccag

SEQ ID NO: 2256 - DNA, 843 bp, Homo sapiens
gaagaaaagatcccatcatttgatcagacagcctttgctatgctgacccaaaacctgctgcttggaaaatcacaggtctcagaatccgagcctccaggccagattttccctctagccattcctggccacgcagcgcggagccgcgagcacacagaaaaggatgtcttcatcgccaaccgggatggaacgaacccgcccgctcagggagtactgagaactaaaggcggcggtgtcaccgcgtccgccaattgggagactcggcgttttggctcccgggggcgcgggacgagccgcgcggccggatctggcgagcggagggtgattcggcacgcgtacctccccgccgcgctgcccgcgacgttttgggaggggcccgagggggcgcaggtccggggcgagggccggccgggctgtttgatggcttcactgagaagagtcaaagtgctgttggtgttgaacttgatcgcggtagccggcttcgtgctcttcctggccaagtgccggcccatcgcrgtgcgcagcggagacgccttccacgagatccggccgcgcgccgaggtggccaacctcagcgcgcacagcgccagccccatccaggatgcggtcctgaagcgcctgtcgctgctggaggacatcgtgtaccggcagctgaatgctccctgtgctcctgtccttccatatctggcctggggagtccgtcagaaatccccttgtcagctcctcgagtatccttacctcctcgtcatctgtggcatccaccagcaacccccgagggtggatgagcttattcctggggaacgtcccaccttggcaggcgttggtgccataggatgcaagctcagg

SEQ ID NO: 2257 - DNA, 2977 bp, Homo sapiens
atgggcgggatggagggcttcagcttccggctgcaaatggcgaggcggcgcgcggcgttgcccactggcctcggcatgggcctgcccacgcacccgcccagcgcgcgccggaccctgtctaccgccgttgaagggcttcccagccctagcagtgcgtactgggaagcccccaaaaggctctgcgaggccgaggagacccgttcggagtgggggaggggaagataaaccgaactatttatgttaatcagtgcatgcttcctttatggagattggmcagggttttactctagtaaccaatcacttcagaacaagggcgggcccgttgatatctctcacactcattggttgagaggttgcggcgcaatggaaggtcttaaaccgagagtatccgggattatttttccccgccgtgcggtgcgtgtcccggaagtgacgcatggccaaggccgggcggcckccttgcccccgcttcctttcacgctgtygctgcccgtaggtggttgtggccactgtgcccggagggaggcggcggtggccagtaatgcctgggaaactcctctggggggacattatggagctggaagcacccttggaggagtccgagagccagaagaaggagaggcaaaagagtgacagaaggaagtcaaggcaccattatgactcggatgagaaatcagaaacaagagaaaatggtgttacagatkacctggatgctcccaaggccaaaaaatctaaaatgaaagagaagctaaatggagacactgaagaaggatttaatagactttcagatgaattctccaaatctcataagtcaagaagaaaagatctaccaaatggagatatagatgaatatgaaaaaaaatcaaagcgagtatcatctttagatacttctactcataaatcaagtgataataaactagaggagaccttaacacgtgaacagaaagaaggagccttctccaattttcctatttctgaagagactataaagcttctgaaaggtcgaggggtaacatatctctttcctattcaagttaagacctttggtcctgtatatgaaggaaaagatttaatagctcaagcacggacaggaacaggaaagacattctcttttgccatccccttaattgaaagactccaaagaaatcaagaaacaattaaaaaaagccgctcaccaaaggtacttgttttggctccaacaagggaactggcaaaccaagtagccaaagacttcaaagatataactaggaaactcagygtggcgtgtttttatggtggaacatcatatcaaagccaaattaatcatattcgaaatggtattgacatcttggttggaacacctggtcgtatcaaagaccatctgcagagtggccgattggatctttctaaactgcgacatgttgtgcttgatgaagtggatcagatgttagatttaggtttcgctgaacaagttgaagatattattcatgaatcctacaaaactgattctgaagacaatcctcagactttacttttttctgcaacttgcccacagtgggtatacaaagttgcaaaaaaatacatgaaatccagatatgaacaggttgaccttgttggaaaaatgactcaaaaggctgcaactactgtggaacatttggccatccagtgtcattggtctcagaggccagcagttattggagatgtccttcaagtctacagtgggtctgaagggagggctattattttctgtgagaccaagaagaatgtaactgaaatggccatgaatccacacataaaacagaatgcccagtgtttacatggggacattgcacagtcacaaagagaaattacactaaaaggcttcagagaaggtagttttaaagttttggtggcaaccaatgtggctgcccgtggtttggacattcctgaagttgacctggtgattcaaagttctcctcctcaggatgttgagtcctatatccatcgctctggacgcacaggtagagctggacggacagggatttgtatatgtttttatcaaccaagagaaagaggtcaactaagatatgtggaacaaaaagcaggaattacttttaaacgtgtaggtgttccttctacaatggatttagttaaatctaaaagcatggatgccatcaggtctctggcttccgtttcttatgctgctgttgattttttccgaccatcagctcagagactgatagaagagaaaggtgcagtggatgcattggctgcagctttagcccacatttctggtgcatcaagytttgaaccacgatctttgatcacctctgataaggggtttgtgaccatgactctggaaagcctagaggaaatacaggatgtcagctgtgcttggaaagaacttaacagaaagctgagtagtaatgcagtgtctcagattaccagaatgtgcctcctgaaaggraatatgggtgtttgctttgatgttcctacaactgagtcagaaaggttacaggcagagtggcatgattccgactggatactctcagtgccagccaaattacctgaaattgaagaatattatgatggaaacacatcttctaattccagacagaggagtggctggtcaagtggtcgatcaggccggtcaggccggtcaggtggtcgatctggcggccggtcaggtagacagagtcgacaaggaagtcgctcaggaagtcgacaagatggtagaagacgaagtgggaatagaaatcgatcaagaagtgggggccacaaacggagttttgactgagtatttgatagttaatctaccagtgtgagcttgcctatttctgcctaatcatgtacattatccaccaaaaattaggtcatcatagttgaggtatgtgtctgctatttgcaaagaagttggtcgtatttttttaaaaagtatttcacaagaatggaacaaatctacttatccagttatacctttgaataaaaaaacctccttttattgtctcttttcacttat

SEQ ID NO: 2258 - DNA, 7437 bp, Homo sapiens
ttgtgggctccagcagcgagtagccacttccgctaggagtccctagcggccagggcgtggaagcggattctgaggcggctttctcctactgccctccgcttgccaacgcgggacccggagcccaacggcagcggcggtccttgggcctgtggagaggggttctctgtggccgagtcctaggcctggtgaaccgcgcggtgcgggagaggcgcttgggcctcgtccagccccagcccctgtctccccgcggccggtgccggcggctgtaggcctcgccgcgcccacccagcctggggcgggcccagcctcaccgcccggcccgccccgccccacgggccagccccgcgccgggtgtttccgctacttccctgcggcggggtaaccgcctcgcacctaccgggctcggttccctggctccggccgcgggggagcatggagtttgcggagctgattaagaccccgcgggtggacaatgtggtgctgcaccggcctttctacccggctgtcgagggcaccctgtgcctgacgggccaccacttgatcctgtcctcccggcaggacaatacggaggagctgtggctcctccattcaaacatcgacgccatcgacaagcgatttgtaggatcactgggtaccatcatcataaaatgtaaagattttcgaattattcagttggatattcctggaatggaggaatgcttgaatatagccagttccattgaggcattgtctactctggactccatcactctgatgtaccctttcttttaccgtcctatgtttgaagtgatagaagatggctggcattcyttccttcctgagcaagaatttgaactctattcttcagctaccagtgaatggaggctaagctatgtcaataaggaatttgctgtctgtccctcttacccaccaattgtcacagtgcccaaatccatcgatgatgaagctcttcggaaggtagctacatttcgacatggagggcgcttcccagtactmagctattaccacaaaaaaaatgggatggtaattmtgcgaagtggtcagccactcactggtacaaacgggaggaggtgcaaggaggacgagaagctgataaatgctaccctcagggctggaaagcgtggctacatcattgacacccgatccctgaacgtggctcagcaaactagagccaaaggaggtggctttgaacaagaagctcattatcctcagtggaggcgaattcataagtccattgagaggtatcacattcttcaggagagcttaatcaaacttgtggaagcttgtaatgaccaaacacataacatggaccgatggctcagtaaattggaggcctctaactggctgactcacatcaaagagattytgacaactgcctgcctagcggctcagtgcatcgacagggaaggagcatcaatattgattcacggaacagaaggaactgattccacactccaggtgacctccttggcccagatcatcttagagccaagaagcaggaccattcgtggttttgaggccctgattgaaagagagtggctgcaggctggtcacccattccagcagcgctgtgcacagtcagcctactgtaacaccaagcagaagtgggaggctcctgtatttcttctcttcttggactgcgtgtggcagatccttcgtcagtttccctgttcttttgagtttaatgagaatttcctcatcatgctctttgagcatgcttatgcctcacagtttggaacatttctgggcaacaatgaaagtgaaagatgtaagttgaagctacagcagaagacgatgtctttgtggtcctgggttaatcagcccagtgagctgagtaaattcaccaatcccctctttgaagccaacaaccttgtcatctggccttcagttgctccgcagagtcttccastgtgggaaggtattttcctacgttggaatagatcctctaagtatttggatgaagcatatgaagaaatggttaacatcattgaatataataaagaattacaagcaaaagtcaatatccttcgaaggcagttggcagaactggaaacagaggacgggatgcaggagagtccctgaaaggtctcctcgcacccttcgcaaggaccttcttgggcctgtgtccgccgttctctccttgtgcccttcagttcacttttacacggtagccttgaagtgaaggctttagatgtgggacccccctaatgtaatggatttctcaatactgtatgaataatgaaacttactatcataaaccatgtttcatgtggcctgttagggcctgtcactttgggagccggaaggaggtgctagtcattttatttttacgtgaaatagatgacctatttaatgccatttgtgtttcatgccattttatccaaagctttttstctgtgtccactctccaaacagcattctagagcagtcaaggagacagctaatctctctagggactatttggtggtttaaaaaaagggtcagacttttaaacactctgaccatagaaatgtttttcaaaatggcaacaatggataaaccaaggattttgtgtttaacaatccatttccagtgtcttcgccacataaaatagccattttctttaaaatagttttggactaacgaagctgaaatctattctcattcttgtttgtcaagaaaggaaaatctgttattcaaggtaaattatttctacaagggcaacaggtatggtcctccgatatttacattaagaagagttaaatttattttaacgtagacactaaaagtatgtgcaatatacaattaaagtaggaatttgttactgattgagaattgttactggtgaattggttttcaggttttgagcatacatatacaatgtgtttcaaatgctgcttgtaaaattaaaccatcatctagaatagagttaatttattataatcaagctacaaataggttttcttaaaccagagatgcactgcccttgtctaaagttcttattgcactggtttatatgtgtatgtgtgttttattgtgtgtttttttaatttgtaagtattctaagagtttcctaatactaaggttaaaattttcatgttgacctgagccttttgcaaatttgctttggctctattgatttgtccattatgtgttaggcaaatataacttaagtggagggggaagtttatgaatataatatagctctgtgttttaaacctcaraaacagatttgagtgtttcagtattatagaaacagtgatgactattcatgctctgctagtctatgcctgcaactccaaatgtttgtggttcagtatttcccacctacatttctgtttggtgacattgctcattttaacaaatatgaccgagtctagtttttctttaaaaggatagtttatgagtaatctttaaaaccatttccataccatctgtatataaccatttcggtagagaacacactacactgaaccctgctttagagctgtgtgttgagctaaaaatataattttttaaaaattgactagcaaaatctatggccacactgagaagcctttgaaaatggcaaatacttttcatcaccaattgcccaattcatctttcttctgcttcctcagccttgtagcaaaggctacacagcagcccacagtccacagtctttttgggaaaattggcctgccaccttctttaagctcagtttatttttgacttactttctttgctgtagttatgaaccttggggcattaaaatcccatggcaaggagcataagagatgttctcgtagctctgcgttgtgtgaaatgtccatcttagttttgttaaaaaaaaaaaaaaaaaaaggaaacagcctcacttttttgtgctccctcagaattgcttgctatgtctgttaatacagctgagctttttgttttcttctctttttgtctcaagattgtatatgaaggagscttttcttctcagctaacaggcatataaggaaaamcatctagagagttttctttagaagtgactcccattagcctggtgtggtggtgtgtgcctatagtcccagccactaggaaagctgaggcagaaggatcccttgagcctaggaggttgaggctgcagtgagctatgatcgcatcagtccactccagcctgagcaacagagcgagaccctgtgtctaagtaaagaaaaagccagaagtgactcccactgcttctgttgatcggccatagggcttccatgggtggaaacttgtgagggagtttgtattaggtctggtcatggagggatgatgtaccatcaaggtagacccatcttcctgatgcacatttgctgtgcgagccagagtacagtcataacacggtattcgcatttcgttttctctgtctcactgagacaacaatctatactgttttggcaagtttgcattttagtattaatttataattagggattgttcaaacttcagatctgtttacaggttgtaaaaataaacttcggtatcagtgcatctacagaagtgttatttggtaatccaaatattagagttttcccaaatccaaaaacggtcagaaataagtccattatcaatataatttgaagaagatttttagtagtactgtgaagttcgtgcttacctggatgagaagaataaatgacacggatacactcctgagaagacactcgttaaacattgcatcggagagctgcctttgataaatgtgctgttaaacacttgaatgaagagaatggtggcagaatgagtgagcaagcagattgccccagaggggccggtaataatcacgtgagggataatcagattcctgcgtattcagcatcttctctattcatgtggagtgaaagctggtttttatacaggagatacgtraagtaggccccacaaataatatttttaaaatacaaaggatcaccacaatcctctattgaacatataaggatcctcagatttaaataagtactttttttttttttaatcagaagaacattgttgtttgattatatgtttttaaaaacctgaagcttttttggtggcaggacctttcaataaatatttatttggtcaaaattttttattttgattttattaaatgggaagaaagcaagcagaaatagtaaaattcagtaggtttaaaacaatctataaatgtattttatttccaagaaaacttagggtctcaaagcaagattttaaagtgatttttgagaagacttgggggggacaataatagacattcatgtcagatcccatatgggggatttttaaacatttctttgaactttgaggcctgatttagggrtgggattttattgctttttgttttaaaggatgaaattttgtggggttttagtctttgattcagtcagtatttggtttatgttaaataaaaaatcagtatcatggaaaagatatgaccataatttagtctcctcaagtgaaaaacaggagtaatgtttcgttgcactttgaaagatctgcttcaaggcataactcgtgtmgttgtctggtttcagggatagctgtttgaattgtcattctaaagtaggtcatcaggttcacttattatccgaccttaatctgggataaaggttttggtatttgcccacttctagatagaatgaatgaaaacaacacaagcgttttatgagcactctttatcagaaaggtatttcctggaccagaaatgggcaatagttacaatagttgatcctctgttctggaagctttgaaatttatcagagaatgaagtcattcagtacatctgataaakttttgttgttgttgttgttgttgttgttttaattgggcaaccctcagaactgaagaggttcagagaactttccaggtttatactatacctcaagaccacatagattagctactgcttattctttcacatgggctaggcctgttctcctcctccagacctagtattctaagttattaccacatagtatttttatgttacccatcatctttaaaaacattataggctgggcatggtggcttacgcctgtaatcccagcactttgggaggccaaggcgggcggatcatgaggtcaggagatcgagaccatcctggctaacacggtgaawacccatgtctactaaaaatacaaaaaattagccaggtgtggtggcgggcgcctgtagtcccagctactcaggaggctgaggcaggagmatggtrtgaacccgggaggcagagcttgcagtgagccgagatcgcaccactgcactccagcctgggcgaaagggcaagactccatctcaaaaaaaaaaaaaaaaaaagactcatttatccatttacatttattctcagatgataaaatatatactgatactataactttcttatggtatcagttttctttattttcttgaataaaattacttctaccttcatttggtctttataatccactgtccacagcatcttcctttaaaccaatagtcccagaagagaccctctgaaattctaggactggatattaaaatgcctgaacctgttatctaaatcctttttaagaaacttaatgttccagctcttgaactacactgtggaacagtaatttgtgcccaatttagtggaagataatgaggctcactgtaaacactacattgtcctgcaaagtaattctgatgagagtttactgacttctagagccattctctttaaccgtstgcaggtctaaggattaactatatttgtgatttgtaataaaactgarttgtacaacactgcctgtgtttgtctggccaagacatttgcttcacttttaaaatgcacgttatctttggagaggtgaattattctacaaaatgcaccctaaatctcattgtttaaaaccttactgatctaataccatctacacaaaaaaatgttgtasttgcagaacttagtttataaaaacaaagaatgtgtatttcttcaatagccgggtatttggattgttctcttgataatatttgaatgtgactcttggatttaagtgcactattattcatggcttatacaataaaattgcactgtatggcaaatatgtctataatgtatgctttgctgaaacctcaagagtgctgtaaggtacaggtttccatattgtgaacctgtgtacgcacacacacatatacatacagtcttagggaaaaaaaaaagcagaacttttgtaagtctgtgtaacattttaatattgtttgtaatattcactaggtgataatttcccctgtaccctataactgtaatcattcaccttgggttggccggtttgtcaagcttggtttactgaatcaagaaagagtcttgtcgaatgtggtactgttcttagtgtgtaatatttgcgtatggtgttcctctgcctcagaggacagttgcacagatggctagtgttaaatttctatagacgatggtaataaaatctgaatatatttaagtgctaataaatt

SEQ ID NO: 2259 - DNA, 2219 bp, Homo sapiens
ccggagttgttgtgggctccagcagcgagtagccacttccgctaggagtccctagcggccagggcgtggaagcggattctgaggcggctttctcctactgccctccgcttgccaacgcgggacccggagcccaacggcagcggcggtccttgggcctgtggagaggggttctctgtggccgagtcctaggcctggtgaaccgcgcggtgcgggagaggcgcttgggcctcgtccagccccagcccctgtctccccgcggccggtgccggcggctgtaggcctcgccgcgcccacccagcctggggcgggcccagcctcaccgcccggcccgccccgccccacgggccagccccgcgccgggtgtttccgctacttccctgcggcggggtaaccgcctcgcacctaccgggctcggttccctggctccggccgcgggggagcatggagtttgcggagctgattaagaccccgcgggtggacaatgtggtgctgcaccggcctttctacccggctgtcgagggcaccctgtgcctgacgggccaccacttgatcctgtcctcccggcaggacaatacggaggagctgtggctcctccattcaaacatcgacgccatcgacaagcggtgagtgcccgccccaccccagctccgcagggagccgggggtcccytgtgggcgccccgggaaatacttcctggcgttttccgcgcagcctgccgcccagctagccggcaagatgagccctctgtggcctagaatcaggatttaccaagctgaaacccgtccagatggaggacccggtttccattaaacctggatggagttctcagggttatcgtgtggctggtaccatcctgatgatcatttctggttcgtaacaccatttgggtggattttcggcattgtctttataaatttcttcttcttcttgccccatcgtattccttgaattggtattgtcartcaccgttcatgaagtgattggatgtgatttaggtaaagtctttaccatttstgaggaaaactaaacagattataaagttatgagtgtctacatgctacagaaccatttttttaatttctgaaaaatgttcagtgtatcatattatttcttaccttctgggtcatcaaaatttaattctcactaagggagattctgatgtcttctcttcatctttactcaattctgcttgctgaaagaacagggttggctctcaaggaaaggcatggaccagttaacctcttttttctttttgtactccagactttatctttccaaggcagtgcctcgaagtcaaaaagttaaactttcatctkcattcaaaattcccatctccttagtggctactcgctagccaggagagggcaaactgattatccgttttacacagaagtataaatgaatgacgacaacattttctattgcctcacaggataatttggatattaggaagattcgtacagaggatatgccttaaaataataatctctttctttctttcttttttttttttttttttttttkgagacgaaatctcactgtattgcccaggctggagtgcggtggccaatctcggctcactgtaacctccacctcccaggttctagcgattcttctgtctcagcctcccgagtagctgggattacaggcacgcgccaccacacccggctaatttttgtattttttagtagagatggggtttcaccatattgaccaggctggtcttgaactcctgacctcgcaatcctcccgcctaggcctcccacagttctgggattacaggcgtgagccactgcgcctggcctaaaataaaaatttctaatggtagaattgcaggcagtttgggtgaagccatggtagattgattgattgatatgagcagggggctcttattagtctcctcaagccaccttttgctgtataaagtcttcagtgggcccggcacggtggctcacgcctgtaatcccagcactttgggaggccaaggtgagcggatcacctgaggttaggagtttgagaccagcctgaccaacatgatgaaagcccgtctctactaaaaatacaaaaaattaaccgggcatagtggcaggtgcctgtaatcccagttactcaggaggctgaggcggaaaaatcgcttgaaccttggaagcagaggttgcagtgagccgagatcgggccactgcactccttcctttgcaacaagagcaaaactccatctc

SEQ ID NO: 2260 - DNA, 2031 bp, Homo sapiens
agggaggcggggcttcccgcgtcccccaagctccagatcctggggtggctgccacgtctccctgccacgcgcctggggggacgggaagacgggacggagatgttagtggtgggcgccccccgagggttcaccactgtttcctgagaaacttccccagtgcccacccacccgttctccgtgtgcccgagggccggtcctgggctaggctccgcgccccagccccaaaccgggtccccagccccttccagagagaaagctcccgacgcgggatgccgggcagaggcccagcgrcgggtggaagagaagctgagaaggagaaacagaggggagggggagcgaggagctggcggcagagggaacagcagattgcgccgagccaatggcaacggcaggacgaggtggcaccaaattcccttcggccaatgacgagccggagtttacagaagcctcattagcatttccccagaggcaggggcaggggcagaggccgggtggtgtggtgtcggtgtcggcagcatccccggcgccctgctgcggtcgccgcgagcctcggcctctgtctcctccccctcccgcccttacctccacgcgggaccgcccgcgccagtcaactcctcgcactttgcccctgcttggcagcggataaaagggggctgaggaaataccggacacggtcacccgttgccagctctagcctttaaattcccggctcggggacctccacgcaccgcggctagcgccgacaaccagctagcgtgcaaggcgccgcggctcagcrcgtaccggcgggcttcgaaaccgcagtcctccggcgaccccgaactccgctccggagcctcagccccctggaaagtgatcccggcatcsgagagccaagatgccggcccacttgctgcaggacgatatctctagctcctataccaccaccaccaccattacagcgcctccctccagggtcctgcagaatggaggagataagttggagacgatgcccctctacttggaagacgacattcgccctgatataaaagatgatatatatgaccccacctacaaggataaggaaggcccaagccccaargttgaatatgtctggagaaacatcatccttatgtctctgctacacttgggagccctgtatgggatcactttgattcctacctgcaagttctacacctggctttggggggtattctactattttgtcagtgccctgggcataacagcaggagctcatcgtctgtggagccaccgctcttacaaagctcggctgcccctacggctctttctgatcattgccaacacaatggcattccagaatgatgtctatgaatgggctcgtgaccaccgtgcccaccacaagttttcagaaacacatgctgatcctcataattcccgacgtggctttttcttctctcacgtgggttggctgcttgtgcgcaaacacccagctgtcaaagagaaggggagtacgctagacttgtctgacctagaagctgagaaactggtgatgttccagaggaggtactacaaacctggcttgctgctgatgtgcttcatcctgcccacgcttgtgccctggtatttctggggtgaaacttttcaaaacagtgtgttcgttgccactttcttgcgatatgctgtggtgcttaatgccacctggctggtgaacagtgctgcccacctcttcggatatcgtccttatgacaagaacattagcccccgggagaatatcctggtttcacttggagctgtgggtaagtcagctgtccaagtaagactacatccagtggtctgctgattaggggattaggctaggagccagaaaaactagataaatctgttttttatggctactttgtatctcagtttttccactataaaattagggggcagtatactggaaaacgcttttgagagtcaggcaacatgttttatgtaaaaatgaaaggataagaaacaaaacacaaaaaaacactgattttgattccaggttctaaaacaatttccaaatgccatgtatgctccrgg

SEQ ID NO: 2261 - DNA, 5855 bp, Homo sapiens
agggaggcggggcttcccgcgtcccccaagctccagatcctggggtggctgccacgtctccctgccacgcgcctggggggacgggaagacgggacggagatgttagtggtgggcgccccccgagggttcaccactgtttcctgagaaacttccccagtgcccacccacccgttctccgtgtgcccgagggccggtcctgggctaggctccgcgccccagccccaaaccgggtccccagccccttccagagagaaagctcccgacgcgggatgccgggcagaggcccagcgrcgggtggaagagaagctgagaaggagaaacagaggggagggggagcgaggagctggcggcagagggaacagcagattgcgccgagccaatggcaacggcaggacgaggtggcaccaaattcccttcggccaatgacgagccggagtttacagaagcctcattagcatttccccagaggcaggggcaggggcagaggccgggtggtgtggtgtcggtgtcggcagcatccccggcgccctgctgcggtcgccgcgagcctcggcctctgtctcctccccctcccgcccttacctccacgcgggaccgcccgcgccagtcaactcctcgcactttgcccctgcttggcagcggataaaagggggctgaggaaataccggacacggtcacccgttgccagctctagcctttaaattcccggctcggggacctccacgcaccgcggctagcgccgacaaccagctagcgtgcaaggcgccgcggctcagcrcgtaccggcgggcttcgaaaccgcagtcctccggcgaccccgaactccgctccggagcctcagccccctggaaagtgatcccggcatcsgagagccaagatgccggcccacttgctgcaggacgatatctctagctcctataccaccaccaccaccattacagcgcctccctccagggtcctgcagaatggaggagataagttggagacgatgcccctctacttggaagacgacattcgccctgatataaaagatgatatatatgaccccacctacaaggataaggaaggcccaagccccaargttgaatatgtctggagaaacatcatccttatgtctctgctacacttgggagccctgtatgggatcactttgattcctacctgcaagttctacacctggctttggggggtattctactattttgtcagtgccctgggcataacagcaggagctcatcgtctgtggagccaccgctcttacaaagctcggctgcccctacggctctttctgatcattgccaacacaatggcattccagaatgatgtctatgaatgggctcgtgaccaccgtgcccaccacaagttttcagaaacacatgctgatcctcataattcccgacgtggctttttcttctctcacgtgggttggctgcttgtgcgcaaacacccagctgtcaaagagaaggggagtacgctagacttgtctgacctagaagctgagaaactggtgatgttccagaggaggtactacaaacctggcttgctgctgatgtgcttcatcctgcccacgcttgtgccctggtatttctggggtgaaacttttcaaaacagtgtgttcgttgccactttcttgcgatatgctgtggtgcttaatgccacctggctggtgaacagtgctgcccacctcttcggatatcgtccttatgacaagaacattagcccccgggagaatatcctggtttcacttggagctgtgggtgagggcttccacaactaccaccactcctttccctatgactaytctgccagtgagtaccgctggcacatcaacttcaccacattcttcattgattgcatggccgccctcggtctgrcctatgaccggaagaaagtctccaaggccgccatcttggccaggattaaaagaaccggagatggaaactacaagagtggctgagtttggggtccctcaggttcctttttcaaaaaccagccaggcagaggttttaatgtctgtttattaactactgaataatgctaccaggatgctaaagatgatgatgttaacccattccagtacagtattcttttaaaattcaaaagtattgaaagccaacaactctgcctttatgatgctaagctgatattatttcttctcttatcctctctctcttctaggcccattgtcctccttttcactttattgctatcgccctcctttcccttattgcctcccaggcaagcagctggtcagtctttgctcagtgtccagcttccaaagcctagacaacctttctgtagcctaaaacgaatggtctttgctccagataactctctttccttgagctgttgtgagctttgaagtaggtggcttgagctagagataaaacagaatcttctgggtagtcccctgttgattatcttcagcccaggcttttgctagatggaatggaaaagcaacttcatttgacacaaagcttctaaagcaggtaaattgtcgggggagagagttagcatgtatgaatgtaaggatgagggaagcgaagcaagaggaacctctcgccatgatcagacatacagctgcctacctaatgaggacttcaagccccaccacatagcatgcttcctttctctcctggctcggggtaaaaagtggctgcggtgtttggcaatgctaattcaatgccgcaacatatagttgaggccgaggataaagaaaagacattttaagtttgtagtaaaagtggtctctgctggggaagggttttcttttctttttttctttaataacaaggagatttcttagttcatatatcaagaagtcttgaagttgggtgtttccagarttggtaaaaacagcagctcatrgaattttgagtattccatgagctgctcattacagttctttcctctttctgctctgccatcttcaggatattggttcttcccctcatagtaataagatggctgtggcatttccaaacatccaaaaaaagggaaggatttaaggaggtgaagtcgggtcaaaaataaaatatatatacatatatacattgcttagaacgttaaactattagagtatttcccttccaaagagggatgtttggaaaaaactctgaaggagaggaggaattagttgggatgccaatttcctctccactgctggacatgagatggagaggctgagggacaggatctataggcagcttctaagagcgaacttcacataggaagggatctgagaacacgttgccaggggcttgagaaggttactgagtgagttattgggagtcttaataaaataaactagatattaggtccattcattaattagttccagtttctccttgaaatgagtaaaaactagaaggcttctctccacagtgttgtgccccttcactcatttttttttgaggagaagggggtctctgttaacatctagcctaaagtatasaactgcctggggggcagggttaggaatctcttcactaccctgattcttgattcctggytctaccctgtctgtcccttttctttgacyagatctttctcttccctgaacgttttyttctttccctggacaggcagcctcctttgkgtgtattcagaggcagtgatgacttgctgtccaggcagctccctcctgcasacagaatgctcagggtcactgaaccactgcttctcttttgaaagtagagctagctgccactttcacgtggcctccgcagtgtctccacctacacccctgtgctcccctgccacactgatggctcaagacaaggctggcaaaccctcccagaaacatctctggcccagaaagcctctctctccctccctctctcatgaggcacagccaagccaagcgctcaygttgagccagtgggccagccacagagcaaaagagggtttattttcagtcccctctctctgggtcagaaccagagggcatgctgaatgccccctgcttacttggtgagggtgccccgcctgagtcagtgctctcagctggcagtgcaatgcttgtagaagtaggaggaaacagttctcactgggaagaagcaagggcaagaacccaagtgcctcacctcgaaaggaggccctgttccctggagtcagggtgaactgcaaagctttggctgagacctgggatttgagataccacaaaccctgctgaacacagtgtctgttcagcaaactaaccagcattccctacagcctagggcagacaatagtatagaagtctggaaaaaaacaaaaacagaatttgagaaccttggaccactcctgtccctgtagctcagtcatcaaascagaagtctggctttgctctattaagattggaaatgtacactaccaaacactcagtccactgttgagccccagtgctggaagggaggaaggcctttcttctgtgttaattgcgtagaggctacaggggttagcctggactaaaggcatccttgtcttttgagctattcacctcagtagaaaaggatctaagggaagatcactgtagtttagttctgttgacctgtgcacctaccccttggaaatgtctgctggtatttctaattccacaggtcatcagatgcctgcttgataatatataaacaataaaaacaactttcacttcttcctattgtaatcgtgtgccatggatctgatctgtaccatgaccctacataaggctggatggcacctcaggctgagggccccaatgtatgtgtggctgtgggtgtgggtgggagtgtgtctgctgagtaaggaacaygattttcaagattctaaagctcaattcaagtgacacattaatgataaactcagatctgatcaagagtccggatttctaacagtccttgctttggggggtgtgctgacaacttagctcaggtgccttacatcttttytaatcacagtgttgcatatgagcctgccctcactccctctgcagaatccctttgcacctgagaccctactgaagtggctggtagaaaaaggggcctgagtggaggattatcagtatcacgatttgcaggattcccttctgggcttcattctggaaacttttgttagggctgcttttyttaagtgcccacatttgatggagggtggaaataatttgaatgtatttgatttataagttttttttttttttttgggttaaaagatggttgtagcatttaaaatggaaaattttctccttggtttgctagtatcttgggtgtattctctgtaagtgtagctcaaataggtcatcatgaaaggttaaaaaagcgaggtggccatgttatgcwggtggtyaaggccagggcctctccaaccactgtgccactgacttgctgtgtgaccctgggcaagtcacttaactataaggtgcctcagttttccttctgttaaaatggggataataatactgacctacctcaaagggcagttttgaggcatgactaatgctttttagaaagcattttggratccttcagcacaggaattctcaagacctgagtattttttataataggaatgtccaccatgaacttgatacgtccgtgtgycccagatgctgtcattagtctatatggttctccaagaaactgaatgaatccattggagaagcggtggataactagccagacaaaatttgagaatacataaacaacgcattgccmcggaaacatacagaggatgccttttctgtgattgggtgggattttttccctttttatgtgggatatagtagttacttgtgacaagaataattttggaataatttctattaatatcaactctgaagctaattgtactaatctgagattgtgtttgttcataataaaagtgaagtgaatctgattgca

SEQ ID NO: 2262 - DNA, 5699 bp, Homo sapiens
agggaggcggggcttcccgcgtcccccaagctccagatcctggggtggctgccacgtctccctgccacgcgcctggggggacgggaagacgggacggagatgttagtggtgggcgccccccgagggttcaccactgtttcctgagaaacttccccagtgcccacccacccgttctccgtgtgcccgagggccggtcctgggctaggctccgcgccccagccccaaaccgggtccccagccccttccagagagaaagctcccgacgcgggatgccgggcagaggcccagcgrcgggtggaagagaagctgagaaggagaaacagaggggagggggagcgaggagctggcggcagagggaacagcagattgcgccgagccaatggcaacggcaggacgaggtggcaccaaattcccttcggccaatgacgagccggagtttacagaagcctcattagcatttccccagaggcaggggcaggggcagaggccgggtggtgtggtgtcggtgtcggcagcatccccggcgccctgctgcggtcgccgcgagcctcggcctctgtctcctccccctcccgcccttacctccacgcgggaccgcccgcgccagtcaactcctcgcactttgcccctgcttggcagcggataaaagggggctgaggaaataccggacacggtcacccgttgccagctctagcctttaaattcccggctcggggacctccacgcaccgcggctagcgccgacaaccagctagcgtgcaaggcgccgcggctcagcrcgtaccggcgggcttcgaaaccgcagtcctccggcgaccccgaactccgctccggagcctcagccccctggaaagtgatcccggcatcsgagagccaagatgccggcccacttgctgcaggacgatatctctagctcctataccaccaccaccaccattacagcgcctccctccagggtcctgcagaatggaggagataagttggagacgatgcccctctacttggaagacgacattcgccctgatataaaagatgatatatatgaccccacctacaaggataaggaaggcccaagccccaargttgaatatgtctggagaaacatcatccttatgtctctgctacacttgggagccctgtatgggatcactttgattcctacctgcaagttctacacctggctttggggggtattctactattttgtcagtgccctgggcataacagcaggagctcatcgtctgtggagccaccgctcttacaaagctcggctgcccctacggctctttctgatcattgccaacacaatggcattccagaatgatgtctatgaatgggctcgtgaccaccgtgcccaccacaagttttcagaaacacatgctgatcctcataattcccgacgtggctttttcttctctcacgtgggttggctgcttgtgcgcaaacacccagctgtcaaagagaaggggagtacgctagacttgtctgacctagaagctgagaaactggtgatgttccagaggaggtactacaaacctggcttgctgctgatgtgcttcatcctgcccacgcttgtgccctggtatttctggggtgaaacttttcaaaacagtgtgttcgttgccactttcttgcgatatgctgtggtgcttaatgccacctggctggtgaacagtgctgcccacctcttcggatatcgtccttatgacaagaacattagcccccgggagaatatcctggtttcacttggagctgtgggtgagggcttccacaactaccaccactcctttccctatgactaytctgccagtgagtaccgctggcacatcaacttcaccacattcttcattgattgcatggccgccctcggtctgrcctatgaccggaagaaagtctccaaggccgccatcttggccaggattaaaagaaccggagatggaaactacaagagtggctgagtttggggtccctcaggttcctttttcaaaaaccagccaggcagaggttttaatgtctgtttattaactactgaataatgctaccaggatgctaaagatgatgatgttaacccattccagtacagtattcttttaaaattcaaaagtattgaaagccaacaactctgcctttatgatgctaagctgatattatttcttctcttatcctctctctcttctaggcccattgtcctccttttcactttattgctatcgccctcctttcccttattgcctcccaggcaagcagctggtcagtctttgctcagtgtccagcttccaaagcctagacaacctttctgtagcctaaaacgaatggtctttgctccagataactctctttccttgagctgttgtgagctttgaagtctgggtagtcccctgttgattatcttcagcccaggcttttgctagatggaatggaaaagcaacttcatttgacacaaagcttctaaagcaggtaaattgtcgggggagagagttagcatgtatgaatgtaaggatgagggaagcgaagcaagaggaacctctcgccatgatcagacatacagctgcctacctaatgaggacttcaagccccaccacatagcatgcttcctttctctcctggctcggggtaaaaagtggctgcggtgtttggcaatgctaattcaatgccgcaacatatagttgaggccgaggataaagaaaagacattttaagtttgtagtaaaagtggtctctgctggggaagggttttcttttctttttttctttaataacaaggagatttcttagttcatatatcaagaagtcttgaagttgggtgtttccagarttggtaaaaacagcagctcatrgaattttgagtattccatgagctgctcattacagttctttcctctttctgctctgccatcttcaggatattggttcttcccctcatagtaataagatggctgtggcatttccaaacatccaaaaaaagggaaggatttaaggaggtgaagtcgggtcaaaaataaaatatatatacatatatacattgcttagaacgttaaactattagagtatttcccttccaaagagggatgtttggaaaaaactctgaaggagaggaggaattagttgggatgccaatttcctctccactgctggacatgagatggagaggctgagggacaggatctataggcagcttctaagagcgaacttcacataggaagggatctgagaacacgttgccaggggcttgagaaggttactgagtgagttattgggagtcttaataaaataaactagatattaggtccattcattaattagttccagtttctccttgaaatgagtaaaaactagaaggcttctctccacagtgttgtgccccttcactcatttttttttgaggagaagggggtctctgttaacatctagcctaaagtatasaactgcctggggggcagggttaggaatctcttcactaccctgattcttgattcctggytctaccctgtctgtcccttttctttgacyagatctttctcttccctgaacgttttyttctttccctggacaggcagcctcctttgkgtgtattcagaggcagtgatgacttgctgtccaggcagctccctcctgcasacagaatgctcagggtcactgaaccactgcttctcttttgaaagtagagctagctgccactttcacgtggcctccgcagtgtctccacctacacccctgtgctcccctgccacactgatggctcaagacaaggctggcaaaccctcccagaaacatctctggcccagaaagcctctctctccctccctctctcatgaggcacagccaagccaagcgctcaygttgagccagtgggccagccacagagcaaaagagggtttattttcagtcccctctctctgggtcagaaccagagggcatgctgaatgccccctgcttacttggtgagggtgccccgcctgagtcagtgctctcagctggcagtgcaatgcttgtagaagtaggaggaaacagttctcactgggaagaagcaagggcaagaacccaagtgcctcacctcgaaaggaggccctgttccctggagtcagggtgaactgcaaagctttggctgagacctgggatttgagataccacaaaccctgctgaacacagtgtctgttcagcaaactaaccagcattccctacagcctagggcagacaatagtatagaagtctggaaaaaaacaaaaacagaatttgagaaccttggaccactcctgtccctgtagctcagtcaggctacaggggttagcctggactaaaggcatccttgtcttttgagctattcacctcagtagaaaaggatctaagggaagatcactgtagtttagttctgttgacctgtgcacctaccccttggaaatgtctgctggtatttctaattccacaggtcatcagatgcctgcttgataatatataaacaataaaaacaactttcacttcttcctattgtaatcgtgtgccatggatctgatctgtaccatgaccctacataaggctggatggcacctcaggctgagggccccaatgtatgtgtggctgtgggtgtgggtgggagtgtgtctgctgagtaaggaacaygattttcaagattctaaagctcaattcaagtgacacattaatgataaactcagatctgatcaagagtccggatttctaacagtccttgctttggggggtgtgctgacaacttagctcaggtgccttacatcttttytaatcacagtgttgcatatgagcctgccctcactccctctgcagaatccctttgcacctgagaccctactgaagtggctggtagaaaaaggggcctgagtggaggattatcagtatcacgatttgcaggattcccttctgggcttcattctggaaacttttgttagggctgcttttyttaagtgcccacatttgatggagggtggaaataatttgaatgtatttgatttataagttttttttttttttttgggttaaaagatggttgtagcatttaaaatggaaaattttctccttggtttgctagtatcttgggtgtattctctgtaagtgtagctcaaataggtcatcatgaaaggttaaaaaagcgaggtggccatgttatgcwggtggtyaaggccagggcctctccaaccactgtgccactgacttgctgtgtgaccctgggcaagtcacttaactataaggtgcctcagttttccttctgttaaaatggggataataatactgacctacctcaaagggcagttttgaggcatgactaatgctttttagaaagcattttggratccttcagcacaggaattctcaagacctgagtattttttataataggaatgtccaccatgaacttgatacgtccgtgtgycccagatgctgtcattagtctatatggttctccaagaaactgaatgaatccattggagaagcggtggataactagccagacaaaatttgagaatacataaacaacgcattgccmcggaaacatacagaggatgccttttctgtgattgggtgggattttttccctttttatgtgggatatagtagttacttgtgacaagaataattttggaataatttctattaatatcaactctgaagctaattgtactaatctgagattgtgtttgttcataataaaagtgaagtgaatctgattgca

SEQ ID NO: 2263 - DNA, 4160 bp, Homo sapiens
taactggtgtgcacaaatcaagaaaacctcaatgcaccgtcactccataacttctcgcttttgtttcaggtgagggcttccacaactaccaccactcctttccctatgactaytctgccagtgagtaccgctggcacatcaacttcaccacattcttcattgattgcatggccgccctcggtctgrcctatgaccggaagaaagtctccaaggccgccatcttggccaggattaaaagaaccggagatggaaactacaagagtggctgagtttggggtccctcaggttcctttttcaaaaaccagccaggcagaggttttaatgtctgtttattaactactgaataatgctaccaggatgctaaagatgatgatgttaacccattccagtacagtattcttttaaaattcaaaagtattgaaagccaacaactctgcctttatgatgctaagctgatattatttcttctcttatcctctctctcttctaggcccattgtcctccttttcactttattgctatcgccctcctttcccttattgcctcccaggcaagcagctggtcagtctttgctcagtgtccagcttccaaagcctagacaacctttctgtagcctaaaacgaatggtctttgctccagataactctctttccttgagctgttgtgagctttgaagtaggtggcttgagctagagataaaacagaatcttctgggtagtcccctgttgattatcttcagcccaggcttttgctagatggaatggaaaagcaacttcatttgacacaaagcttctaaagcaggtaaattgtcgggggagagagttagcatgtatgaatgtaaggatgagggaagcgaagcaagaggaacctctcgccatgatcagacatacagctgcctacctaatgaggacttcaagccccaccacatagcatgcttcctttctctcctggctcggggtaaaaagtggctgcggtgtttggcaatgctaattcaatgccgcaacatatagttgaggccgaggataaagaaaagacattttaagtttgtagtaaaagtggtctctgctggggaagggttttcttttctttttttctttaataacaaggagatttcttagttcatatatcaagaagtcttgaagttgggtgtttccagarttggtaaaaacagcagctcatrgaattttgagtattccatgagctgctcattacagttctttcctctttctgctctgccatcttcaggatattggttcttcccctcatagtaataagatggctgtggcatttccaaacatccaaaaaaagggaaggatttaaggaggtgaagtcgggtcaaaaataaaatatatatacatatatacattgcttagaacgttaaactattagagtatttcccttccaaagagggatgtttggaaaaaactctgaaggagaggaggaattagttgggatgccaatttcctctccactgctggacatgagatggagaggctgagggacaggatctataggcagcttctaagagcgaacttcacataggaagggatctgagaacacgttgccaggggcttgagaaggttactgagtgagttattgggagtcttaataaaataaactagatattaggtccattcattaattagttccagtttctccttgaaatgagtaaaaactagaaggcttctctccacagtgttgtgccccttcactcatttttttttgaggagaagggggtctctgttaacatctagcctaaagtatasaactgcctggggggcagggttaggaatctcttcactaccctgattcttgattcctggytctaccctgtctgtcccttttctttgacyagatctttctcttccctgaacgttttyttctttccctggacaggcagcctcctttgkgtgtattcagaggcagtgatgacttgctgtccaggcagctccctcctgcasacagaatgctcagggtcactgaaccactgcttctcttttgaaagtagagctagctgccactttcacgtggcctccgcagtgtctccacctacacccctgtgctcccctgccacactgatggctcaagacaaggctggcaaaccctcccagaaacatctctggcccagaaagcctctctctccctccctctctcatgaggcacagccaagccaagcgctcaygttgagccagtgggccagccacagagcaaaagagggtttattttcagtcccctctctctgggtcagaaccagagggcatgctgaatgccccctgcttacttggtgagggtgccccgcctgagtcagtgctctcagctggcagtgcaatgcttgtagaagtaggaggaaacagttctcactgggaagaagcaagggcaagaacccaagtgcctcacctcgaaaggaggccctgttccctggagtcagggtgaactgcaaagctttggctgagacctgggatttgagataccacaaaccctgctgaacacagtgtctgttcagcaaactaaccagcattccctacagcctagggcagacaatagtatagaagtctggaaaaaaacaaaaacagaatttgagaaccttggaccactcctgtccctgtagctcagtcatcaaascagaagtctggctttgctctattaagattggaaatgtacactaccaaacactcagtccactgttgagccccagtgctggaagggaggaaggcctttcttctgtgttaattgcgtagaggctacaggggttagcctggactaaaggcatccttgtcttttgagctattcacctcagtagaaaaggatctaagggaagatcactgtagtttagttctgttgacctgtgcacctaccccttggaaatgtctgctggtatttctaattccacaggtcatcagatgcctgcttgataatatataaacaataaaaacaactttcacttcttcctattgtaatcgtgtgccatggatctgatctgtaccatgaccctacataaggctggatggcacctcaggctgagggccccaatgtatgtgtggctgtgggtgtgggtgggagtgtgtctgctgagtaaggaacaygattttcaagattctaaagctcaattcaagtgacacattaatgataaactcagatctgatcaagagtccggatttctaacagtccttgctttggggggtgtgctgacaacttagctcaggtgccttacatcttttytaatcacagtgttgcatatgagcctgccctcactccctctgcagaatccctttgcacctgagaccctactgaagtggctggtagaaaaaggggcctgagtggaggattatcagtatcacgatttgcaggattcccttctgggcttcattctggaaacttttgttagggctgcttttyttaagtgcccacatttgatggagggtggaaataatttgaatgtatttgatttataagttttttttttttttttgggttaaaagatggttgtagcatttaaaatggaaaattttctccttggtttgctagtatcttgggtgtattctctgtaagtgtagctcaaataggtcatcatgaaaggttaaaaaagcgaggtggccatgttatgcwggtggtyaaggccagggcctctccaaccactgtgccactgacttgctgtgtgaccctgggcaagtcacttaactataaggtgcctcagttttccttctgttaaaatggggataataatactgacctacctcaaagggcagttttgaggcatgactaatgctttttagaaagcattttggratccttcagcacaggaattctcaagacctgagtattttttataataggaatgtccaccatgaacttgatacgtccgtgtgycccagatgctgtcattagtctatatggttctccaagaaactgaatgaatccattggagaagcggtggataactagccagacaaaatttgagaatacataaacaacgcattgccmcggaaacatacagaggatgccttttctgtgattgggtgggattttttccctttttatgtgggatatagtagttacttgtgacaagaataattttggaataatttctattaatatcaactctgaagctaattgtactaatctgagattgtgtttgttcataataaaagtgaagtgaatct

SEQ ID NO: 2264 - DNA, 1210 bp, Homo sapiens
cccagggcacagaggccaggatctcacgcgcgaccgcacgaggccgggaccctccctccccttccgtccactcccttccccaccgcctccggtcccctcccggtctccgccaccccgcttcggggcccccgccccccagccgggcagccaatcggagctgggatcccgccccggtccgcaaagcckgtggcgcccggaggctgcacggagagcggtgcccgcgtcagccgagaggaagtttggcgtggtggtggttggtgttggccgagccggctccgtgcggatgagggacttgcggaatccacacccttcctcagcrttcctgaacctgattggcttcgtgtcgagaagggagctcgggagcattgatggagtccagcrgatttctytggaggatgctctttccagccaagaggtggaggtcgcctatatctgcagtgagagctccagccatgaggactacatcaggcagttccttaatgctggcaagcacgtccttgtggaataccccatgacactgtcattggcggccgctcaggaactgtgggagctggctgagcagaaaggaaaagtcttgcacgaggagcatgttgaactcttgatggaggaattcgctttcctgaaaaaagaagtggtggggaaagacctgctgaaagggtcgctcctcttcacagctggcccgttggaagaagagcggtttggcttccctgcattcagcggcatctctcgcctgacctggctggtctccctctttggggagctttctcttgtgtctgccactttggaagagcgaaaggaagatcagtatatgaaaatgacagtrtgtctggagacagagaagaaaagtccactgtcatggattgaagaaaaaggrcctggtctaaaacgaaacagatatttaagcttccatttcaagtctgggtccttggagaatgtgccaaatgtaggagtgaataagaacatatttctgaaagatcaaaatatatttgtccagaaactcttgggccagttctctgagaaggaactggctgctgaaaagaaacgcatcctgcactgcctggggcttgcagaagaaatccagaaatattgctgttcaaggaagtaagaggaggaggtgatgtagcacttccaagatggcaccagcatttggttcttctcaagagttgaccattatctctattcttaaaattaaacatgttggggaaacaag

SEQ ID NO: 2265 - DNA, 1213 bp, Homo sapiens
cccagggcacagaggccaggatctcacgcgcgaccgcacgaggccgggaccctccctccccttccgtccactcccttccccaccgcctccggtcccctcccggtctccgccaccccgcttcggggcccccgccccccagccgggcagccaatcggagctgggatcccgccccggtccgcaaagcckgtggcgcccggaggctgcacggagagcggtgcccgcgtcagagcccgagaggaagtttggcgtggtggtggttggtgttggccgagccggctccgtgcggatgagggacttgcggaatccacacccttcctcagcrttcctgaacctgattggcttcgtgtcgagaagggagctcgggagcattgatggagtccagcrgatttctytggaggatgctctttccagccaagaggtggaggtcgcctatatctgcagtgagagctccagccatgaggactacatcaggcagttccttaatgctggcaagcacgtccttgtggaataccccatgacactgtcattggcggccgctcaggaactgtgggagctggctgagcagaaaggaaaagtcttgcacgaggagcatgttgaactcttgatggaggaattcgctttcctgaaaaaagaagtggtggggaaagacctgctgaaagggtcgctcctcttcacagctggcccgttggaagaagagcggtttggcttccctgcattcagcggcatctctcgcctgacctggctggtctccctctttggggagctttctcttgtgtctgccactttggaagagcgaaaggaagatcagtatatgaaaatgacagtrtgtctggagacagagaagaaaagtccactgtcatggattgaagaaaaaggrcctggtctaaaacgaaacagatatttaagcttccatttcaagtctgggtccttggagaatgtgccaaatgtaggagtgaataagaacatatttctgaaagatcaaaatatatttgtccagaaactcttgggccagttctctgagaaggaactggctgctgaaaagaaacgcatcctgcactgcctggggcttgcagaagaaatccagaaatattgctgttcaaggaagtaagaggaggaggtgatgtagcacttccaagatggcaccagcatttggttcttctcaagagttgaccattatctctattcttaaaattaaacatgttggggaaacaag

SEQ ID NO: 2266 - DNA, 986 bp, Homo sapiens
agcccgagaggaagtttggcgtggtggtggttggtgttggccgagccggctccgtgcggatgagggacttgcggaatccacacccttcctcagcrttcctgaacctgattggcttcgtgtcgagaagggagctcgggagcattgatggagtccagcrgatttctytggaggatgctctttccagccaagaggtggaggtcgcctatatctgcagtgagagctccagccatgaggactacatcaggcagttccttaatgctggcaagcacgtccttgtggaataccccatgacactgtcattggcggccgctcaggaactgtgggagctggctgagcagaaaggaaaagtcttgcacgaggagcatgttgaactcttgatggaggaattcgctttcctgaaaaaagaagtggtggggaaagacctgctgaaagggtcgctcctcttcacagctggcccgttggaagaagagcggtttggcttccctgcattcagcggcatctctcgcctgacctggctggtctccctctttggggagctttctcttgtgtctgccactttggaagagcgaaaggaagatcagtatatgaaaatgacagtrtgtctggagacagagaagaaaagtccactgtcatggattgaagaaaaaggrcctggtctaaaacgaaacagatatttaagcttccatttcaagtctgggtccttggagaatgtgccaaatgtaggagtgaataagaacatatttctgaaagatcaaaatatatttgtccagaaactcttgggccagttctctgagaaggaactggctgctgaaaagaaacgcatcctgcactgcctggggcttgcagaagaaatccagaaatattgctgttcaaggaagtaagaggaggaggtgatgtagcacttccaagatggcaccagcatttggttcttctcaagagttgaccattatctctattcttaaaattaaacatgttggggaaacaag

SEQ ID NO: 2267 - DNA, 5011 bp, Homo sapiens
atggcgtctcctkctagaaactcccagagccgacgccggtgcaaggagccgctccgatacagctacaaccccgaccagttccacaacatggacctcaggggcggcccccacgatggcgtcaccattccccgctccaccagcgacactgacctggtcacctcggacagccgctccacgctcatggtcagcagctcctactattccatcgggcactctcaggacctggtcatccactgggacataaaggaggaagtggacgctggggactggattggcatgtacctcattgatgaggtcttgtccgaaaactttctggactataaaaaccgtggagtcaatggttctcatcggggccagatcatctggaagatcgatgccagctcgtactttgtggaacctgaaactaagatctgcttcaaatactaccatggagtgagtggggccctgcgagcaaccacccccagtgtcacggtcaaaaactcggcagctcctatttttaaaagcattggtgctgatgagaccgtccaaggacaaggaagtcggaggctgatcagcttctctctctcagatttccaagccatggggttgaagaaagggatgtttttcaacccagacccttatctgaagatttccattcagcctgggaaacacagcatcttccccgccctccctcaccatggacaggagaggagatccaagatcataggcaacaccgtgaaccccatctggcaggccgagcaattcagttttgtgtccttgcccactgacgtgctggaaattgaggtgaaggacaagtttgccaagagccgccccatcatcaagcgcttcttgggaaagctgtcgatgcccgttcaaagactcctggagagacacgccataggggatagggtggtcagctacacacttggccgcaggcttccaacagatcatgtgagtggacagctgcaattccgatttgagatcacttcctccatccacccagatgatgaggagatttccctgagtaccgagcctgagtcagcccaaattcaggacagccccatgaacaacctgatggaaagcggcagtggggaacctcggtctgaggcaccagagtcctctgagagctggaagccagagcagctgggtgagggcagtgtccccgatsgtccagggaaccaaagcatagagctttccagaccagctgaggaagcagcagtcatcacggaggcaggagaccagggcatggtctctgtgggacctgaaggggctggggagctcctggcccaggtgcaaaaggacatccagcctgcccccagtgcrgaagagctggccgagcagctggacctgggtgaggaggcatcagcactgctgctggaagacggtgaagccccagccagcaccaaggaggagcccttggaggaggaagcaacgacccagagccgggctggaagggaagaagaggagaaggagcaggaggaggagggagatgtgtcyaccctggagcagggagagggcaggctgcagctgcgggcctcggtgaagagaaaaagcaggccctgctccttgcctgtgtccgagctggagacggtgatcgcgtcagcctgcggggaccccgagaccccgcggacacactacatccgcatccacaccctgctgcacagcatgccctccgcccagggcgrcagcgcggcagaggaggaggacggcgcggaggaggagtccaccctcaaggactcctcggagaaggatgggctcagcgaggtggacacggtggccgctgacccgtctgccctggaagaggacagagaagagcccgagggggctactccaggcacggcgcaccctggccactccgggggccacttccccagcctggccaatggcgcggcccaggatggcgacacgcaccccagcaccgggagcgagagcgactccagccccaggcaaggcggggaccacagttgcgagggctgtgacgcgtcctgctgcagcccctcgtgctacagytcctcgtgctacagcacgtcctgctacagcagctcgtgctacagcgcctcgtgctacagcccctcctgctacaacggcaacaggttcgccagccacacgcgcttctcctccgtggacagcgccaagatctccgagagcacggtcttctcctcgcaagacgacgaggaggaggagaacagcgcgttcgagtcggtacccgactccatgcagagccctgagctggacccggagtccacgaacggcgctgggccgtggcaagacgagctggccgcccctagcgggcacgtggaaagaagcccggaaggtctggaatcccccgtggcaggtccaagcaatcggagagaaggtgaatgtcctatactccataattcccagccagtaagccagcttccttccctgaggcctgaacatcatcactacccaacaatcgatgagcctcttccaccaaactgggaagctcgaattgacagccacgggcgggtcttttatgtggaccacgtgaaccgcacaaccacctggcagcgtccgacggcagcagccaccccggatggcatgcggagatcggggtccatccagcagatggagcaactcaacaggcggtatcaaaacattcagcgaaccattgcaacagagaggtccgaagaagattctggcagccaaagctgcgagcaagccccagcaggaggaggcggaggtggagggagtgactcagaagccgaatcttcccagtccagcttagatctaaggagagargggtcactttctccagtgaactcacaaaaaatcaccttgctgctgcagtccccmgcggtcaagttcatcaccaacccmgagttcttcactgtgctacaygccaattayagtgcctaccgagtcttcaccagtagcacctgcttaaagcacatgattctgaaagtccgacgggatgctcgcaattttgaacgctaccagcacaaccgggacttggtgaatttcatcaacatgttcgcagacactcggctggaactgccccggggctgggagatcaaaacggaccagcagggaaagtcttttttcgtggaccacaacagtcgagctaccactttcattgacccccgaatccctcttcagaacggtcgtcttcccaatcatctaactcaccgacagcacctccagaggctccgaagttacagcgcyggagaggcctcagaagtttctagaaacagaggagcctctttactggccaggccaggacacagcttagtagctgctattcgaagccaacatcaacatgagtcattgccactggcatataatgacaagattgtggcatttcttcgccagccaaacatttttgaaatgctgcaagagcgtcagccaagcttagcaagaaaccacacactcagggagaaaatccattacattcggactgagggtaatcacgggcttgagaagttgtcctgtgatgcggatctggtcattttgctgagtctctttgaagaagagattatgtcctacgtccccctgcaggctgccttccaccctgggtatagcttctctccccgmtgttcaccctgttcttcacctcagaactccccaggtttacagagagccagtgcaagagccccttccccctaccgaagagactttgaggccaagctccgcaatttctacagaaaactggaagccaaaggatttggtcagggtccggggaaaattaagctcattattcgccgggatcatttgttggagggaaccttcaatcaggtgatggcctattcgcggaaagagctccarcgaaacaagctctacgtcacctttgttggagaggagggcctggactacagtggcccctcgcgggagttcttcttccttctgtctcaggagctcttcaacccttactatggactctttgagtactcggcaaatgatacttacacggtgcagatcagccccatgtccgcatttgtagaaaaccatcttgagtggttcaggtttagcggtcgcatcctgggtctggctctgatccatcagtaccttcttgacgctttcttcacraggcccttctacaaggcactcctgagactgccctgtgatttgagtgacctggaatatttggatgaggaattccaccagagtttgcagtggatgaaggacaacaacatcacagacatcttagacctcactttcactgttaatgaagaggtttttggacaggtcacggaaagggagttgaagtctggaggagccaacacacaggtgacggagaaaaacaagaaggagtacatcgagcgcatggtgaagtggcgggtggagcgcggcgtggtacagcagaccgaggcgctggtgcgcggcttctacgaggttgtagactcraggctggtgtccgtgtttgatgccagggagctggagctggtgatagctggcaccgcggaaatcgacctaaatgactggcggaataacactgagtaccggggaggttaccacgatgggcatcttgtgatccgctggttctgggctgcggtggagcgcttcaataatgagcagaggctgagattactgcagtttgtcacgggaacatccagcgtgccctacgaaggcttcgcagccctccgtgggagcaatgggcttcggcgcttctgcatagagaaatgggggaaaattacttctctccccagggcacacacatgcttcaaccgactggatcttccaccgtatccctcgtactccatgttgtatgaaaagctgttaacagcagtagaggaaaccagcacctttggacttgagtgaggacatggaacctcgcctgacattttcctggccagtgacatcacccttcctgggatgatccccttttccctttcccttaatcaactctcctttgattttggtattccatgatttttattttcaaaccaaatcaggattgacaaaagctgtgcatgaagaactgccttcttctaagatctaaccttcaggcttctctcctctgttttcaatgaactgctagcctgtatgcaatattaaaaaacagctgtctcaa

SEQ ID NO: 2268 - DNA, 2255 bp, Homo sapiens
atgacaacaaaagactgaagaactgacaacgattagaggacactaaggagacttaacaactaaatgcaaaatgggaccctgaatctgatcctggaacacaaaaactaaattagtagaaaagtggtaaaataggtggtcgcgcgcccgaccgccgcagtcccagtcgagccgcgacccttccggctgcccccaccccacctcgccgccatgtgcctccgccgcccagcgctgttcccgggcgtggcgctgcttctcgccgcggcccgcctcgcggctgcctccgacgtgctargactcagggacgacaacttggagagtcgcatctccgacaygggctctgcgggcctcatgctcgtcgagttcttcgcyccctggtgtggayactgcaagagacttgctcctgagtatgaagctgcagctaccagattaaaaggaatagtcccattagcaaaggctgattgcactgccaacactaacacctgtaataaatatggagtcagtggatatccaaccctgaatatrtttagagatggtgaagaagsaggtgcttatgatggacctaggactgctgayggaattgtcagccacctgaagaagcaggcaggcccagcttcagtgcctctcaggactgaggaagaatttaagaaattcattagtgataaagatgcctctatagtaggttttttcgatgattcattcagtgargcwcactccgagttcctaaaagcagccagcaacttgagggataactaccgatttgcacatacgaatgttgagtctctggtgaacgagtatgatgataayggagakggtatcatcttatttcrtccttcacatctcactaacaagttkgaggacaagactgtggcatatacagwgcaaaaaatgaccagtggcaaaattaaaaagtttatccaggaaaacatttttggtatctgccctcacatgacagaagacaataaagatttgatacagggcaaggacttacttattgcttactatgatgtggactatgaaaagaatgctaaaggttccaactactggagaaacagggtartgatggtggcaaagaaattcctggatgctgggcacaaactcaactttgctgtagctagccgcaaaacctttagccatgaactttctgattttggcttggagagcactgctggagagattcctgttgttgctatcagaactgctaaaggagagaagtttgtcatgcaggaggakttctcgcrtgatgggaakgctctggagaggttcctgcaggattactttgatggcaatctgaagagatacctgaagtctgaacctatcccagagagcaatgatgggcctgtgaaggtagtggtagcagagaattttgatgaaatagtgaataatgaaaataaagaygtgctgattgaattttatgccccttggtgtggtcaytgtaagaacctggagcccaagtataaagaacttggcgagaagctcagcaaagaccyraatatcgtcatagccaagatggatgccacagccaatgatgtgccttctccatatgaagtcagagttttcctaccatatacttctctccagccaacaagaagctaaatccaaagaaatatgaaggtggccrtgaattaagtgattttattagctatctacaamgagamgctacaaacccccctgtaattcaagaagaaaaacccaagaagaagaaggcacaggaggatctctaaagcagtaggcaaacaccactttgtaaaaggactcttccaccagagatgggaaaaccactggggaggactaggacccatatgggaattattacgtctcagggccgagaggacagaatggatataatctgaatcctgttaaattttctctaagccatttcttagctgcactgttatggaaataccaggaccagtttatgtttgtggttttgggaaaaattatttgtgttgggggaaatgttgtgggagtcgggttgagttgggggtattttctaatttttttgtgcatttggaacagtgacaataaataagacccctttaaactgtaaaaaaaaaaaaaataggaatgcggtccatggtttacttaatcgtataatatcagtgttcattttcttattttgataattgtcataatgttgtgtgaaatattctctttagggagcctgggaaagaatatataagaactctactgtttttgtaacttttgtggaggactgcaatcatttctaaataaatagtcttaaaaataactaaagt

SEQ ID NO: 2269 - DNA, 1009 bp, Homo sapiens
ccgcctcctacctccttctgcttcggggagggcatgggatcagctacctgtttctgcctcaaccayggaccaataatatgagatctttgttcaccagttctacagtgatggggtgcttccttttggcttctggaatgggtgcgtttgcttctgaggatctccagtgtcacaacaaacacatgccagccctgttttacagggagccctggaggagttgggatagaggccacattgactgagggyagttgccagggtcctgcagttatacacaaagtccttaggataagaccatggccttgagagcatgtggcttgatcatcttccgaagatgcctcattcccaaagtggacaacaatgcaattgagtttttactgctgcaggcatcagatggcattcatcactggactcctcccaaaggccatgtggaaccaggagaggatgacttggaaacagccctgagggagacccaagaggaagcaggcatagaagcaggccagctgaccattattgaggggttcaaaagggaactcaattatgtggccaggaacaagcctaaaacagtcatttactggctggcggaggtgaaggactatgacgtggagatccgcctctcccatgagcaccaagcctaccgctggctggggctggaggaggcctgccagttggctcagttcaaggagatgaaggcagcgctccaagaaggacaccagtttctttgctccatagaggcctgagctgactggagcagagtcatttgcttcagcaggatccttgtgggccttctaagatgaagccaccctcaggtccagggaaggttgtgctggtatttggctcatgacagccaagagcagatttgtgaaatcggctcaactcccaggtgagagcaagcaaaaatcttggctgggtggaaaggaaggcaaaagagtaaaaattaaaaaggccaggcccagtaagtgtaccttgtactttataaataaacctcaagcagctcaaggttgtccttctaacc

SEQ ID NO: 2270 - DNA, 971 bp, Homo sapiens
ccgaattctattgatgggcccaagcgtaaccaggctcttctgattggccggtgtacttcagtttccgtccaaggtccgcctcctacctccttctgcttcggtgcgtttgcttctgaggatctccagtgtcacaacaaacacatgccagccctgttttacagggagccctggaggagttgggatagaggccacattgactgagggyagttgccagggtcctgcagttatacacaaagtccttaggataagaccatggccttgagagcatgtggcttgatcatcttccgaagatgcctcattcccaaagtggacaacaatgcaattgagtttttactgctgcaggcatcagatggcattcatcactggactcctcccaaaggccatgtggaaccaggagaggatgacttggaaacagccctgagggagacccaagaggaagcaggcatagaagcaggccagctgaccattattgaggggttcaaaagggaactcaattatgtggccaggaacaagcctaaaacagtcatttactggctggcggaggtgaaggactatgacgtggagatccgcctctcccatgagcaccaagcctaccgctggctggggctggaggaggcctgccagttggctcagttcaaggagatgaaggcagcgctccaagaaggacaccagtttctttgctccatagaggcctgagctgactggagcagagtcatttgcttcagcaggatccttgtgggccttctaagatgaagccaccctcaggtccagggaaggttgtgctggtatttggctcatgacagccaagagcagatttgtgaaatcggctcaactcccaggtgagagcaagcaaaaatcttggctgggtggaaaggaaggcaaaagagtaaaaattaaaaaggccaggcccagtaagtgtaccttgtactttataaataaacctcaagcagctcaaggttgtccttctaacc

SEQ ID NO: 2271 - DNA, 961 bp, Homo sapiens
gtacttcagtttccgtccaaggtccgcctcctacctccttctgcttcggttctacagtgatggggtgcttccttttggcttctggaatgggtgcgtttgcttctgaggatctccagtgtcacaacaaacacatgccagccctgttttacagggagccctggaggagttgggatagaggccacattgactgagggyagttgccagggtcctgcagttatacacaaagtccttaggataagaccatggccttgagagcatgtggcttgatcatcttccgaagatgcctcattcccaaagtggacaacaatgcaattgagtttttactgctgcaggcatcagatggcattcatcactggactcctcccaaaggccatgtggaaccaggagaggatgacttggaaacagccctgagggagacccaagaggaagcaggcatagaagcaggccagctgaccattattgaggggttcaaaagggaactcaattatgtggccaggaacaagcctaaaacagtcatttactggctggcggaggtgaaggactatgacgtggagatccgcctctcccatgagcaccaagcctaccgctggctggggctggaggaggcctgccagttggctcagttcaaggagatgaaggcagcgctccaagaaggacaccagtttctttgctccatagaggcctgagctgactggagcagagtcatttgcttcagcaggatccttgtgggccttctaagatgaagccaccctcaggtccagggaaggttgtgctggtatttggctcatgacagccaagagcagatttgtgaaatcggctcaactcccaggtgagagcaagcaaaaatcttggctgggtggaaaggaaggcaaaagagtaaaaattaaaaaggccaggcccagtaagtgtaccttgtactttataaataaacctcaagcagctcaaggttgtccttctaacc

SEQ ID NO: 2272 - DNA, 870 bp, Homo sapiens
tgcgtttgcttctgaggatctccagtgtcacaacaaacacatgccagccctgttttacagggagccctggaggagttgggatagaggccacattgactgagggyagttgccagggtcctgcagttatacacaaagtccttaggataagaccatggccttgagagcatgtggcttgatcatcttccgaagatgcctcattcccaaagtggacaacaatgcaattgagtttttactgctgcaggcatcagatggcattcatcactggactcctcccaaaggccatgtggaaccaggagaggatgacttggaaacagccctgagggagacccaagaggaagcaggcatagaagcaggccagctgaccattattgaggggttcaaaagggaactcaattatgtggccaggaacaagcctaaaacagtcatttactggctggcggaggtgaaggactatgacgtggagatccgcctctcccatgagcaccaagcctaccgctggctggggctggaggaggcctgccagttggctcagttcaaggagatgaaggcagcgctccaagaaggacaccagtttctttgctccatagaggcctgagctgactggagcagagtcatttgcttcagcaggatccttgtgggccttctaagatgaagccaccctcaggtccagggaaggttgtgctggtatttggctcatgacagccaagagcagatttgtgaaatcggctcaactcccaggtgagagcaagcaaaaatcttggctgggtggaaaggaaggcaaaagagtaaaaattaaaaaggccaggcccagtaagtgtaccttgtactttataaataaacctcaagcagctcaaggttgtccttctaacc

SEQ ID NO: 2273 - DNA, 2908 bp, Homo sapiens
ggaacagcctgacgaagaggaactttgggtaccagccagctgacgacagcaagatctggtccggtgcgcgcgggaggaagctgggaagggacgtcgcgcccagatcccgaggtccttgaggaccaggccctctctgcaaggaatcggggaggaaaatctcaaactattaatagaagagcggcaaaaaggaattcgtgcgcacccctctctgttggaaggaccttccctgccagagaccaaggctggcaggacaggtatacttccctcagggggaaacagccgacaaaggtggtcaaggtcgcccgcgcaggctccggagctgcacgtcctggacgaacactcccgtcccgagcacagacgctgggtatttggctgccagcccgggcccgccaggccgggcctggcaccgccaacacctgctcggcgggaacaggaagacctgtgttcgggaactccctccggccacctccccgtatcctcctggccctcgaaggtcgaaaggtggcctctcagggacacccgccgctcgctcggctcctcccctcagccgggagacccaaggaataacagcctctgcgataggagcacrctctaccaatcaaccgtagtcttcgcccacgcctcagccggaggaaattgcattggttgcatcattctcggcagccgataaattgttttcttggattggctaatagcgttccttcycccctgtgccttygtcgtcagaagctggcgattggttaatcgcgttgccaagctttggacgcggctcgaccattggaggccgcgggcccgcccccgccggctaggtgaaggtgagtgtctcctccagtcgcaacggccagacctgacctgccagctccgggcgtggggtgaaatctcttgattcctagtctctcgatatggcacctccgtcagtctttgccgaggttccgcaggcccagcctgtcctggtcttcaagctcactgccgacttcagggaggatccggacccccgcaaggtcaacctgggagtgggagcatatcgcacggatgactgccatccctgggttttgccagtagtgaagaaagtggagcagaagattgctaatgacaatagcctaaatcacgagtatctgccaatcctgggcctggctgagttccggagctgtgcttctcgtcttgcccttggggatgacagcccagcactcaaggagaagcgggtaggaggtgtgcaatctttggggggaacaggtgcacttcgaattggagctgatttcttagcrcgttggtacaatggaacaaacaacaagaacacacctgtctatgtgtcctcaccaacctgggagaatcacaatgctgtgttttccgctgctggttttaaagacattcggtcctatcgctactgggatgcagagaagagaggattggacctccagggcttcctgaatgatctggagaatgctcctgagttctccattgttgtcctccacgcctgtgcacacaacccaactgggattgacccaactccggagcagtggaagcagattgcttctgtcatgaagcaccggtttctgttccccttctttgactcagcctatcagggcttcgcatctggaaacctggagagagatgcctgggccattcgctattttgtgtctgaaggcttcgagttcttctgtgcccagtccttctccaagaacttcgggctctacagtgagtgctctcctgaggagttacagccccacctcctcgcatcactccctgcttcagcagccacagctgattctggtccctctctttagatgagagagtcgggaatctgactgtggttggaaaagaacctgagagcatcctgcaagtcctttcccagatggagaagatcgtgcggattacttggtccaatccccccgcccagggagcacgaattgtggccagcaccctctctaaccctgagctctttgaggaatggacaggtaatgtgaagacaatggctgaccggattytgaccatgagatctgaactcagggcacgactagaagccctcaaaacccctgggacctggaaccacatcactgatcaaattggcatgttcagcttcactgggttgaaccccaagcaggttgagtatctggtcaatgaaaagcacatctacctgctgccaagtggtcgaatcaacgtgagtggcttaaccaccaaaaatctagattacgtggccacctccatccatgaagcagtcaccaaaatccagtgaagaaacaccacccgtccagtaccaccaaagtagttctctgtcatgtgtgttccctgcctgcacaaacctacatgtacataccatggattagagacacttgcaggactgaaaggctgctctggtgaggcagcctctgtttaaacyggccccacatgaagagaacatcccttgagacgaatttggagactgggattagagcctttggaggtcaaagcaaattaagatttttatttaagaataaaagagtactttgatcatgagacatakgtatcttgtccctctcactaaaaaggagtgttgtgtgtggcggccacgtgcttctmtgtggtgtttgactctgtacaaattctagtcccaaagatcaagttgtctgaaggagccaaagtgtgaatgtgggtgtcggctgcrgcattaaattcatcatctcaacccagagtgtctggtctccctgctctttctgcatggttgtgtccctagtcctaagctttggttctttagggtgactgtggtaagaaggatatttaatcatgacatgcacggacacrtacatatttractgaaacaagttttaccaaacagtatttactcgtgatgtgcgtagtgcattctgatatttttgagccattctattgtgttctacttcacctaaaaaaataaaataaaaatgttgatcaa

SEQ ID NO: 2274 - DNA, 2819 bp, Homo sapiens
ggaacagcctgacgaagaggaactttgggtaccagccagctgacgacagcaagatctggtccggtgcgcgcgggaggaagctgggaagggacgtcgcgcccagatcccgaggtccttgaggaccaggccctctctgcaaggaatcggggaggaaaatctcaaactattaatagaagagcggcaaaaaggaattcgtgcgcacccctctctgttggaaggaccttccctgccagagaccaaggctggcaggacaggtatacttccctcagggggaaacagccgacaaaggtggtcaaggtcgcccgcgcaggctccggagctgcacgtcctggacgaacactcccgtcccgagcacagacgctgggtatttggctgccagcccgggcccgccaggccgggcctggcaccgccaacacctgctcggcgggaacaggaagacctgtgttcgggaactccctccggccacctccccgtatcctcctggccctcgaaggtcgaaaggtggcctctcagggacacccgccgctcgctcggctcctcccctcagccgggagacccaaggaataacagcctctgcgataggagcacrctctaccaatcaaccgtagtcttcgcccacgcctcagccggaggaaattgcattggttgcatcattctcggcagccgataaattgttttcttggattggctaatagcgttccttcycccctgtgccttygtcgtcagaagctggcgattggttaatcgcgttgccaagctttggacgcggctcgaccattggaggccgcgggcccgcccccgccggctaggtgaaggtgagtgtctcctccagtcgcaacggccagacctgacctgccagctccgggcgtggggtgaaatctcttgattcctagtctctcgatatggcacctccgtcagtctttgccgaggttccgcaggcccagcctgtcctggtcttcaagctcactgccgacttcagggaggatccggacccccgcaaggtcaacctgggagtgggagcatatcgcacggatgactgccatccctgggttttgccagtagtgaagaaagtggagcagaagattgctaatgacaatagcctaaatcacgagtatctgccaatcctgggcctggctgagttccggagctgtgcttctcgtcttgcccttggggatgacagcccagcactcaaggagaagcgggtaggaggtgtgcaatctttggggggaacaggtgcacttcgaattggagctgatttcttagcrcgttggtacaatggaacaaacaacaagaacacacctgtctatgtgtcctcaccaacctgggagaatcacaatgctgtgttttccgctgctggttttaaagacattcggtcctatcgctactgggatgcagagaagagaggattggacctccagggcttcctgaatgatctggagaatgctcctgagttctccattgttgtcctccacgcctgtgcacacaacccaactgggattgacccaactccggagcagtggaagcagattgcttctgtcatgaagcaccggtttctgttccccttctttgactcagcctatcagggcttcgcatctggaaacctggagagagatgcctgggccattcgctattttgtgtctgaaggcttcgagttcttctgtgcccagtccttctccaagaacttcgggctctacaatgagagagtcgggaatctgactgtggttggaaaagaacctgagagcatcctgcaagtcctttcccagatggagaagatcgtgcggattacttggtccaatccccccgcccagggagcacgaattgtggccagcaccctctctaaccctgagctctttgaggaatggacaggtaatgtgaagacaatggctgaccggattytgaccatgagatctgaactcagggcacgactagaagccctcaaaacccctgggacctggaaccacatcactgatcaaattggcatgttcagcttcactgggttgaaccccaagcaggttgagtatctggtcaatgaaaagcacatctacctgctgccaagtggtcgaatcaacgtgagtggcttaaccaccaaaaatctagattacgtggccacctccatccatgaagcagtcaccaaaatccagtgaagaaacaccacccgtccagtaccaccaaagtagttctctgtcatgtgtgttccctgcctgcacaaacctacatgtacataccatggattagagacacttgcaggactgaaaggctgctctggtgaggcagcctctgtttaaacyggccccacatgaagagaacatcccttgagacgaatttggagactgggattagagcctttggaggtcaaagcaaattaagatttttatttaagaataaaagagtactttgatcatgagacatakgtatcttgtccctctcactaaaaaggagtgttgtgtgtggcggccacgtgcttctmtgtggtgtttgactctgtacaaattctagtcccaaagatcaagttgtctgaaggagccaaagtgtgaatgtgggtgtcggctgcrgcattaaattcatcatctcaacccagagtgtctggtctccctgctctttctgcatggttgtgtccctagtcctaagctttggttctttagggtgactgtggtaagaaggatatttaatcatgacatgcacggacacrtacatatttractgaaacaagttttaccaaacagtatttactcgtgatgtgcgtagtgcattctgatatttttgagccattctattgtgttctacttcacctaaaaaaataaaataaaaatgttgatcaa

SEQ ID NO: 2275 - DNA, 2911 bp, Homo sapiens
ggaacagcctgacgaagaggaactttgggtaccagccagctgacgacagcaagatctggtccggtgcgcgcgggaggaagctgggaagggacgtcgcgcccagatcccgaggtccttgaggaccaggccctctctgcaaggaatcggggaggaaaatctcaaactattaatagaagagcggcaaaaaggaattcgtgcgcacccctctctgttggaaggaccttccctgccagagaccaaggctggcaggacaggtatacttccctcagggggaaacagccgacaaaggtggtcaaggtcgcccgcgcaggctccggagctgcacgtcctggacgaacactcccgtcccgagcacagacgctgggtatttggctgccagcccgggcccgccaggccgggcctggcaccgccaacacctgctcggcgggaacaggaagacctgtgttcgggaactccctccggccacctccccgtatcctcctggccctcgaaggtcgaaaggtggcctctcagggacacccgccgctcgctcggctcctcccctcagccgggagacccaaggaataacagcctctgcgataggagcacrctctaccaatcaaccgtagtcttcgcccacgcctcagccggaggaaattgcattggttgcatcattctcggcagccgataaattgttttcttggattggctaatagcgttccttcycccctgtgccttygtcgtcagaagctggcgattggttaatcgcgttgccaagctttggacgcggctcgaccattggaggccgcgggcccgcccccgccggctaggtgaaggtgagtgtctcctccagtcgcaacggccagacctgacctgccagctccgggcgtggggtgaaatctcttgattcctagtctctcgatatggcacctccgtcagtctttgccgaggttccgcaggcccagcctgtcctggtcttcaagctcactgccgacttcagggaggatccggacccccgcaaggtcaacctgggagtgggagcatatcgcacggatgactgccatccctgggttttgccagtagtgaagaaagtggagcagaagattgctaatgacaatagcctaaatcacgagtatctgccaatcctgggcctggctgagttccggagctgtgcttctcgtcttgcccttggggatgacagcccagcactcaaggagaagcgggtaggaggtgtgcaatctttggggggaacaggtgcacttcgaattggagctgatttcttagcrcgttggtacaatggaacaaacaacaagaacacacctgtctatgtgtcctcaccaacctgggagaatcacaatgctgtgttttccgctgctggttttaaagacattcggtcctatcgctactgggatgcagagaagagaggattggacctccagggcttcctgaatgatctggagaatgctcctgagttctccattgttgtcctccacgcctgtgcacacaacccaactgggattgacccaactccggagcagtggaagcagattgcttctgtcatgaagcaccggtttctgttccccttctttgactcagcctatcagggcttcgcatctggaaacctggagagagatgcctgggccattcgctattttgtgtctgaaggcttcgagttcttctgtgcccagtccttctccaagaacttcgggctctacaatgagagagtcgggaatctgactgtggttggaaaagaacctgagagcatcctgcaagtcctttcccagatggagaagatcgtgcggattacttggtccaatccccccgcccagggagcacgaattgtggccagcaccctctctaaccctgagctctttgaggaatggacaggtaatgtgaagacaatggctgaccggattytgaccatgagatctgaactcagggcacgactagaagccctcaaaacccctgggacctggaaccacatcactgatcaaattggcatgttcagcttcactgggttgaaccccaagcaggttgagtatctggtcaatgaaaagcacatctacctgctgccaagtggtcgaatcaacgtgagtggcttaaccaccaaaaatctagattacgtggccacctccatccatgaagcagtcaccaaaatccagtgaagaaacaccacccgtccagtaccaccaaagtagttctctgtcatgtgtgttccctgcctgcacaaacctacatgtacataccatggattagagacacttgcaggactgaaaggctgctctggtgaggcagcctctgtttaaacyggccccacatgaagagaacatcccttgagacgaatttggagactgggattagagcctttggaggtcaaagcaaattaagatttttatttaagaataaaagagtactttgatcatgagacatakgtatcttgtccctctcactaaaaaggagtgttgtgtgtggcggccacgtgcttctmtgtggtgtttgactctgtacaaattctagtcccaaagatcaagttgtctgaaggagccaaagtgtgaatgtgggtgtcggctgcrgcattaaattcatcatctcaacccagagtgtctggtctccctgctctttctgcatggttgtgtccctagtcctaagctttggttctttagggtgactgtggtaagaaggatatttaatcatgacatgcacggacacrtacatatttractgaaacaagttttaccaaacagtatttactcgtgatgtgcgtagtgcattctgatatttttgagccattctattgtgttctacttcacctaaaaaaataaaataaaaatgttgatcaattttttttttttttttttttttgagatggaatctcactctgtcacccaggctagagtgcaatggcgccatctcgcctcactgcaacctcagc

SEQ ID NO: 2276 - DNA, 1721 bp, Homo sapiens
tgctgtgcagggcagrgaagctccaggyaaacagcccagcaaacagcagcactcagctaaaaggaagactcacagaacacagttgamgaaggaaagtggcgatggacctcatcccaaatttggcggtggaaacctggcttctcctggctgtcagcctggtgctcctctatctatatgggacccgtacacatggactttttaagagactgggaattccagggcccacacctctgcctttgttgggaaatgttttgtcctatcgtcagggtctctggaaatttgacacagagtgctataaaaagtatggaaaaatgtggggaacgtatgaaggtcaactccctgtgctggccatcacagatcccgacgtgatcagaacagtgctagtgaaagaatgttattctgtcttcacaaatcgaaggtctttaggcccagtgggatttatgaaaagtgccatctctttagctgaggatgaagaatggaagagaatacggtcattgctgtctccaaccttcaccagcggaaaactcaaggagatgttccccatcattgcccagtatggagatgtattggtgagaaacttgaggcgggaagcagagaaaggcaagcctgtcaccttgaaagacatctttggggcctacagcatggatgtgattactggcacatcatttggagtgaacatcgactctctcaacaatccacaagacccctttgtggagagcactaagaagttcctaaaatttggtttcttagatccattatttctctcaataatactctttccattccttaccccagtttttgaagcattaaatgtctctctgtttccaaaagataccataaattttttaagtaaatctgtaaacagaatgaagaaaagtcgcctcaacgacaaacaaaagcaccgactagatttccttcagctgatgattgactcccagaattcgaaagaaactgagtcccacaaagctctgtctgatctggagctcgcagcccagtcaataatcttcatttttgctggctatgaaaccaccagcagtgttctttccttcactttatatgaactggccactcaccctgatgtccagcagaaactgcaaaaggagattgatgcagttttgcccaataaggcaccacctacctatgatgccgtggtacagatggagtaccttgacatggtggtgaatgaaacactcagattattcccagttgctattagacttgagaggacttgcaagaaagatgttgaaatcaatggggtattcattcccaaagggtcaatggtggtgattccaacttatgctcttcaccatgacccaaagtactggacagagcctgaggagttccgccctgaaaggttcagtaagaagaaggacagcatagatccttacatatacacaccctttggaactggacccagaaactgcattggcatgaggtttgctctcatgaacatgaaacttgctctaatcagagtccttcagaacttctccttcaaaccttgtaaagaaacacagatccccttgaaattagacacgcaaggacttcttcaaccagaaaaacccattgttctaaaggtggattcaasagatggaaccctaagtggagaatgagttattctaaggayttctactttggtcttcaagaaagctgtgccccagaacaccagagatttcaacttagtcaataaaaccttgaaataaagatgggcttaatctaatgta

SEQ ID NO: 2277 - DNA, 2169 bp, Homo sapiens
acctctgggcagagaaacaaagytctatatgcacagcccagcaaagagcagcacacagctgaaagaaaaactcagaagacagagctgaaaaagaaaactggtgatggatctcattccaaactttgccatggaaacatgggttcttgtggctaccagcctggtactcctctatatttatgggacccattcacataaactttttaagaagctgggaattcctgggccaacccctctgccttttctgggaactattttgttctaccttaggggtctttggaattttgacagagaatgtaatgaaaaatacggagaaatgtgggggctgtatgaggggcaacagcccatgctggtcatcatggatcccgacatgatcaaaacagtgttagtgaaagaatgttactctgtcttcacaaaccagatgcctttaggtccaatgggatttctgaaaagtgccttaagttttgctgaagatgaagaatggaagagaatacgaacattgctatctccagctttcaccagtgtaaaattcaaggaaatkgtccccatcatttcccaatgtggagatatgttggtgagaagcctgaggcaggaagcagagaacagcaagtccatcaacttgaaagatttctttggggcctacaccatggatgtaatcactggcacattatttggagtgaacttggattctctcaacaayccacaagatccctttctgaaaaatatgaagaagcttttaaaattggattttttggatccctttttactcttaatatcactctttccatttcttaccccagtttttgaagccctaaatatcggtttgtttccaaaagatgttacccattttttaaaaaattccattgaaaggatgaaagaaagtcgcctcaaagataaacaaaagcatcgagtagatttctttcaacagatgatcgactcccagaattccaaagaaacaaagtcccataaagctctgtctgatctggagcttgtggcccagtcaattatcatcatttttgctgcctatgacacaactagcaccactctccccttcattatgtatgaactggccactcaccctgatgtccagcagaaactgcaggaggagattgacgcagttttasccaataaggcacctgtcacctacgatgcyctggtacagatggagtaccttgacatggtggtgaatgaaacgctcagattattcccagttgttagtagagttacgagagtctgcaagaaagatattgaaatcaatggagtgttcattcccaaagggttagcagtgatggttccaatctatgctcttcaccatgacccaaagtactggacagagcctgagaagttctgccctgaaaggttcagtaagaagaacaaggacagcatagatctttacagatacataccttttggagctggaccccgaaactgcattggcatgaggtttgctctcacaaacataaaacttgctgtcattagagcactgcagaacttctccttcaaaccttgtaaagagactcagatcccactgaaattagacaatctaccaattcttcaaccagaaaaacctattgttctaaaagtgcacttaagagatgggattacaagtggaccctgactttccctaaggacttccactttgttcaagaaagctgtatcccagaacactagacacttcaaattgttttgtgaataaaactcagaaatgaagatgagcttaattaacctagtatactgggtgaataattagaaattctctacattcattgagctctcattgtctgggtagagtattacacgttgcatactacaaagcaggtgacaaatcaatgccaaataagtacagtcatcttctctagttctcataagactatctccccgccacctatagttagtaccctcaagtcctcctgagctgtgatcagagaataaacatttctcaacaattttaccaacaatttttaatgaaaaggaaaattatacttgtgattctcgtagtgacatttatattacatgttccatttgtgatattctataataagtattatattgagaaagtcaacaagcacctctttacaaaactgttatctgatgtcttcctgcatattaaggatgaatctacagaattagatcaataaggatcaacaaataaatatttttggtcattataat

SEQ ID NO: 2278 - DNA, 853 bp, Homo sapiens
acctctgggcagagaaacaaagytctatatgcacagcccagcaaagagcagcacacagctgaaagaaaaactcagaagacagagctgaaaaagaaaactggtgatggatctcattccaaactttgccatggaaacatgggttcttgtggctaccagcctggtactcctctatatttatgggacccattcacataaactttttaagaagctgggaattcctgggccaacccctctgccttttctgggaactattttgttctaccttaggggtctttggaattttgacagagaatgtaatgaaaaatacggagaaatgtgggggctgtatgaggggcaacagcccatgctggtcatcatggatcccgacatgatcaaaacagtgttagtgaaagaatgttactctgtcttcacaaaccagatgcctttaggtccaatgggatttctgaaaagtgccttaagttttgctgaagatgaagaatggaagagaatacgaacattgctatctccagctttcaccagtgtaaaattcaaggaaatkgtccccatcatttcccaatgtggagatatgttggtgagaagcctgaggcaggaagcagagaacagcaagtccatcaacttgaaagatttctttggggcctacaccatggatgtaatcactggcacattatttggagtgaacttggattctctcaacaayccacaagatccctttctgaaaaatatgaagaagcttttaaaattggattttttggatccctttttactcttaatatacagagtctcgctgtgttgccyaggcyggagtgcatggtgcgatctgggctcactgaaacctccacctcctgggttcgag

SEQ ID NO: 2279 - DNA, 2172 bp, Homo sapiens
acctctgggcagagaaacaaagytctatatgcacagcccagcaaagagcagcacacagctgaaagaaaaactcagaagacagagctgaaaaagaaaactggtgatggatctcattccaaactttgccatggaaacatgggttcttgtggctaccagcctggtactcctctatatttatgggacccattcacataaactttttaagaagctgggaattcctgggccaacccctctgccttttctgggaactattttgttctaccttaggggtctttggaattttgacagagaatgtaatgaaaaatacggagaaatgtgggggctgtatgaggggcaacagcccatgctggtcatcatggatcccgacatgatcaaaacagtgttagtgaaagaatgttactctgtcttcacaaaccagatgcctttaggtccaatgggatttctgaaaagtgccttaagttttgctgaagatgaagaatggaagagaatacgaacattgctatctccagctttcaccagtgtaaaattcaaggaaatkgtccccatcatttcccaatgtggagatatgttggtgagaagcctgaggcaggaagcagagaacagcaagtccatcaacttgaaagatttctttggggcctacaccatggatgtaatcactggcacattatttggagtgaacttggattctctcaacaayccacaagatccctttctgaaaaatatgaagaagcttttaaaattggattttttggatccctttttactcttaatatcactctttccatttcttaccccagtttttgaagccctaaatatcggtttgtttccaaaagatgttacccattttttaaaaaattccattgaaaggatgaaagaaagtcgcctcaaagataaacaaaagcatcgagtagatttctttcaacagatgatcgactcccagaattccaaagaaacaaagtcccataaagctctgtctgatctggagcttgtggcccagtcaattatcatcatttttgctgcctatgacacaactagcaccactctccccttcattatgtatgaactggccactcaccctgatgtccagcagaaactgcaggaggagattgacgcagttttasccaataaggcacctgtcacctacgatgcyctggtacagatggagtaccttgacatggtggtgaatgaaacgctcagattattcccagttgttagtagagttacgagagtctgcaagaaagatattgaaatcaatggagtgttcattcccaaagggttagcagtgatggttccaatctatgctcttcaccatgacccaaagtactggacagagcctgagaagttctgccctgaaagtaggttcagtaagaagaacaaggacagcatagatctttacagatacataccttttggagctggaccccgaaactgcattggcatgaggtttgctctcacaaacataaaacttgctgtcattagagcactgcagaacttctccttcaaaccttgtaaagagactcagatcccactgaaattagacaatctaccaattcttcaaccagaaaaacctattgttctaaaagtgcacttaagagatgggattacaagtggaccctgactttccctaaggacttccactttgttcaagaaagctgtatcccagaacactagacacttcaaattgttttgtgaataaaactcagaaatgaagatgagcttaattaacctagtatactgggtgaataattagaaattctctacattcattgagctctcattgtctgggtagagtattacacgttgcatactacaaagcaggtgacaaatcaatgccaaataagtacagtcatcttctctagttctcataagactatctccccgccacctatagttagtaccctcaagtcctcctgagctgtgatcagagaataaacatttctcaacaattttaccaacaatttttaatgaaaaggaaaattatacttgtgattctcgtagtgacatttatattacatgttccatttgtgatattctataataagtattatattgagaaagtcaacaagcacctctttacaaaactgttatctgatgtcttcctgcatattaaggatgaatctacagaattagatcaataaggatcaacaaataaatatttttggtcattataat

SEQ ID NO: 2280 - DNA, 2006 bp, Homo sapiens
acctctgggcagagaaacaaagytctatatgcacagcccagcaaagagcagcacacagctgaaagaaaaactcagaagacagagctgaaaaagaaaactggtgatggatctcattccaaactttgccatggaaacatgggttcttgtggctaccagcctggtactcctctatatttatgggacccattcacataaactttttaagaagctgggaattcctgggccaacccctctgccttttctgggaactattttgttctaccttaggggtctttggaattttgacagagaatgtaatgaaaaatacggagaaatgtgggggctgtatgaggggcaacagcccatgctggtcatcatggatcccgacatgatcaaaacagtgttagtgaaagaatgttactctgtcttcacaaaccagatgcctttaggtccaatgggatttctgaaaagtgccttaagttttgctgaagatgaagaatggaagagaatacgaacattgctatctccagctttcaccagtgtaaaattcaaggaaatkgtccccatcatttcccaatgtggagatatgttggtgagaagcctgaggcaggaagcagagaacagcaagtccatcaacttgaaagatttctttggggcctacaccatggatgtaatcactggcacattatttggagtgaacttggattctctcaacaayccacaagatccctttctgaaaaatatgaagaagcttttaaaattggattttttggatccctttttactcttaatatcactctttccatttcttaccccagtttttgaagccctaaatatcggtttgtttccaaaagatgttacccattttttaaaaaattccattgaaaggatgaaagaaagtcgcctcaaagataaacaaaagcatcgagtagatttctttcaacagatgatcgactcccagaattccaaagaaacaaagtcccataaagctctgtctgatctggagcttgtggcccagtcaattatcatcatttttgctgcctatgacacaactagcaccactctccccttcattatgtatgaactggccactcaccctgatgtccagcagaaactgcaggaggagattgacgcagttttasccaataaggcacctgtcacctacgatgcyctggtacagatggagtaccttgacatggtggtgaatgaaacgctcagattattcccagttgttagtagagttacgagagtctgcaagaaagatattgaaatcaatggagtgttcattcccaaagggttagcagtgatggttccaatctatgctcttcaccatgacccaaagtactggacagagcctgagaagttctgccctgaaagatcccactgaaattagacaatctaccaattcttcaaccagaaaaacctattgttctaaaagtgcacttaagagatgggattacaagtggaccctgactttccctaaggacttccactttgttcaagaaagctgtatcccagaacactagacacttcaaattgttttgtgaataaaactcagaaatgaagatgagcttaattaacctagtatactgggtgaataattagaaattctctacattcattgagctctcattgtctgggtagagtattacacgttgcatactacaaagcaggtgacaaatcaatgccaaataagtacagtcatcttctctagttctcataagactatctccccgccacctatagttagtaccctcaagtcctcctgagctgtgatcagagaataaacatttctcaacaattttaccaacaatttttaatgaaaaggaaaattatacttgtgattctcgtagtgacatttatattacatgttccatttgtgatattctataataagtattatattgagaaagtcaacaagcacctctttacaaaactgttatctgatgtcttcctgcatattaaggatgaatctacagaattagatcaataaggatcaacaaataaatatttttggtcattataat

SEQ ID NO: 2281 - DNA, 876 bp, Homo sapiens
ctaaaggatccccactaagggctgttcacctgccccagggactcagaacacacatgactctccccacttgagctcaggatcccggcattacacggggcgcrctgagccccagatgtccctaacccctttccagcaccctccagccttgcagaagcagccaccatgccagtctctaagtgcccaaaaaagtcggagtccctgtggaaggggtgggacyggaaggcccagaggaayggcctgcggagccaggtataygctgtgaatggcgactactatgtgggcgagtggaaggacaaygtgaaacacgggaaaggaacacaggtctggaagaagaaaggagccatctatgagggggactggaagtttgggaagcgagacggctacggcaccctcagccttcctgaccaacagacaggaaagtgcaggagagtctactcaggctggtggaaaggtgataagaaatcgggttatgggatccagtttttcggacccaaggagtattatgagggtgactggtgtggcagccagcgcagcgggtggggccgcatgtattacagcaacggcgacatctacgagggacagtgggagaacgacaagcccaacggggagggcatgctgcgcctgaagaacgggaaccgctacgagggctgctgggagagaggcatgaagaacggggcggggcgtttcttccatctggaccacggccagctgtttgaaggcttctgggtggacaatatggccaaatgcgggacgatgatcgactttggccgtgacgaggcccctgagcccactcagttccccattcctgaggtcaaaatcctagaccctgatggtgtgctggcggaggccttggccatgttcaggaagacagaggaa

SEQ ID NO: 2282 - DNA, 2477 bp, Homo sapiens
tgccagtaggctggcgcttcgaggccattctggaggccagtcgcttactgaaaaggcaaaactgactttaaggtaatgggaaacccaggaactttcaamagaggccttttactctcagctttgtcgtatttgggttttgaaacttaccaggttatctctcaggctgctgtggttcatgccacagccaaagttgaagaaatacttgaacaagcagactacctgtatgaaagcggagaaacagaaaaactttatcagttgctaacccaatacaaggaaagtgaagatgcagagttactgtggcgtttggcacgggcatcacgtgatgtagctcagcttagcagaacctcagaagaggagaaaaagctattggtgtatgaagccctagagtatgcaaaaagagcactagaaaaaaatgaatcaagttttgcatctcataagtggtatgcaatctgycttagtgatgttggagattatgaaggcatcaaggctaaaattgcaaatgcatatatcatcaaggagcattttgagaaagcaattgaactgaaccctaaagatgctacttcaattcaccttatgggtatttggtgctatacatttgccgaaatgccttggtatcaaagaagaattgctaaaatgctgtttgcaactcctcctagttccacctatgagaaggccttaggctactttcacagggcagaacaaggaaagacatacttgaaactacacaacaaaaagcttgctgctttctggctaatgaaagccaaggactatccagcacacacagaggaggataaacaggagcctgattccccacgtgtcacattggtccgtgacgtttccccactaagggtgagacccattactgagaacaaaccccaggaatcccttacattctccttcccgtgcagcccccacctgattgttcttgtgtggattccagagctgactgctggattgagatgcttatttccccacgtacatgtatatcaaaggttctgtgtagcctcacctagtgcatcgtaatttcttacttgaggragaccagcaccctgaaaacgaactggaaagctgccttcttcagtcaaatctgctaaatcatacctacaatgaatgatattcaataacttctgtcatggcaaaatttatacagcagtggtaccatttgtaattctaatacttaactcttttatggtatacgcagtcctttttgaaggccagtttccctctatcacataacctgtcacatacattagaattttttttttaattctttaggcttgaaaattaccagagtgttcataataaggatttggaaaaggagtctattcaaccaagcagatctctgcctttctttcgtctttactatgaattctgaataaaatggagaacacactctcaatatgtagaaaaataaaattttggcaaaacaataattactgtttttctgtatgtacttagcagtgaaatatttataggcaacagattttaagaagtcagttccatggctattaaaaaatgtttaagttaatgaaatttacagtgcatattaaaagcatgatacaaatggaaatttaaaattttgtattaggaagcccagtttgctaaaagtagcattaatatcattcacatcagattttaatttgttacacatttttgtagttcagcaaaggcccctatgatgaaaaacaattaaaaagtgttatgacaaaaataattatctgtgtaaaaagggggagacccaaaagatttttcatatggttatttaattcagttaaatagaactgttatgaatttgagaggaatgaagatattcaaacactaacagaaaatyattagccttatattagagcattcaaatgcttatgtaactcttcaatccatctggcttcataaaaaccaaaattttgaacacaaaaaagtggcagagtttacattaccttttgtatgttcctaagtatgaaattgcatcaatttattatgaattaaatttgaaaagcatcacagatttaaaaacaaagtacaaaagagcctgattctttttaattccacaaatacctagcatctcaaagtaacatgtaaacaaacttctatgctgctcaatgaatccttccaatttcrataataaactaaatagtattggatctagtatatgactttcatgtgtaagttatggttctatccattactttaacaatattactgatgtaacagagaaaaattttcaactattgtatttatttaaaacaaactgacaagttcaagcacctgtcttcagaaaagccagcagcatttttttttttttaacatactcaaagtaagatttggcctaagcccttaatacctttctgaacagccatgcaactaaacaccctcaggagatgttacataagggagagaagaacatggagcaatttgcactttttcccctagataatattaacaaggtaaagcaaatccagatctttatgaatgaatgg

SEQ ID NO: 2283 - DNA, 989 bp, Homo sapiens
tacagctttgattttataacatcctgctaatttttgttcttacagaaatacactttcgggaaatggcctctaaatcctggctgaattttttaaccttcctctgtggatcagcaataggatttcttttatgttctcagctatttagtattttgttgggagaaaaggktgacacccagcctaatgttcttcataatgatcctcatgcaaggcattcagatgataatggacagaatcatctagaaggacaaatgaacttcaatgcagattctagccaacataaagatgagaacacagacattgcygaaaacctctatcagaaagttagaattctttgctgggttatgaccggccctcaaaacctagagaaaaaggccaaacacgtcaaagctacttgggcccagcgttgtaacaaagtgttgtttatgagttcagaagaaaataaagacttccctgctgtgggactgaaaaccaaagaaggcagagatcaactatactggaaaacaattaaagcttttcagtatgttcatgaacattatttagaagatgctgattggtttttgaaagcagatgatgacacgtatgtcatactagacaatttgaggtggcttctttcaaaatacgaccctgaagaacccatttactttgggagaagatttaagccttatgtaaagcagggctacatgagtggaggagcaggatatgtactaagcaaagaagccttgaaaagatttgttgatgcatttaaaacagacaagtgtacacatagttcctccattgaagacttagcactggggagatgcatggaaattatgaatgtagaagcaggagattccagagataccawtggaaaagaaacttttcatccctttgtgccagaacaccatttaattaaaggttatctacctagaacgttttggtactggaattacaactattatcctcctgtagaggtaagtttagaaattttattactatgtcartacttggac

SEQ ID NO: 2284 - DNA, 1778 bp, Homo sapiens
tacagctttgattttataacatcctgctaatttttgttcttacagaaatacactttcgggaaatggcctctaaatcctggctgaattttttaaccttcctctgtggatcagcaataggatttcttttatgttctcagctatttagtattttgttgggagaaaaggktgacacccagcctaatgttcttcataatgatcctcatgcaaggcattcagatgataatggacagaatcatctagaaggacaaatgaacttcaatgcagattctagccaacataaagatgagaacacagacattgcygaaaacctctatcagaaagttagaattctttgctgggttatgaccggccctcaaaacctagagaaaaaggccaaacacgtcaaagctacttgggcccagcgttgtaacaaagtgttgtttatgagttcagaagaaaataaagacttccctgctgtgggactgaaaaccaaagaaggcagagatcaactatactggaaaacaattaaagcttttcagtatgttcatgaacattatttagaagatgctgattggtttttgaaagcagatgatgacacgtatgtcatactagacaatttgaggtggcttctttcaaaatacgaccctgaagaacccatttactttgggagaagatttaagccttatgtaaagcagggctacatgagtggaggagcaggatatgtactaagcaaagaagccttgaaaagatttgttgatgcatttaaaacagacaagtgtacacatagttcctccattgaagacttagcactggggagatgcatggaaattatgaatgtagaagcaggagattccagagataccawtggaaaagaaacttttcatccctttgtgccagaacaccatttaattaaaggttatctacctagaacgttttggtactggaattacaactattatcctcctgtagagggtcctggttgctgctctgatcttgcagtttcttttcactatgttgattctacaaccatgtatgagttagaatacctcgtttatcatcttcgtccatatggttatttatacagatatcaacctaccttacctgaacgtatactaaaggaaattagtcaagcaaacaaaaatgaagatacaaaagtgaagttaggaaatccttgaaagaaaatcatgaatgaacaaaggtaatatgtctagcactgcactgaaaaaggacttctgcatttctgacatagaacactggaatcccagtgaggaattctaagtgaacattccttatagaaacctttcacatgaatgactataaactgaagctttaaatgagctgtgaagtgtgttaaaatgtgttttgatacagtaatatataaatatrtctatatatatgaggaacttgtgttttttaaatggtggccaggtagaggaactagaaaagagattttgttgcctgttttctgaccatctgtgttattgtcactgagaaactaaaatagwaaatttactaaaactacactgcaccatgwtagtaataaacagatctgccttaaagaaaagaaaattttagaaagaaatattgttgctcagtgttgttaatatagctcaagaattgagtttatatttgcagtatgctataaatgatacccccctaccacacccacacacacagtttttgtctaatgaaaatgttgctgtgattatttataattggtagtatttcttccagaagaagctaaaataagactggcacttaccctgaagtgcattaataaaaccacactttaaaattat

SEQ ID NO: 2285 - DNA, 1722 bp, Homo sapiens
tacagctttgattttataacatcctgctaatttttgttcttacagaaatacactttcgggaaatggcctctaaatcctggctgaattttttaaccttcctctgtggatcagcaataggatttcttttatgttctcagctatttagtattttgttgggagaaaaggktgacacccagcctaatgttcttcataatgatcctcatgcaaggcattcagatgataatggacagaatcatctagaaggacaaatgaacttcaatgcagattctagccaacataaagatgagaacacagacattgcygaaaacctctatcagaaagttagaattctttgctgggttatgaccggccctcaaaacctagagaaaaaggccaaacacgtcaaagctacttgggcccagcgttgtaacaaagtgttgtttatgagttcagaagaaaataaagacttccctgctgtgggactgaaaaccaaagaaggcagagatcaactatactggaaaacaattaaagcttttcagtatgttcatgaacattatttagaagatgctgattggtttttgaaagcagatgatgacacgtatgtcatactagacaatttgaggtggcttctttcaaaatacgaccctgaagaacccatttactttgggagaagatttaagccttatgtaaagcagggctacatgagtggaggagcaggatatgtactaagcaaagaagccttgaaaagatttgttgatgcatttaaaacagacaagtgtacacatagttcctccattgaagacttagcactggggagatgcatggaaattatgaatgtagaagcaggagattccagagataccawtggaaaagaaacttttcatccctttgtgccagaacaccatttaattaaaggttatctacctagaacgttttggtactggaattacaactattatcctcctgtagagggtcctggttgctgctctgatcttgcagtttcttttcactatgttgattctacaaccatgtatgagttagaatacctcgtttatcatcttcgtccatatggttatttatacagatatcaacctaccttacctgaacgtatactaaaggaaattagtcaagcaaacaaaaatgaagatacaaaagtgaagttaggaaatccttgaaagaaaatcatgaatgaacaaaggtaatatgtctagcactgcactgaaaaaggacttctgcatttctgacatagaacactggaatcccagtgaggaattctaagtgaacattccttatagaaacctttcacatgaatgactataaactgaagctttaaatgagctgtgaagtgtgttaaaatgtgttttgatacagtaatatataaatatrtctatatatatgaggaacttgtgttttttaaatggtggccaggtagaggaactagaaaagagattttgttgcctgttttctgaccatctgtgttattgtcactgagaaactaaaatagwaaatttactaaaactacactgcaccatgwtagtaataaacagatctgccttaaagaaaagaaaattttagaaagaaatattgttgctcagtgttgttaatatagctcaagaattgagtttatatttgcagtatgctataaatgatacccccctaccattggtagtatttcttccagaagaagctaaaataagactggcacttaccctgaagtgcattaataaaaccacactttaaaat

SEQ ID NO: 2286 - DNA, 2481 bp, Homo sapiens
caggatggctacttttctcatcggccgaaagagaaagtgcgaacagacagcaacaacgagaactctgtccccaaagactttgagaatgtcgacaacagcaacttcgcacccaggactcaaaagcagaagcaccagcctgagttggcgaagaagccaccgagtagacagaaggagcttttgaaaaggaagctggaacagcaggagaarggaaaaggacatacattccctgggaaaggccccggtgaggtgctgcctccyggggacagagscgcagccaacagcagccacgggaaggatgtgtccagaccgcctcatgccaggaaaactgggggcagctcccccgagaccaagtatgaccagccccctaagtgtgacatctcaggcaaggaggccatctctgccctgtcccgtgctaagtccaagcactgccgccaggagattggggagacttactgccgccacaagttagggctgctgatgcctgagaaggtgactcggttctgccccctcgagggtaaagccaacaagaacgtgcagtgggacgaggactccgtggagtacatgccagccaacccggtcagaatcgcctttgtcctggtggtccacggccgtgcctctcggcagttgcagcgcatgttcaaggccatctaccacaaagaccacttctactacatccaygtggacaagcgctctaattacctgcatcggcaagtgctccaggtctccaggcagtacagcaatgtccgcgtcacccyctggagaatggccaccatctggggaggagccagcctcctgtccacctacctgcagagcatgcgggacctcctggagatgaccgactggccctgggacttcttcatcaacctgagtgcggccgactacccsatcaggacaaatgaccagttggtggcgtttctctcccgataccgagatatgaatttcttgaagtcacacggccgggacaatgcaaggttcattcggaagcagggcctggatcggctcttcctggagtgcgacgctcacatgtggcgcctgggagatcggcggatcccasagggcattgccgtggatggcggttcggactggttcctgctgaaccggaggtttgtagaatatgtgaccttctccacagacgatctggtgaccaagatgaaacagttctactcctacaccctgcttcctgctgagtccttcttccatacggtcctggagaacagcccccactgcgacaccatggtggacaacaacctgcgcatcaccaactggaatcgcaagctgggctgcaagtgccagtacaagcacatcgtggactggtgcggctgctcccccaatgacttcaagccrcaggacttccaccgcttccagcagacagcccggcctaccttctttgcccgcaagtttgaagccgtggtgaatcaggaaatcattgggcagctggactattacctgtacgggaactaccctgcaggtaccccgggcctgcgctcctactgggagaatgtctacgatgagcctgacggcatccacagcctgagcgacgtgacactcaccttgtaccactcctttgcccgcctgggtcttcgacgggcygagacgtccctgcacacggatggggagaacagctgccgatactacccaatgggccacccagcatctgtgcacctctacttccttgctgaccgcttccagggctttctgatcaagcatcatgctaccaatctggctgtgagcaaactagagactctggagacctgggtgatgccgaaaaaagtcttcaagatcgcaagcccacccagtgactttgggaggcttcagttttccgaggtcggcactgactgggatgccaaggagaggctattccgcaactttgggggtcttctggggcccatggatgagccggtgggtatgcagaagtgggggaagggacctaaygtgaccgtgaccgtcatttgggtggatcccgtcaatgtcatcgcagccacctacgacatcctcattgagtccactgccgaattcacacactacaagccccctttgaacttgcccctgaggcctggggtctggacagtgaaaattctccaccactgggtgccagttgcagagaccaaattcctcrttgcgcctctgaccttctcgaacaggcagcccatcaaacctgaggaggcactgaagctgcacaatgggcccctccgcaatgcctacatggagcagagcttccagagcctaaacccygtcctcagcctgcccatcaacccygcccaggtggaacaggcacrgaggaacgcagcctccacgggcacagcgctggagggatggctggactcgttggtgggcgggatgtggactgccatggacatctgtgccacgggccccacagcctgcccggtcatgcagacctgcagccagacggcctggagctccttcagccctgaccccaagtcggagctgggggcagtcaaacctgatggccggctcaggtag

SEQ ID NO: 2287 - DNA, 1212 bp, Homo sapiens
ccaggggccgacgggagtggcggccgcgcggaggaggccaagatggcggcagctgcggcttcgcttcgcggggtagtgttgggcccgcggggcgcggggctccccgggcgcgcgtgcccggggtcctgctgtgcagcgcgcggcccgggcgctgagcggagatcttgcaggcagtggccttgtcgtcgaagtctggcctttcccgaggccggaaagtgatgctgtcagcgctgggcatgctggcggcagggggtgcggggctggccgtggctctgcattcggctgtgagtgccagtgacctggagctgcacccccccagctatccgtggtctcaccgtggcctcctctcttccttggaccacaccagcatccggaggggtttccaggtatataagcaggtgtgcgcctcctgccacagcatggacttcgtggcctaccgccacctggtgggcgtgtgctacacggaggatgaagctaaggagctggctgcggaggtggaggttcaagacggccccaatgaagatggggagatgttcatgcggccagggaagctgttcgactatttcccaaaaccataccccaacagtgaggctgctcgagctgccaacaacggagcattgccccctgacctcagctacatcgtgcgagctaggcatggtggtgaggactacgtcttctccctgctcacgggctactgcgagccacccaccggggtgtcactgcgggaaggtctctacttcaacccctactttcctggccaggccattgccatggcccctcccatctacacagatgtcttagagtttgacgatggcaccccagctaccatgtcccagatagccaaggatgtgtgcaccttcctgcgctgggcatytgagccagagcacgaccatcgaaaacgcatggggctcaagatgttgatgatgatggctctgctggtgcccctggtctacaccataaagcggcacaagtggtcagtcctgaagagtcggaagctggcatatcggccgcccaagtgaccctgtccagtgtctgcttgccatcctgccagaacaggccctcaagcccaagagccatcccaggcctgttcaggcctcagctaagcctctcttcatytggaagaagaggcaagggggcaggagaccaggctctagctytgggccctccttcagcccccatcatgggaataaattaattttctcaatgtacata

SEQ ID NO: 2288 - DNA, 3022 bp, Homo sapiens
ctcttgaagattacaaatgagactgggaaaccctcttcaataagacctgtgtgatgatagattgtgtcctgagcccgcaggtcaggctgaaagagtcaacaaccagcaaagtgaagatctaggagtctgttccccttgaacctgtgtggacctgatcaaacctcgagggaaaggctgggagaacacatccctggtcagctgtaggaaagccagagagcatttgagaagaggctgaagcttgaattttgcaaacacacaagccctctgcatttccccagagagaaggtttttttctcgtcttcatttcctttgaaacacctggggtgaggaaaaacctctacattggccaagcagaagaaacagaatctatgactgaagaggatcggctaagagtggttcctcgcagcttaaagggaggcacttttcacactctgtcttaaaatcagaagttgaattcatgaacacatatgatttagatagaagtcatgggatgcagcagttcttcaacgaaaaccaggagatctgacacatcactgagagctgcgttgatcatccagaactggtaccgaggttacaaagctcgactgaaggccagacaacactatgccctcaccatcttccagtccatcgaatatgctgatgaacaaggccaaatgcagttatccaccttcttttccttcatgttggaaaactacacacatatacataaggaagagctagaattaagaaatcagtctcttgaaagcgaacaggacatgagggatagatgggattatgtggactcgatagatgtcccagactcctataatggtcctcggctacaatttcctctcacttgtacggatattgatttacttcttgaggccttcaaggaacaacagatacttcatgcccattatgtcttagaggtgctatttgaaaccaagaaagtcctgaagcaaatgccgaatttyactcacatacaaacttctccctccaaagaggtaacaatctgtggtgatttgcatgggaaactggatgatctttttttgatcttctacaagaatggtctyccctcagagaggaacccgtatgtttttaatggtgactttgtagatcgaggaaagaattccatagagatcctaatgatcctgtgtgtgagttttcttgtctaccccartgacctgcacttgaacagagggaaccacgaagattttatgatgaatctgaggtatggcttcacgaaagaaattttgcataaatataagctacatggaaaaagaatcttacaaatcttggaagaattctatgcctggctcccaatcggtacaatcgttgacaatgaaatcctggtcatccatggtgggatatcagagaccacagacttgaatttactccaccgtgtrgagaggaacaagatgaaatctgtgctgataccaccaacggaaacaaacagagaccatgacactgactcgaagcacaataaagtaggtgtgacttttaatgcacatggaagaatcaaaacaaatggatctcctactgaacacttaacagagcatgaatgggaacagattattgatattctgtggagtgatcccagaggcaaaaatggctgttttccaaatacgtgccgaggagggggctgctattttggaccagatgttacttccaagattcttaataaataccagttgaagatgctcatcaggtctcatgaatgtaagcccgaagggtatgaaatctgtcatgatgggaaggtggtgactatattttctgcttctaattattatgaagaaggcagcaatcgaggagcttacatcaaactatgttctrgtacaactcctcgatttttccagtaccaagtaactaaagcaacgtgctttcagcctcttcgccaaagagtggatactatggaaaacagcgccatcaagatattaagagagagagtgatttcacgaaaaagtgaccttactcgtgctttccaacttcaagaccacagaaaatcaggaaaactttctgtgagccagtgggctttttgcatggagaacattttggggctgaacttaccatggagatccctcagttcgaatctggtaaacatagaccaaaatggaaacgttgaatacatgtccagcttccagaatatccgcattgaaaaacctgtacaagaggcaagctcattctactctagttgaaactctgtacagatacagatctgacctggaaatcatatttaatgccattgacactgatcactcaggcctgatctccgtggaagaatttcgtgccatgtggaaactttttagttctcactacaatgttcacattgatgattcccaagtcaataagcttgccaacataatggacttgaacaaagatggaagcrttgactttaatgagtttttaaaggctttctatgtagtgcatagatatgaagacttgatgaaacctgatgtcaccaaccttggctaaacacaaatgagagcttccctcaggctccctgaaacagctaggcccaaatcacaagtacagtcctttccaacacccctgaaattcatagtcagtagcagagaaaagcagatcccaattcatcccacaaacagatgcatagtatgggttttggaagtccctagcaagctgttattggtaagattaggttaaatgtcagtaataggatttggtttcagcattagtacctacatattgccagtgagaaactgggttggacctagtggtgttgtcgtgagtgccacctaaccaggaggccagagcggtttgaaaacatcctgaaaggaactcatacagcacaagagaaaactactaagcttgacatctgtgagtgactgagggagacaggaggaataccaggttattyatggaataaagtctttccatctttaaactgtgatcttctttggagattttataagccagtgatcctcaattaagggatccacccttcagggatgagaaccatattggattcttggggggaatctgtgggagtgtattgtttgaaaaagcgtatttktgtgtgtgtgta

SEQ ID NO: 2289 - DNA, 3018 bp, Homo sapiens
ctcttgaagattacaaatgagactgggaaaccctcttcaataagacctgtgtgatgatagattgtgtcctgagcccgcaggtcaggctgaaagagtcaacaaccagcaaagtgaagatctaggagtctgttccccttgaacctgtgtggacctgatcaaacctcgagggaaaggctgggagaacacatccctggtcagctgtaggaaagccagagagcatttgagaagaggctgaagcttgaattttgcaaacacacaagccctctgcatttccccagagagaaggtttttttctcgtcttcatttcctttgaaacacctggggtgaggaaaaacctctacattggccaagcagaagaaacagaatctatgactgaagaggatcggctaagagtggttcctcgcagcttaaagggaggcacttttcacactctgtcttaaaatcagaagttgaattcatgaacacatatgatttagatagaagtcatgggatgcagcagttcttcaacgaaaaccaggagatctgacacatcactgagagctgcgttgatcatccagaactggtaccgaggttacaaagctcgactgaaggccagacaacactatgccctcaccatcttccagtccatcgaatatgctgatgaacaaggccaaatgcagttatccaccttcttttccttcatgttggaaaactacacacatatacataaggaagagctagaattaagaaatcagtctcttgaaagcgaacaggacatgagggatagatgggattatgtggactcgatagatgtcccagactcctataatggtcctcggctacaatttcctctcacttgtacggatattgatttacttcttgaggccttcaaggaacaacagatacttcatgcccattatgtcttagaggtgctatttgaaaccaagaaagtcctgaagcaaatgccgaatttyactcacatacaaacttctccctccaaagaggtaacaatctgtggtgatttgcatgggaaactggatgatctttttttgatcttctacaagaatggtctyccctcagagaggaacccgtatgtttttaatggtgactttgtagatcgaggaaagaattccatagagatcctaatgatcctgtgtgtgagttttcttgtctaccccartgacctgcacttgaacagagggaaccacgaagattttatgatgaatctgaggtatggcttcacgaaagaaattttgcataaatataagctacatggaaaaagaatcttacaaatcttggaagaattctatgcctggctcccaatcggtacaatcgttgacaatgaaatcctggtcatccatggtgggatatcagagaccacagacttgaatttactccaccgtgtrgagaggaacaagatgaaatctgtgctgataccaccaacggaaacaaacagagaccatgacactgactcgaagcacaataaagtaggtgtgacttttaatgcacatggaagaatcaaaacaaatggatctcctactgaacacttaacagagcatgaatgggaacagattattgatattctgtggagtgatcccagaggcaaaaatggctgttttccaaatacgtgccgaggagggggctgctattttggaccagatgttacttccaagattcttaataaataccagttgaagatgctcatcaggtctcatgaatgtaagcccgaagggtatgaaatctgtcatgatgggaaggtggtgactatattttctgcttctaattattatgaagaaggcagcaatcgaggagcttacatcaaactatgttctrgtacaactcctcgatttttccagtaccaagtaactaaagcaacgtgctttcagcctcttcgccaaagagtggatactatggaaaacagcgccatcaagatattaagagagagagtgatttcacgaaaaagtgaccttactcgtgctttccaacttcaagaccacagaaaatcaggaaaactttctgtgagccagtgggctttttgcatggagaacattttggggctgaacttaccatggagatccctcagttcgaatctggtaaacatagaccaaaatggaaacgttgaatacatgtccagcttccagaatatccgcattgaaaaacctgtacaagaggctcattctactctagttgaaactctgtacagatacagatctgacctggaaatcatatttaatgccattgacactgatcactcaggcctgatctccgtggaagaatttcgtgccatgtggaaactttttagttctcactacaatgttcacattgatgattcccaagtcaataagcttgccaacataatggacttgaacaaagatggaagcrttgactttaatgagtttttaaaggctttctatgtagtgcatagatatgaagacttgatgaaacctgatgtcaccaaccttggctaaacacaaatgagagcttccctcaggctccctgaaacagctaggcccaaatcacaagtacagtcctttccaacacccctgaaattcatagtcagtagcagagaaaagcagatcccaattcatcccacaaacagatgcatagtatgggttttggaagtccctagcaagctgttattggtaagattaggttaaatgtcagtaataggatttggtttcagcattagtacctacatattgccagtgagaaactgggttggacctagtggtgttgtcgtgagtgccacctaaccaggaggccagagcggtttgaaaacatcctgaaaggaactcatacagcacaagagaaaactactaagcttgacatctgtgagtgactgagggagacaggaggaataccaggttattyatggaataaagtctttccatctttaaactgtgatcttctttggagattttataagccagtgatcctcaattaagggatccacccttcagggatgagaaccatattggattcttggggggaatctgtgggagtgtattgtttgaaaaagcgtatttktgtgtgtgtgta

SEQ ID NO: 2290 - DNA, 1941 bp, Homo sapiens
tccgcctcaccctcaggcctgacggtccgagtggagctgcgggacagcccgaacctccaggtcagccccgcggccctccatggcgctggtgcgcgcactcgtctgctgcctgctgactgcctggyactgccgctccggcctcgggctgcccgtggcgcccgcaggcggcaggaatcctcctccggcgatagggatagcccacctcatgttcctgtacctgaactctcaacagacactgttataaatgtgatcactaatatgacaaccaccatccagagtctctttccaaatctccaggttttccctgcgctgggtaatcatgactattggccacaggatcaactgyctgtagtcaccagtaaagtgtacaatgcagtagcaaacctctggaaaccatggctagatgaagaagctattagtactttaaggaaaggtggtttttattcacagaaagttacaactaatccaaaccttaggatcatcagtctaaacacaaacttgtactacggcccaaatataatgacactgaacaagactgacccagccaaccagtttgaatggctagamagtacattgaacaactctcagcagaataaggagaaggtgtatatcatagcacatgttccagtggggtatctgccatcttcacagaacatcacagcaatgagagaatactataatgagaaaytgatagatatttttcaaaaatacagtgatgtcattgcaggacaattttatggacacactcacagagacagcattatggttctttcagataaaaaaggaagtccagtaaattctttgtttgtggctcctgctgttacaccagtgaagagtgttttagaaaaacagaccaacaatcctggtatcagactgtttcagtatgatcctcrtgattataaattattggatatgttgcagtattacttgaatctgacagaggcgaatctaaagggagagtccatctggaagctggagtatatcctgacccagacctacgacattgaagatttgcagccggaaagtttatatggattagctaaacaatttacaatcctagacagtaagcagtttataaaatactacaattacttctttgtgagttatgacagcagtgtaacatgtgataagacatgtaaggcctttcagatttgtgcaattatgaatcttgataatatttcctatgcagattgcctcaaacagctttatataaagcacaawtactagtatttcacagtttttgctaatagaaaatgctgattctgattctgagatcaatttgtgggaattttacataaatctttgttaattactgagtgggcaagtagacttcctgtctttgctttctttttttttttctttttgatgccttaatgtagatatctttatcattctgaattgtattatatatttaaartgctcattaatagaatgatggatgtaaattggatgtaaatattcagtttatataattatatctaatttgtacccttgttgaaattgtcatttatacaataaagcgaattctttatctctaaatatgatgaagttttcttaacatgataatttttagttaaaatctgtgtattaactgaggtccaaattgtttacctctcatatgtaaacagatgttaccactgtttacatgcactatctactcttgggaaaataccatggtcattaggagcatgctgaaacatcacagggcatgtattgcctagctttcttcattctgagtctttggcattgctaacttttaaggatgagaatgtcacacatacttattgtatctgcagtactagcacaaggcctgggtcctagtccagtgcctggcacctagtaaataattgttgaaatgaattgaaagctgtgaatatttttcaaagaaacgtcctagattacagtggtggcattttctttgtcacagtattccaggatagg

SEQ ID NO: 2291 - DNA, 2253 bp, Homo sapiens
cgctaaacagcagctgaaggtcaggcgaactgactcgctgcggaatctgcctttgcacgtgatcagtcggacgtctacacccgcagccgtcttctgtctccgcctcaccctcaggcctgacggtccgagtggagctgcgggacagcccgaacctccaggtcagccccgcggccctccatggcgctggtgcgcgcactcgtctgctgcctgctgactgcctggyactgccgctccggcctcgggctgcccgtggcgcccgcaggcggcaggaatcctcctccggcgataggacagttttggcatgtgactgacttacacttagaccctacttaccacatcacagatgaccacacaaaagtgtgtgcttcatctaaaggtgcaaatgcctccaaccctggcccttttggagatgttctgtgtgattctccatatcaacttattttgtcagcatttgattttattaaaaattctggacaagaagcatctttcatgatatggacaggggatagcccacctcatgttcctgtacctgaactctcaacagacactgttataaatgtgatcactaatatgacaaccaccatccagagtctctttccaaatctccaggttttccctgcgctgggtaatcatgactattggccacaggatcaactgyctgtagtcaccagtaaagtgtacaatgcagtagcaaacctctggaaaccatggctagatgaagaagctattagtactttaaggaaaggtggtttttattcacagaaagttacaactaatccaaaccttaggatcatcagtctaaacacaaacttgtactacggcccaaatataatgacactgaacaagactgacccagccaaccagtttgaatggctagamagtacattgaacaactctcagcagaataaggagaaggtgtatatcatagcacatgttccagtggggtatctgccatcttcacagaacatcacagcaatgagagaatactataatgagaaaytgatagatatttttcaaaaatacagtgatgtcattgcaggacaattttatggacacactcacagagacagcattatggttctttcagataaaaaaggaagtccagtaaattctttgtttgtggctcctgctgttacaccagtgaagagtgttttagaaaaacagaccaacaatcctggtatcagactgtttcagtatgatcctcrtgattataaattattggatatgttgcagtattacttgaatctgacagaggcgaatctaaagggagagtccatctggaagctggagtatatcctgacccagacctacgacattgaagatttgcagccggaaagtttatatggattagctaaacaatttacaatcctagacagtaagcagtttataaaatactacaattacttctttgtgagttatgacagcagtgtaacatgtgataagacatgtaaggcctttcagatttgtgcaattatgaatcttgataatatttcctatgcagattgcctcaaacagctttatataaagcacaawtactagtatttcacagtttttgctaatagaaaatgctgattctgattctgagatcaatttgtgggaattttacataaatctttgttaattactgagtgggcaagtagacttcctgtctttgctttctttttttttttctttttgatgccttaatgtagatatctttatcattctgaattgtattatatatttaaartgctcattaatagaatgatggatgtaaattggatgtaaatattcagtttatataattatatctaatttgtacccttgttgaaattgtcatttatacaataaagcgaattctttatctctaaatatgatgaagttttcttaacatgataatttttagttaaaatctgtgtattaactgaggtccaaattgtttacctctcatatgtaaacagatgttaccactgtttacatgcactatctactcttgggaaaataccatggtcattaggagcatgctgaaacatcacagggcatgtattgcctagctttcttcattctgagtctttggcattgctaacttttaaggatgagaatgtcacacatacttattgtatctgcagtactagcacaaggcctgggtcctagtccagtgcctggcacctagtaaataattgttgaaatgaattgaaagctgtgaatatttttcaaagaaacgtcctagattacagtggtggcattttctttgtcacagtattccaggatagg

SEQ ID NO: 2292 - DNA, 2340 bp, Homo sapiens
cgctaaacagcagctgaaggtcaggcgaactgactcgctgcggaatctgcctttgcacgtgatcagtcggacgtctacacccgcagccgtcttctgtctccgcctcaccctcaggcctgacggtccgagtggagctgcgggacagcccgaacctccaggtcagccccgcggccctccatggcgctggtgcgcgcactcgtctgctgcctgctgactgcctggyactgccgctccggcctcgggctgcccgtggcgcccgcaggcggcaggaatcctcctccggcgataggacagttttggcatgtgactgacttacacttagaccctacttaccacatcacagatgaccacacaaaagtgtgtgcttcatctaaaggtgcaaatgcctccaaccctggcccttttggagatgttctgtgtgattctccatatcaacttattttgtcagcatttgattttattaaaaattctggacaagaagcatctttcatgatatggacaggggatagcccacctcatgttcctgtacctgaactctcaacagacactgttataaatgtgatcactaatatgacaaccaccatccagagtctctttccaaatctccaggttttccctgcgctgggtaatcatgactattggccacaggatcaactgyctgtagtcaccagtaaagtgtacaatgcagtagcaaacctctggaaaccatggctagatgaagaagctattagtactttaaggaaaggtggtttttattcacagaaagttacaactaatccaaaccttaggatcatcagtctaaacacaaacttgtactacggcccaaatataatgacactgaacaagactgacccagccaaccagtttgaatggctagamagtacattgaacaactctcagcagaataaggagaaggtgtatatcatagcacatgttccagtggggtatctgccatcttcacagaacatcacagcaatgagagaatactataatgagaaaytgatagatatttttcaaaaatacagtgatgtcattgcaggacaattttatggacacactcacagagacagcattatggttctttcagataaaaaaggaagtccagtaaattctttgtttgtggctcctgctgttacaccagtgaagagtgttttagaaaaacagaccaacaatcctggtatcagactgtttcagtatgatcctcrtgattataaattattggatatgttgcagtattacttgaatctgacagaggcgaatctaaagggagagtccatctggaagctggagtatatcctgacccagacctacgacattgaagatttgcagccggaaagtttatatggattagctaaacaatttacaatcctagacagtaagcagtttataaaatactacaattacttctttgtgagttatgacagcagtgtaacatgtgataagacatgtaaggcctttcagatttgtgcaattatgaatcttgataatatttcctatgcagattgcctcaaacagctttatataaagcacaawtactagtatttcacagtttttgctaatagaaaatgctgattctgattctgagatcaatttgtgggaattttacataaatctttgttaattactgagtgggcaagtagacttcctgtctttgctttctttttttttttctttttgatgccttaatgtagatatctttatcattctgaattgtattatatatttaaartgctcattaatagaatgatggatgtaaattggatgtaaatattcagtttatataattatatctaatttgtacccttgttgaaattgtcatttatacaataaagcgaattctttatctctaaatatgatgaagttttcttaacatgataatttttagttaaaatctgtgtattaactgaggtccaaattgtttacctctcatatgtaaacagatgttaccactgtttacatgcactatctactcttgggaaaataccatggtcattaggagcatgctgaaacatcacagggcatgtattgcctagctttcttcattctgagtctttggcattgctaacttttaaggatgagaatgtcacacatacttattgtatctgcagtactagcacaaggcctgggtcctagtccagtgcctggcacctagtaaataattgttgaaatgaattgaaagctgtgaatatttttcaaagaaacgtcctagattacagtggtggcattttctttgtcacagtattccaggataggctgttttctgctttcaggttaagtaggagaattaaagtagaaatggaagggagagtgggagggactgggggatttaaaggaagagaa

SEQ ID NO: 2293 - DNA, 3020 bp, Homo sapiens
ccgcaggggcctgccccgcccttctcgggccctttcaggtcccggcgcccagcgatcccaccagcacctgggtccggcgcgcggctccctccctctccgcgcccctcggggctccctgccccgcccgcgtgccccacccttcctagctctgccccatcgctgctccctgccccgcccacgggccccatcctacccccacctcgatccgyccctcgctcctccctgccccgcccaccgcgccccgtccctgtccgccccktctggctctcagcacccccaagaccggtgcgcgccccgcccctcctcctcctctcgcgaggcagtcccgacgccggaagtgcctggagcgcgcgacagcggcggggcggggcgggcggcctggaggctgtggcgcgcggccggcagagggaggggagaggccactggggccgtgttagtctgccggtggggactcttgcagggccgtccccatgttgcgttttccgacctgtttcccatccttccgggtggtgggagagaagcagctcccgcaggagattattttcctggtctggtcgcccaagcgggatctcattgctttggccaacacagctggcgaggttttacttcatcgactggcaagttttcatcgagtttggagttttccaccaaatgaaaatacaggaaaggaggtgacgtgtctggcatggagaccagatggcaaacttttggcctttgctcttgctgataccaagaaaattgttttgtgtgatgtagaaaaacctgagagcttacactctttttctgtggaggctccagtttcctgtatgcattggatggaagtgacagtagaaagcagtgttctcacatcattttataatgctgaggatgaatcaaatcttctcttacctaaactacctacactgccaaaaaactatagcaacacctcaaaaatatttagtgaagaaaattctgatgaaattattaagctcttgggagacgtcaggcttaatattctcgtccttggaggaagctctggatttattgagctttatgcttatggaatgtttaaaattgctcgagtcacagggattgctggtacttgtcttgcattatgtttatcaagtgatttgaaatcattatcagtggtcacagaagtctctaccaatggtgcttcagaagtttcatactttcagcttgaaactaatctgttgtactctttcttacctgaagtaactcggatggccagaaagtttactcatatttcagctctgttacagtatataaatttgtcactaacatgtatgtgtgaagcatgggaagaaatactaatgcagatggattctcgtctcaccaagtttgtgcaggaaaagaacacaaccacatcagtgcaagatgagttcatgcacttgctattatgggggaaagcaagtgctgaacttcagactctcttgatgaatcagttaacagtaaagggcttgaaaaagcttggccagtctatagagtcatcatactccagtatacaaaaattggtcataagtcatttacagagtggctcrgagtctttattataccrtttgagtgaattgaaaggaatggcttcatggaagcaaaaatatgaacctcttggactagatgctgcaggaatcgaagaagctataactgctgtgggttcttttatactcaaggcaaatgaacttcttcaagttatagatagtagtatgaaaaacttcaaagcattttttcggtggctttatgtggcaatgttgagaatgacagaagaccatgtgcttcccgagctgaataagatgactcagaaagatatcacatttgttgctgaatttcttactgaacatttcaatgaggctccagacctttataatcraaaaggaaaatactttaacgttgaaagagttggtcagtacttgaaagatgaagatgatgatcttgtgtcaccccctaacacagaaggaaaccagtggtatgactttcttcaaaatagcagccaccttaaagaaagtcctttgctgtttccttattatcctcgaaaatcattgcattttgtgaaaaggcggatggagaatattattgatcagtgtttgcaaaagccagcagatgtaattggaaaatcgatgaatcaagcaatctgtattccattgtatagagataccagaagtgaggattctacacgtagattgttcaaatttccttttctgtggaataataaaacttcaaatctacattatcttctttttactattctagaagattcactttataaaatgtgcatcttaaggagacatactgatatttctcaatctgtgagtaatggactaatwgctattaaatttgggagctttacatatgccacaacagaaaaagtcagaagaagcatctacagttgtttagatgcacagttttatgatgatgaaactgtaacagtagttcttaaagacactgtaggacgtgaaggaagagatagactcttggtccagctgcctttgtctttagtatataacagtgaagattctgcagaatatcagttcactgggacttattctacaaggctagatgaacagtgtagtgctattcccacccgtaccatgcatttygagaagcactggagattactggaaagtatgaaagcacagtatgttgctgggaatggttttcgaaaagtgtcctgtgtgttaagctcaaatcttcgtcatgtgagagtatttgaaatggacatagatgatgaatgggagctcgatgagtcttcagatgaagaggaggaggccagtaataagcctgtaaaaataaaggaagaagtgttgtckgagtcagaggcagagaaccaacaagctggtgctgccgctttagctccagagatagtcattaaagtggaaaaacttgaccctgagctagactcctaatctagcttgccattattgtgtgtgtaattatggccaaaaggacataggagatggactaagatgtcttggaccacctttgtgtaacaaagaaataaacagtaaattttattttttcatattctg

SEQ ID NO: 2294 - DNA, 2044 bp, Homo sapiens
cccatcctacccccacctcgatccgyccctcgctcctccctgccccgcccaccgcgccccgtccctgtccgccccktctggctctcagcacccccaagaccggtgcgcgccccgcccctcctcctcctctcgcgaggcagtcccgacgccggaagtgcctggagcgcgcgacagcggcggggcggggcgggcggcctggaggctgtggcgcgcggccggcagagggaggggagaggccactggggccgtgttagtctgccggtggggactcttgcagggccgtccccatgttgcgttttccgacctgtttcccatccttccgggtggtgggagagaagcagctcccgcaggagattattttcctggtctggtcgcccaagcgggatctcattgctttggccaacacagctggcgaggttttacttcatcgactggcaagttttcatcgagtttggagttttccaccaaatgaaaatacaggaaaggaggtgacgtgtctggcatggagaccagatggcaaacttttggcctttgctcttgctgataccaagaaaattgttttgtgtgatgtagaaaaacctgagagcttacactctttttctgtggaggctccagtttcctgtatgcattggatggaagtgacagtagaaagcagtgttctcacatcattttataatgctgaggatgaatcaaatcttctcttacctaaactacctacactgccaaaaaactatagcaacacctcaaaaatatttagtgaagaaaattctgatgaaattattaagctcttgggagacgtcaggcttaatattctcgtccttggaggaagctctggatttattgagctttatgcttatggaatgtttaaaattgctcgagtcacagggattgctggtacttgtcttgcattatgtttatcaagtgatttgaaatcattatcagtggtcacagaagtctctaccaatggtgcttcagaagtttcatactttcagcttgaaactaatctgttgtactctttcttacctgaagtaactcggatggccagaaagtttactcatatttcagctctgttacagtatataaatttgtcactaacatgtatgtgtgaagcatgggaagaaatactaatgcagatggattctcgtctcaccaagtttgtgcaggaaaagaacacaaccacatcagtgcaagatgagttcatgcacttgctattatgggggaaagcaagtgctgaacttcagactctcttgatgaatcagttaacagtaaagggcttgaaaaagcttggccagtctatagagtcatcatactccagtatacaaaaattggtcataagtcatttacagagtggctcrgagtctttattataccrtttgagtgaattgaaaggaatggcttcatggaagcaaaaatatgaacctcttggactagatgctgcaggaatcgaagaagctataactgctgtgggttcttttatactcaaggcaaatgaacttcttcaagttatagatagtagtatgaaaaacttcaaagcattttttcggtggctttatgtggcaatgttgagaatgacagaagaccatgtgcttcccgagctgaataaggtaatgactcagaaagatatcacatttgttgctgaatttcttactgaacatttcaatgaggctccagacctttataatcraaaaggaaaatactttaacgttgaaagagttggtcagtacttgaaagatgaagatgatgatcttgtgtcaccccctaacacagaaggaaaccagtggtatgactttcttcaaaatagcagccaccttaaagaaagtcctttgctgtttccttattatcctcgaaaatcattgcattttgtgaaaaggcggatggagaatattattgatcagtgtttgcaaaagccagcagtaagtttgaaagaaatgcatgtctttgtgtaggagcaatagtgtctacagtatgtggctcacttatgtaaatgatcttaatttttagaatgaactatgaaaatgttgatagtcaactgtttttgattaac

SEQ ID NO: 2295 - DNA, 2560 bp, Homo sapiens
ggccgtccccatgttgcgttttccgacctgtttcccatccttccgggtggtgggagagaagcagctcccgcaggagattattttcctggtctggtcgcccaagcgggatctcattgctttggccaacacagctggcgaggttttacttcatcgactggcaagttttcatcgagtttggagttttccaccaaatgaaaatacaggaaaggaggtgacgtgtctggcatggagaccagatggcaaacttttggcctttgctcttgctgataccaagaaaattgttttgtgtgatgtagaaaaacctgagagcttacactctttttctgtggaggctccagtttcctgtatgcattggatggaagtgacagtagaaagcagtgttctcacatcattttataatgctgaggatgaatcaaatcttctcttacctaaactacctacactgccaaaaaactatagcaacacctcaaaaatatttagtgaagaaaattctgatgaaattattaagctcttgggagacgtcaggcttaatattctcgtccttggaggaagctctggatttattgagctttatgcttatggaatgtttaaaattgctcgagtcacagggattgctggtacttgtcttgcattatgtttatcaagtgatttgaaatcattatcagtggtcacagaagtctctaccaatggtgcttcagaagtttcatactttcagcttgaaactaatctgttgtactctttcttacctgaagtaactcggatggccagaaagtttactcatatttcagctctgttacagtatataaatttgtcactaacatgtatgtgtgaagcatgggaagaaatactaatgcagatggattctcgtctcaccaagtttgtgcaggaaaagaacacaaccacatcagtgcaagatgagttcatgcacttgctattatgggggaaagcaagtgctgaacttcagactctcttgatgaatcagttaacagtaaagggcttgaaaaagcttggccagtctatagagtcatcatactccagtatacaaaaattggtcataagtcatttacagagtggctcrgagtctttattataccrtttgagtgaattgaaaggaatggcttcatggaagcaaaaatatgaacctcttggactagatgctgcaggaatcgaagaagctataactgctgtgggttcttttatactcaaggcaaatgaacttcttcaagttatagatagtagtatgaaaaacttcaaagcattttttcggtggctttatgtggcaatgttgagaatgacagaagaccatgtgcttcccgagctgaataagatgactcagaaagatatcacatttgttgctgaatttcttactgaacatttcaatgaggctccagacctttataatcraaaaggaaaatactttaacgttgaaagagttggtcagtacttgaaagatgaagatgatgatcttgtgtcaccccctaacacagaaggaaaccagtggtatgactttcttcaaaatagcagccaccttaaagaaagtcctttgctgtttccttattatcctcgaaaatcattgcattttgtgaaaaggcggatggagaatattattgatcagtgtttgcaaaagccagcagatgtaattggaaaatcgatgaatcaagcaatctgtattccattgtatagagataccagaagtgaggattctacacgtagattgttcaaatttccttttctgtggaataataaaacttcaaatctacattatcttctttttactattctagaagattcactttataaaatgtgcatcttaaggagacatactgatatttctcaatctgtgagtaatggactaatwgctattaaatttgggagctttacatatgccacaacagaaaaagtcagaagaagcatctacagttgtttagatgcacagttttatgatgatgaaactgtaacagtagttcttaaagacactgtaggacgtgaaggaagagatagactcttggtccagctgcctttgtctttagtatataacagtgaagattctgcagaatatcagttcactgggacttattctacaaggctagatgaacagtgtagtgctattcccacccgtaccatgcatttygagaagcactggagattactggaaagtatgaaagcacagtatgttgctgggaatggttttcgaaaagtgtcctgtgtgttaagctcaaatcttcgtcatgtgagagtatttgaaatggacatagatgatgaatgggagctcgatgagtcttcagatgaagaggaggaggccagtaataagcctgtaaaaataaaggaagaagtgttgtckgagtcagaggcagagaaccaacaagctggtgctgccgctttagctccagagatagtcattaaagtggaaaaacttgaccctgagctagactcctaatctagcttgccattattgtgtgtgtaattatggccaaaaggacataggagatggactaagatgtcttggaccacctttgtgtaacaaagaaataaacagtaaattttattttttcatattctg

SEQ ID NO: 2296 - DNA, 2837 bp, Homo sapiens
cccatcctacccccacctcgatccgyccctcgctcctccctgccccgcccaccgcgccccgtccctgtccgccccktctggctctcagcacccccaagaccggtgcgcgccccgcccctcctcctcctctcgcgaggcagtcccgacgccggaagtgcctggagcgcgcgacagcggcggggcggggcgggcggcctggaggctgtggcgcgcggccggcagagggaggggagaggccactggggccgtgttagtctgccggtggggactcttgcagggccgtccccatgttgcgttttccgacctgtttcccatccttccgggtggtgggagagaagcagctcccgcaggagattattttcctggtctggtcgcccaagcgggatctcattgctttggccaacacagctggcgaggttttacttcatcgactggcaagttttcatcgagtttggagttttccaccaaatgaaaatacaggaaaggaggtgacgtgtctggcatggagaccagatggcaaacttttggcctttgctcttgctgataccaagaaaattgttttgtgtgatgtagaaaaacctgagagcttacactctttttctgtggaggctccagtttcctgtatgcattggatggaagtgacagtagaaagcagtgttctcacatcattttataatgctgaggatgaatcaaatcttctcttacctaaactacctacactgccaaaaaactatagcaacacctcaaaaatatttagtgaagaaaattctgatgaaattattaagctcttgggagacgtcaggcttaatattctcgtccttggaggaagctctggatttattgagctttatgcttatggaatgtttaaaattgctcgagtcacagggattgctggtacttgtcttgcattatgtttatcaagtgatttgaaatcattatcagtggtcacagaagtctctaccaatggtgcttcagaagtttcatactttcagcttgaaactaatctgttgtactctttcttacctgaagtaactcggatggccagaaagtttactcatatttcagctctgttacagtatataaatttgtcactaacatgtatgtgtgaagcatgggaagaaatactaatgcagatggattctcgtctcaccaagtttgtgcaggaaaagaacacaaccacatcagtgcaagatgagttcatgcacttgctattatgggggaaagcaagtgctgaacttcagactctcttgatgaatcagttaacagtaaagggcttgaaaaagcttggccagtctatagagtcatcatactccagtatacaaaaattggtcataagtcatttacagagtggctcrgagtctttattataccrtttgagtgaattgaaaggaatggcttcatggaagcaaaaatatgaacctcttggactagatgctgcaggaatcgaagaagctataactgctgtgggttcttttatactcaaggcaaatgaacttcttcaagttatagatagtagtatgaaaaacttcaaagcattttttcggtggctttatgtggcaatgttgagaatgacagaagaccatgtgcttcccgagctgaataagatgactcagaaagatatcacatttgttgctgaatttcttactgaacatttcaatgaggctccagacctttataatcraaaaggaaaatactttaacgttgaaagagttggtcagtacttgaaagatgaagatgatgatcttgtgtcaccccctaacacagaaggaaaccagtggtatgactttcttcaaaatagcagccaccttaaagaaagtcctttgctgtttccttattatcctcgaaaatcattgcattttgtgaaaaggcggatggagaatattattgatcagtgtttgcaaaagccagcagatgtaattggaaaatcgatgaatcaagcaatctgtattccattgtatagagataccagaagtgaggattctacacgtagattgttcaaatttccttttctgtggaataataaaacttcaaatctacattatcttctttttactattctagaagattcactttataaaatgtgcatcttaaggagacatactgatatttctcaatctgtgagtaatggactaatwgctattaaatttgggagctttacatatgccacaacagaaaaagtcagaagaagcatctacagttgtttagatgcacagttttatgatgatgaaactgtaacagtagttcttaaagacactgtaggacgtgaaggaagagatagactcttggtccagctgcctttgtctttagtatataacagtgaagattctgcagaatatcagttcactgggacttattctacaaggctagatgaacagtgtagtgctattcccacccgtaccatgcatttygagaagcactggagattactggaaagtatgaaagcacagtatgttgctgggaatggttttcgaaaagtgtcctgtgtgttaagctcaaatcttcgtcatgtgagagtatttgaaatggacatagatgatgaatgggagctcgatgagtcttcagatgaagaggaggaggccagtaataagcctgtaaaaataaaggaagaagtgttgtckgagtcagaggcagagaaccaacaagctggtgctgccgctttagctccagagatagtcattaaagtggaaaaacttgaccctgagctagactcctaatctagcttgccattattgtgtgtgtaattatggccaaaaggacataggagatggactaagatgtcttggaccacctttgtgtaacaaagaaataaacagtaaattttattttttcatattctg

SEQ ID NO: 2297 - DNA, 2371 bp, Homo sapiens
agagtaacaggcaggaagaaagctttctgtactacaccagagggttggggctgtggatttagctactctcacctgaggctactgagcaagttgtcatgcaccatgagacaaagcccaagctgtcccaccaggcagtaagtatggagaggttcaggcacatggcatagctgctatttcgcacaattttcactacaccagtggtgacaaaatagaagaggttcatccatacacagaacctggtgaagagctggaggcagaaagaagtgtctatgtggagacgcaactgaaacaaaggtggcacagcaactgttccaatcccgtgtctttcctcatggcttcccaggagtttgaggttgaagctattgttgacaaaagacaggataaaaatgggaatacacagtatttggttcggtggaaaggttatgacaaacaggatgacacttgggaaccagagcagcacctcatgaactgtgaaaaatgtgtacatgattttaatagacgacagactgaaaaacagaaaaaactgacatggactacaaccagtagaattttttcaaacaatgccagaagaagaacttccagatctacaaaagcaaactattctaagaactctcctaaaacgccagtgactgataaacaccacaggtccaaaaaccgcaagttatttgctgccagcaagaacgttaggagaaaggcagcttcaattctctccgacacaaagaatatggagataataaattcaactattgagacccttgcacctgacagcccctttgaccacaaaactgtgagtggctttcagaaacttgagaaactggaccctattgcagcagatcagcaggacacggtggtcttcaaggtgacagaagggaaactcctccgggaccctttgtcacgtcctggtgcagaacagactggaatacagaacaagactcagatrcacccactaatgtcgcagatgtctggctcagttactgcttctatggccacaggttcagctacccgaaagggtatagtggtattaatagacccattagcagccaatgggacaacagacatgcatacctcagttccaagagtgaaaggtgggcaaagaaatattactgatgacagcagagrccagccttttatcaagaagatgcacttcaccataaggctaacagaaagtgccakcacatacagagacattgtagtgaagaaagaggatggattcacccagatagtgctatcaactagatcgacagaaaaaaatgcactgaatacagaagtaattaaagaaatrgttaatgctctgaatagcgctgctgcagatgacagcaagctcgtgctgttcagtgcagctggaagtgtcttttgctgcggtcttgattttgggtactttgtgargcacttaaggaatracagaaacacagcaagccttgaaatggtggacaccatcaagaactttgtgaatacttttattcaatttaaaaagcctattgttgtatcagtcaatggccctgcsattggactaggtgcatccatcctgcctctttgtgatctcgtgtgggctaatgaaaaggcttggttccaaaccccttatacgacctttggacagagtccagatggctgttcttctattacattccccaaaatgatgggtaaagcatctgccaatgaaatgttaattgctgggcgaaagctgacagcamgggaggcatgcgccaaaggcctggtctctcaggtatttttgactggaactttcacccaagaggttatgattcaaattaaggagcttgcctcatacaatscaattgtactggaagaatgtaaggccctcgttcgctgtaatattaagttggagttggaacaggccaatgagagagagtgtgaggtgctgaggaagatctggagctcagcccaagggatagaatccatgttaaaaatacctctrttgggatataaagcagccttccctcccagaaagacacagaatgatcagagatggtgcccttgactttatagtggcacaaacrcttcagagacacacaattataagagacttatcttttagcataaatacttatggcwcaaaatccactgacgatcattctcctaaactgaacacatgactagaattggtggtgagatatcgcttgattttcttttcctttataaatgtctagttcttacccagttaacaaaagaaaactttatcgctctaaagtaaaacttgttacaccacattagtgaattatggaatgattttggtggaaatatccaggttctaatgtgtggaatgtgcagatttaggttactttagtgtatgttctagttaataagttaaaattctggacacattattaaaggcagaaacttctttcaaarcaaa

SEQ ID NO: 2298 - DNA, 1954 bp, Homo sapiens
agagtaacaggcaggaagaaagctttctgtactacaccagagggttggggctgtggatttagctactctcacctgaggctactgagcaagttgtcatgcaccatgagacaaagcccaagctgtcccaccaggcagtaagtatggagaggttcaggcacatggcatagctgctatttcgcacaattttcactacaccagtggtgacaaaatagaagaggttcatccatacacagaacctggtgaagagctggaggcagaaagaagtgtctatgtggagacgcaactgaaacaaaggtggcacagcaactgttccaatcccgtgtctttcctcatggcttcccaggagtttgaggttgaagctattgttgacaaaagacaggataaaaatgggaatacacagtatttggttcggtggaaaggttatgacaaacaggatgacacttgggaaccagagcagcacctcatgaactgtgaaaaatgtgtacatgattttaatagacgacagactgaaaaacagaaaaaactgacatggactacaaccagtagaattttttcaaacaatgccagaagaagaacttccagatctacaaaagcaaactattctaagaactctcctaaaacgccagtgactgataaacaccacaggtccaaaaaccgcaagttatttgctgccagcaagaacgttaggagaaaggcagcttcaattctctccgacacaaagaatatggagataataaattcaactattgagacccttgcacctgacagcccctttgaccacaaaactgtgagtggctttcagaaacttgagaaactggaccctattgcagcagatcagcaggacacggtggtcttcaaggtgacagaagggaaactcctccgggaccctttgtcacgtcctggtgcagaacagactggaatacagaacaagactcagatrcacccactaatgtcgcagatgtctggctcagttactgcttctatggccacaggttcagctacccgaaagggtatagtggtattaatagacccattagcagccaatgggacaacagacatgcatacctcagttccaagagtgaaaggtgggcaaagaaatattactgatgacagcagagrccagccttttatcaagaagatgcacttcaccataaggctaacagaaagtgccakcacatacagagacattgtagtgaagaaagaggatggattcacccagatagtgctatcaactagatcgacagaaaaaaatgcactgaatacagaagtaattaaagaaatrgttaatgctctgaatagcgctgctgcagatgacagcaagctcgtgctgttcagtgcagctggaagtgtcttttgctgcggtcttgattttgggtactttgtgargcacttaaggaatracagaaacacagcaagccttgaaatggtggacaccatcaagaactttgtgaatacttttattcaatttaaaaagcctattgttgtatcagtcaatggccctgcsattggactaggtgcatccatcctgcctctttgtgatctcgtgtgggctaatgaaaaggcttggttccaaaccccttatacgacctttggacagagtccagatggctgttcttctattacattccccaaaatgatgggtaaagcatctgccaatgaaatgttaattgctgggcgaaagctgacagcamgggaggcatgcgccaaaggcctggtctctcaggtatttttgactggaactttcacccaagaggttatgattcaaattaaggagcttgcctcatacaatscaattgtactggaagaatgtaaggccctcgttcgctgtaatattaagttggagttggaacaggccaatgagagagagtgtgaggtgctgaggaagatctggagctcagcccaagggatagaatccatgttaaagtatgttgaaaataaaattgatgagttttaa

SEQ ID NO: 2299 - DNA, 1928 bp, Homo sapiens
gtggtttctaacgctgaacttaaaaagtgttgagatgaataatgaagaggaccttctgcaggaggactcaacaagagatgaaggcaatgagactgaagccaacagcatgwacacattaagaaggacaaggaagaaagtcactaaaccatatgtttgttcaactgaagtggragaaacggatatgtccaattcaaatgattgcatgagggacagcagtcaaattttgaccccacctcaactctcttctagaatgaaacacattagacaagccatggccaaaaatcgcctccagtttgtacgatttgaagcaacagacctccacggcgtgtccaggtctaagactatccctgcacacttttttcaaragaaagtgagccatggtgtttgcatgccccgaggttatcttgaagtgataccaaatccaaaggacaatgaaatgaatmacataagagccacatgttttaatagcgacatagtcctaatgccagagttatcaacctttagagttttgccatgggctgacagaactgcaagagtgatatgtgataccttcactgtgactggtgagcctcttttgacttccccaaggtacattgcaaagaggcagctgagccatctgcaggcctctggcttttccctgctttctgctttcatctatgatttttgcatttttggtgtgcccgaaattttaaattcaaagattatatcttttcctgctttaacatttttaaataaccatgatcagcccttcatgcaggaacttgttgatggcttgtatcacactggagccaatgtcgagagtttttcctcctctaccaggcctggtcagatggaaatctctytcctgcctgaatttggcattagctcagctgataatgcatttacyctcagaacaggtgtcaaagaagtggcaaggaaatataattacattgccagcttcttcattgagactggattttgtgattcagggattttgtctcatagtctctgggatgtcgataggaagaaaaacatgttctgcagcacttctggaactgagcagctcacgatcactgggaaaaaatggttggcaggwctcttgaagcactctgctgcgctcagctgcctgatggcgccttctgttagctgccgaaagcgttattccaaggacaggaaagacctgaagaagagtgtgcctacaacatggggatacaatgacaacagctgtatatttaatatcaaatgtcatggagagaaaggcacccggatagaaaataaactaggctcagcaacagcaaacccttacttggtgctggctgcaactgttgctgccggcttagatggacttcatagcagtaatgaggtcttggctggtccagrtgagagcacagacttttaccaagtggaaccttctgaratccctttaaaactagaagatgcccttgtggcactggaagaagatcaatgcctgagacaggctctaggagaaacctttattcgatattttgttgccatgaagaaatatgagttggagaatgaagaaatagctgcagagagaaataaattcttagagtattttatttagaatagagctcacaactactcctttagacatgtaattgttacttaaagmtaatctaccaaaacaaaaagactgaacttttgtaattaacaacagcaacaataacaagattacgaatgcttttgacttttttttttgtccatggaatatttgacagatgaagtaggactgctgagaagattctgataacagaaacaaacaacaaagttgtggtgaagctataatatgcaaacttaccagatcttgtcagtcatttcctatgtgtatgttgacctggataagaatatccaattttgggtggcaataaatatattcgcacattaagaaaaaaaagacttaagcattagaaagcaaaatttaaatgact

SEQ ID NO: 2300 - DNA, 6767 bp, Homo sapiens
catggatcctttggattttgattccagttgatccctggagtaaggtcctaaccggggtctcccgaggtcgtttcgccgtccaggatggagcaggcggggagctcgcaccgccgcgcccgggccgcgagtgatgataacctaagaggccggcgcgggcgggcgtgagcggcggaggagccgggcgcggcgacacgcggccatggagcgggagccggcggggaccgaggagcccgggcctccgggacggcggaggcgccgagagggcaggacgcgcacggtgcgctccaacctgctgccgcccccgggcgccgaggaccctgcggctggcgcggccaagggcgagcggcgacggcggcgcgggtgtgcccagcacctggccgacaaccggctcaagactaccaagtacacgctgctgtccttcctgcccaagaacctgttcgagcagttccaccgcccggccaacgtgtactttgtcttcatcgcgctgctcaacttcgtgccggcggtgaacgccttccagcccggcctggcactggcgccggtgctcttcatcctggccatcacggccttcagggacctgtgggaggactacagccgccaccgctccgaccacaagatcaaccacctgggctgcctggtcttcagcagggaagaaaagaaatacgtgaaccgattctggaaagaaatccacgtgggagactttgtgcgtcttcgctgcaacgaaatcttccctgcggacattctgctgctctcctccagtgaccccgacgggctatgccacatcgagaccgccaacctggatggagagaccaacctgaagcggcggcaggtggtccgcggcttctcggagcttgtctccgaattcaatcctttgacgttcaccagcgtgatcgaatgcgagaagccaaacaacgacctgagtaggtttcgcggctgcatcatacatgacaacgggaaaaaggccgggctgtataaagaaaacctgctgctgaggggctgcacccttaggaacacggacgcagtcgtcggcattgtcatctacgcaggacatgaaaccaaggctctgctgaacaacagtgggccccgctacaagcgcagcaagctggagaggcagatgaactgcgacgtgctctggtgtgtcctgctccttgtttgcatgtctctgttttcagcagtcggacatggactgtggatatggcggtatcaagagaagaagtcattattttatgtccccaagtctgatggaagctccttatccccagtcacagctgcagtttactcatttttaacaatgataatagttctgcaggttttgatcccaatttccttatacgtttccattgaaattgttaaagcatgccaagtgtacttcattaaccaggacatgcagttgtatgacgaagaaacagactcgcagctgcagtgccgagctctgaacatcacggaagacttaggacagatacagtacattttctcagataaaactggcactttgacagagaataagatggttttccgaagatgcactgtgtctggtgtagaatattctcatgatgcaaatgcgcagcgtctggccaggtaccaagaggcagactcggaggaggaggaggtggtgcccagagggggctcggtgtcccagcgcggcagcatcggcagccaccagagtgtccgggtggtgcacagaacccagagcaccaagtcccaccggcgcacgggcagccgggccgaggccaagagggccagcatgctgtccaagcacacggccttcagcagccccatggagaaggatatcaygcccgacccaaagctgctggagaaggtgagtgagtgtgacaagagcctagccgtggcgaggcatcaggagcacctgctggcccacctctcgcccgagctgtctgacgtctttgatttcttcatcgcactcaccatctgcaacacagtcgtcgtcacgtccccggatcagccacgaacaaaggtgagggtgaggtttgagctgaagtccccggtgaagacgatagaagacttcctgcggaggttcacacccagctgcctgacctcaggctgcagcagcatcgggagcctggccgccaacaagtccagccacaagttgggctccagcttcccgtccaccccgtccagcgacggcatgcttctcaggctggaggagaggctgggccagcccacctcggccatcgccagcaacggctacagcagccaggcggacaactgggcctcggagcttgctcaggagcaggagtcagagcgcgagctgcggtacgaggcggagagcccggatgaggccgcactggtgtatgcggccagagcctacaactgcgtgcttgtggagcggctgcacgaccaagtgtcagtggagctgccccacctgggcaggctcaccttcgagctcctgcacacactgggtttcgattccgtccgcaagaggatgtcagtggtgatccggcacccgcttaccgatgagatcaacgtctacaccaagggggccgactcagtggtcatggatctcctgcagccctgctcttcagttgacrccagagggaggcatcaaaaaaagattcggagcaaaactcagaattacctcaacgtgtatgcggcggaaggcctgcgcaccttgtgcatcgccaagagagttctgagtaaagaagagtatgcctgctggttgcaaagccacctagaagccgaatcctccctggaaaacagcgaggagctcctcttccagtctgccattcgcctggagaccaacctgcacttgttaggtgccactgggattgaagaccgcctgcaggacggagtccctgaaactatttctaaattgcgtcaagcgggcctgcagatttgggttctcactggtgacaaacaagaaacagctgtcaacattgcatatgcctgcaaactgctggaccacgacgaggaggtcatcaccctgaatgccacctcccaggaggcgtgtgcagccctgctagaccagtgcctatgctacgtgcagtccagaggcctccagagagcccctgagaagaccaagggcaaagtgagcatgaggttctcctctctctgcccaccctccacgtccactgcctctggccgcagacccagcctcgtgatcgatgggagaagcctggcctacgctctcgagaaaaacctggaggacaaattcctcttccttgccaagcagtgccgctccgtcctctgctgtcggtcgacgcctctgcagaagagcatggtggtgaagctggtgcggagcaagctcaaggccatgaccctggccataggtgatggagccaatgatgtcagcatgatccaggtggcagatgtgggtgtgggaatctccggccaggagggtatgcaggcagtgatggccagcgactttgcagtgccgaaattccgatacctggagaggctcttgattcttcacgggcattggtgctactcccgacttgccaacatggtgctgtacttcttctacaaaaacacaatgttcgtgggcctcctgttttggttccagtttttctgtggcttctstgcatctaccatgattgaccagtggtatctaatcttctttaatctgctcttctcgtcacttcccccgctcgtgactggggtgctggacagggatgtgccagccaatgtgctgctgaccaacccgcagctctacaagagtggccagaacatggaggaataccggccacgaacsttctgstttaacatggcygacgccrccttccagagcctggtttgcttttccrttccttacctggcctactatgactcgaacrtggacctgtttacctgggggacccctattgtgacaatcgcgctgctcactttcctgctccacctgggcattgaaaccaaaacctggacctggctcaactggataacgtgtggcttcagtgtccttttgtttttcaccgtggctttgatttacaatgcgtcttgtgccacgtgctatcctccgtccaacccttactggactatgcaagccttactgggtgacccagtgttttacttgacttgcctgatgacgcctgtcgctgcactgctgcccagattgtttttcagatccctccaggggagsgttttccccacacaacttcagctggcacgtcagttgaccaggaagtcccccaggagatgcagtgctcccaaagagacctttgctcagggacgcctcccgaaggactcgggaaccgagcactcatcagggaggacagtcaagacctctgtgcccctgtcccagccttcttggcacacacagcagccggtctgctccctggaggccagcggggagcccagcacagtggacatgagcatgccagtgagggagcacaccctgctggaggggctgagcgcaccggcccccatgtsctctgcgccaggggaggctgtcctgaggagtccaggagggtgtcctgaggagtccaaggtgagagctgccagcaccggcagggtgacccccctgtcttccctcttcagcctgcctaccttcagcttactcaactggatttcctcctggtcgctggtcagcaggctggggagtgtcttacagttctcccggacggagcagcttgcagatggacaagcgggacgtggacttcctgtccagccccactcaggccgatcaggacttcargggccagaccacagactacttataggagcatcttcaaggcggtcacagtgaaaaccttgaaatggccttttttaatatatataaataaatgttaatattatttatgtttattatttgcacagaagagttmtagggagatgtatttctaaatgtttcccaggctaatacaggaaacaagaggtaccaaaaaagaaagtttattttttaaaattctaagtagagtatattgaaaagaaaaagaagagccttaacatatataaaagtttaaagaagagtaacacttgaaaagtgtgtttagatttattttttcatctcatttttaagaacaagcagtacgatttgttttcttcaacatgtgtgactgcgcactgagtacaaatgtgtgactgctcatggttaatgcaggcaggtgtgaacatgggggaacaatgagcagagatggcagagggcagagcacatggcccccagaggcttccagtctcactgacacaggagggctgggctccacttcatccagatgaaggaaaggaagacctcaagaaaaattcacagttgagtgcatcccagcattctgttccgggcaggcatttcaggaagaccgccttgtaggtattacatccctggtgtcgtattttgcctgttaaatcgtaacaagcaataaacaactttcactttgcaaagacagtgtgtccagttaccactggtgtatgaaatgattaatacctgacctcacagagtatgatctsagggcacttccgtaaggcaagtccttttagaggctatgaagaaaacagctgcatggcacataccaaagctgctgcacagcyggccaccatggcaccctgcaccaggccatcagcaccacgtgccaaggagctcagcggtcttcaggcatttttgtaatgagccattagttctgtccctctaaaactagaaaaggaagggcaggaaatgataacaacccaaggcaatgatatggcatgtcatcttcygagcccttctttctactttgtcaaacagttcttagttgctggctctgctcggcaccgggrctgtgaagggtgtactccctgctgtgtgggagggacctagggcctctttggatgctgtcttcgaggacagcaatgcagagagggcataggatctgaggacaaggaaattcctcagcatggcgtatcaggaaagcatggctcattctgcaatgagccatgagtgtgggccatcgcaagtcacagaaaatgcacctcattccagtcaagcagaaaaacaggcacaggctcagtgtaggtcccaagagagggtgcctggactcagcaactcrgacctgggcttttctcccagctttcagggacagctttgtcctgagtctgcctctgttcacggggatgcttggctggagtcacccccaggacttatccatgcatcactattcagaagacacagagggcccctctctccacattccaaacagagtcctggtttcctcagcctcaccctgcatagcttgcacaacatcctcagaaccattcactggcaaatggaggggaacgtgctgactgggactcccagctggagctgggaggagaggtccacttcccttagaacacctgagctgctgcatgagtggacgtcagaagaatctctatgccctgttaaatggggagacaaaggggtggtgggggcttcagccagtgatttcggaccgaaggtgacagccgtcccaaccctgcccagcctgatgccacctcctctgttcttggaacaacgcataggaaaagaatctcctttggaaggtgacactgctccctgaattaaggtaatkgttgcgagcaccaagtacaaggactagacgcatatttacctgcgtatctgagagttccagattyccagcttccagatgatccttgcacagacaacctaccttctttccagaggatgtctttctcctctggagagtagatgcttgctcttgggaaacggaatgaccttggcgctggcttcaggaatatgcatcccacagccagtttagagaaatacatgttgtaaatggcattgacagctgctctttaggatggggagtattatggaaatccacaataacaatctatggcaagcaact

SEQ ID NO: 2301 - DNA, 1323 bp, Homo sapiens
atgcrcaagaggactgtctgccttcatggatgtgccactggaagttactgtctccaaaaatggagtaaaactgcggtggtgacgggcacacattcgagatgtccttccagccgtgttcactcggccgtgggaggtgaaggccgaggtgtggaggcagacctgtggctgctggctgggstggcaggcacccaggaaccctgtgtcctccgggccctgtgtggtcagccctggcccaccctgatgccgtgtgctggcgtggcacctctctgcccccagccacaacgccagcttccccgcctgggcacgaccttgcctgcatggcctgtgctcagccctcagctctccttctccccacacttctccctggtgctctcagtgatgacatccacagtgggggctgctgtcacctctgtgcttaagacccccaaatatttctgtctccatctgcctgtcttcaaagctggagacacctccggagascggaccccgcacagccccaccagcttcttgaactcaaagttggtcactgttggactctgtcccttctccaagcagaccctgcccctgggcgaggtgggtggtgcccccattccagccaccagggccagagaactggatgcccattcaacgaygtcctcttcagcagcacagccagacttccccagccagccgttcttcctgtctctagaggtccgtgctgataaaagcctcaagaagggcgtggttgagtggctggtattaagagtgttgtgccagtgggctcgatttctgtcttgggggtatgtagaacctgtgcatggggataaattgcagggagcccagcagacgctcatgagaaggaagaaggacaaaaaagcttgtaatgacatgaagtcaaggcttgacctttggaaaaggaaggaagaaaagaaatacgtgaaccgattctggaaagaaatccacgtgggagactttgtgcgtcttcgctgcaacgaaatcttccctgcggacattctgctgctctcctccagtgaccccgacgggctatgccacatcgagaccgccaacctggatggagagaccaacctgaagcggcggcaggtggtccgcggcttctcggagcttggtgtttgggttcagcgcgaggtcttcgtagctgaatcctgcctctggtgtgccctggccaccgtgcagcagggtgagggacagtgccctcccccatcggcctcggcaccagcccatcgggcttccctggggcagtgggctctgctgtctgwggacctcagcgagggcactgtagggagtggggcgatgcccccggtcaccgtcacagggggagatgcc

SEQ ID NO: 2302 - DNA, 6634 bp, Homo sapiens
aggataaggagacctctcaccttggggctgggcctgaaccagggaggggctgaagaaaatcagcaagctggttcccctcagggcctcaagggacctctgcctgaggaatcagcatttggctttgtaagcaccaggagtactcctggaagctccagggcggggagctcgcaccgccgcgcccgggccgcgagtgatgataacctaagaggccggcgcgggcgggcgtgagcggcggaggagccgggcgcggcgacacgcggccatggagcgggagccggcggggaccgaggagcccgggcctccgggacggcggaggcgccgagagggcaggacgcgcacggtgcgctccaacctgctgccgcccccgggcgccgaggaccctgcggctggcgcggccaagggcgagcggcgacggcggcgcgggtgtgcccagcacctggccgacaaccggctcaagactaccaagtacacgctgctgtccttcctgcccaagaacctgttcgagcagttccaccgcccggccaacgtgtactttgtcttcatcgcgctgctcaacttcgtgccggcggtgaacgccttccagcccggcctggcactggcgccggtgctcttcatcctggccatcacggccttcagggacctgtgggaggactacagccgccaccgctccgaccacaagatcaaccacctgggctgcctggtcttcagcagggaagaaaagaaatacgtgaaccgattctggaaagaaatccacgtgggagactttgtgcgtcttcgctgcaacgaaatcttccctgcggacattctgctgctctcctccagtgaccccgacgggctatgccacatcgagaccgccaacctggatggagagaccaacctgaagcggcggcaggtggtccgcggcttctcggagcttgtctccgaattcaatcctttgacgttcaccagcgtgatcgaatgcgagaagccaaacaacgacctgagtaggtttcgcggctgcatcatacatgacaacgggaaaaaggccgggctgtataaagaaaacctgctgctgaggggctgcacccttaggaacacggacgcagtcgtcggcattgtcatctacgcaggacatgaaaccaaggctctgctgaacaacagtgggccccgctacaagcgcagcaagctggagaggcagatgaactgcgacgtgctctggtgtgtcctgctccttgtttgcatgtctctgttttcagcagtcggacatggactgtggatatggcggtatcaagagaagaagtcattattttatgtccccaagtctgatggaagctccttatccccagtcacagctgcagtttactcatttttaacaatgataatagttctgcaggttttgatcccaatttccttatacgtttccattgaaattgttaaagcatgccaagtgtacttcattaaccaggacatgcagttgtatgacgaagaaacagactcgcagctgcagtgccgagctctgaacatcacggaagacttaggacagatacagtacattttctcagataaaactggcactttgacagagaataagatggttttccgaagatgcactgtgtctggtgtagaatattctcatgatgcaaatgcgcagcgtctggccaggtaccaagaggcagactcggaggaggaggaggtggtgcccagagggggctcggtgtcccagcgcggcagcatcggcagccaccagagtgtccgggtggtgcacagaacccagagcaccaagtcccaccggcgcacgggcagccgggccgaggccaagagggccagcatgctgtccaagcacacggccttcagcagccccatgggtgaggtttgagctgaagtccccggtgaagacgatagaagacttcctgcggaggttcacacccagctgcctgacctcaggctgcagcagcatcgggagcctggccgccaacaagtccagccacaagttgggctccagcttcccgtccaccccgtccagcgacggcatgcttctcaggctggaggagaggctgggccagcccacctcggccatcgccagcaacggctacagcagccaggcggacaactgggcctcggagcttgctcaggagcaggagtcagagcgcgagctgcggtacgaggcggagagcccggatgaggccgcactggtgtatgcggccagagcctacaactgcgtgcttgtggagcggctgcacgaccaagtgtcagtggagctgccccacctgggcaggctcaccttcgagctcctgcacacactgggtttcgattccgtccgcaagaggatgtcagtggtgatccggcacccgcttaccgatgagatcaacgtctacaccaagggggccgactcagtggtcatggatctcctgcagccctgctcttcagttgacrccagagggaggcatcaaaaaaagattcggagcaaaactcagaattacctcaacgtgtatgcggcggaaggcctgcgcaccttgtgcatcgccaagagagttctgagtaaagaagagtatgcctgctggttgcaaagccacctagaagccgaatcctccctggaaaacagcgaggagctcctcttccagtctgccattcgcctggagaccaacctgcacttgttaggtgccactgggattgaagaccgcctgcaggacggagtccctgaaactatttctaaattgcgtcaagcgggcctgcagatttgggttctcactggtgacaaacaagaaacagctgtcaacattgcatatgcctgcaaactgctggaccacgacgaggaggtcatcaccctgaatgccacctcccaggaggcgtgtgcagccctgctagaccagtgcctatgctacgtgcagtccagaggcctccagagagcccctgagaagaccaagggcaaagtgagcatgaggttctcctctctctgcccaccctccacgtccactgcctctggccgcagacccagcctcgtgatcgatgggagaagcctggcctacgctctcgagaaaaacctggaggacaaattcctcttccttgccaagcagtgccgctccgtcctctgctgtcggtcgacgcctctgcagaagagcatggtggtgaagctggtgcggagcaagctcaaggccatgaccctggccataggcaagtgatggagccaatgatgtcagcatgatccaggtggcagatgtgggtgtgggaatctccggccaggagggtatgcaggcagtgatggccagcgactttgcagtgccgaaattccgatacctggagaggctcttgattcttcacgggcattggtgctactcccgacttgccaacatggtgctgtacttcttctacaaaaacacaatgttcgtgggcctcctgttttggttccagtttttctgtggcttctstgcatctaccatgattgaccagtggtatctaatcttctttaatctgctcttctcgtcacttcccccgctcgtgactggggtgctggacagggatgtgccagccaatgtgctgctgaccaacccgcagctctacaagagtggccagaacatggaggaataccggccacgaacsttctgstttaacatggcygacgccrccttccagagcctggtttgcttttccrttccttacctggcctactatgactcgaacrtggacctgtttacctgggggacccctattgtgacaatcgcgctgctcactttcctgctccacctgggcattgaaaccaaaacctggacctggctcaactggataacgtgtggcttcagtgtccttttgtttttcaccgtggctttgatttacaatgcgtcttgtgccacgtgctatcctccgtccaacccttactggactatgcaagccttactgggtgacccagtgttttacttgacttgcctgatgacgcctgtcgctgcactgctgcccagattgtttttcagatccctccaggggagsgttttccccacacaacttcagctggcacgtcagttgaccaggaagtcccccaggagatgcagtgctcccaaagagacctttgctcagggacgcctcccgaaggactcgggaaccgagcactcatcagggaggacagtcaagacctctgtgcccctgtcccagccttcttggcacacacagcagccggtctgctccctggaggccagcggggagcccagcacagtggacatgagcatgccagtgagggagcacaccctgctggaggggctgagcgcaccggcccccatgtsctctgcgccaggggaggctgtcctgaggagtccaggagggtgtcctgaggagtccaaggtgagagctgccagcaccggcagggtgacccccctgtcttccctcttcagcctgcctaccttcagcttactcaactggatttcctcctggtcgctggtcagcaggctggggagtgtcttacagttctcccggacggagcagcttgcagatggacaagcgggacgtggacttcctgtccagccccactcaggccgatcaggacttcargggccagaccacagactacttataggagcatcttcaaggcggtcacagtgaaaaccttgaaatggccttttttaatatatataaataaatgttaatattatttatgtttattatttgcacagaagagttmtagggagatgtatttctaaatgtttcccaggctaatacaggaaacaagaggtaccaaaaaagaaagtttattttttaaaattctaagtagagtatattgaaaagaaaaagaagagccttaacatatataaaagtttaaagaagagtaacacttgaaaagtgtgtttagatttattttttcatctcatttttaagaacaagcagtacgatttgttttcttcaacatgtgtgactgcgcactgagtacaaatgtgtgactgctcatggttaatgcaggcaggtgtgaacatgggggaacaatgagcagagatggcagagggcagagcacatggcccccagaggcttccagtctcactgacacaggagggctgggctccacttcatccagatgaaggaaaggaagacctcaagaaaaattcacagttgagtgcatcccagcattctgttccgggcaggcatttcaggaagaccgccttgtaggtattacatccctggtgtcgtattttgcctgttaaatcgtaacaagcaataaacaactttcactttgcaaagacagtgtgtccagttaccactggtgtatgaaatgattaatacctgacctcacagagtatgatctsagggcacttccgtaaggcaagtccttttagaggctatgaagaaaacagctgcatggcacataccaaagctgctgcacagcyggccaccatggcaccctgcaccaggccatcagcaccacgtgccaaggagctcagcggtcttcaggcatttttgtaatgagccattagttctgtccctctaaaactagaaaaggaagggcaggaaatgataacaacccaaggcaatgatatggcatgtcatcttcygagcccttctttctactttgtcaaacagttcttagttgctggctctgctcggcaccgggrctgtgaagggtgtactccctgctgtgtgggagggacctagggcctctttggatgctgtcttcgaggacagcaatgcagagagggcataggatctgaggacaaggaaattcctcagcatggcgtatcaggaaagcatggctcattctgcaatgagccatgagtgtgggccatcgcaagtcacagaaaatgcacctcattccagtcaagcagaaaaacaggcacaggctcagtgtaggtcccaagagagggtgcctggactcagcaactcrgacctgggcttttctcccagctttcagggacagctttgtcctgagtctgcctctgttcacggggatgcttggctggagtcacccccaggacttatccatgcatcactattcagaagacacagagggcccctctctccacattccaaacagagtcctggtttcctcagcctcaccctgcatagcttgcacaacatcctcagaaccattcactggcaaatggaggggaacgtgctgactgggactcccagctggagctgggaggagaggtccacttcccttagaacacctgagctgctgcatgagtggacgtcagaagaatctctatgccctgttaaatggggagacaaaggggtggtgggggcttcagccagtgatttcggaccgaaggtgacagccgtcccaaccctgcccagcctgatgccacctcctctgttcttggaacaacgcataggaaaagaatctcctttggaaggtgacactgctccctgaattaaggtaatkgttgcgagcaccaagtacaaggactagacgcatatttacctgcgtatctgagagttccagattyccagcttccagatgatccttgcacagacaacctaccttctttccagaggatgtctttctcctctggagagtagatgcttgctcttgggaaacggaatgaccttggcgctggcttcaggaatatgcatcccacagccagtttagagaaatacatgttgtaaatggcattgacagctgctctttaggatggggagtattatggaaatccacaataacaatctatggcaagcaact

SEQ ID NO: 2303 - DNA, 1758 bp, Homo sapiens
ctaagaaactaaagacaggggcgtggaggggcggagctgggyggggggcgcctcatgaaggccgggctgggtgtcccaaaccagggccacggaagggcagcgggaaggaggcgtgcgggccgtaggggctgaggggcaggtgttgggggcggaatgggagggacccgggacctcgcatgcatgaagctgcaggcccggggcgccctagtgtttgagaggacgcgcaatgcatacctgaacctgggtgcgcagccgcagctgccgccatctgcttcagggtgctgggctttgaccaggtggctgggcagcgccagttgaaagcggttgagcaggcagggcgcagtggctcacgcctgtaatcccagcactttgggagaccaaggcgggccgatcacggggtcaggagatggagaccatcctggctaacacggtgaaaccgcgtctctactaaacatacaaaaaaaaaaaaaagtagccgggcgtggtggcggacgcctgtagtcccagcactttggaaggctgaggcgggcggatcacgaggtcaggagatggagaacatcctggctaacaggtgaaaccccatctctactaaaagtacaaaaaccaattagccgggtgcggtggcgggcgcctgtagtcccagctactccggaggctgaggcaggagaatggcgtgaacccaggagatggagcttgcagtgagccgagatcgcgccactgcactctagcctgggcaacccaaggagactccatctcaaaagaacaacaacaacaaaaaccagctgagcagcgccggccatgtggcagtgggtccagctccagggcgccctagggcagcggtgtgcagtgttcgggtaataggacgcagacggcggggtcgccgggggcttcggggtggcctcggccccaggccatccagccctgtggaccgaatggagtcccgcacgctgttgaggtagtcgtgggttcccctggcctcgggctgggcgcggggtcagcgcacctgcaggcggcgcttgcggtacgggctggtgaaagtggagatggacggcaggatggattcacttggccacatggcgcgaagctgggaagacggacaccggaacatgaggaacacgagtagttcaagaaaatgctgaagatgcgcttggctgggaagctagggtaggctgacgaagtcagacttagtgtgggaacctgctgggaaagggtttcttctgtccataaaagctactccaatggctgtgggagacttaattccaattccaggtgatacagccgtcaatctcccactagctgtaggatggtgtgtgtgctgcagttcacaggtacctaagtcagtgttagtctaccactgtacatctggtaacctcaatccctgcaaccggggcaaaatgggtttccaggtcttggcaacctttgaaattccaaytccatttgagagagctttgasgaggccatatgctgatttyaccacmagcaacttcasaacccagtactggaatgccatcagccagcaggcccctgccatcatctatgacttctatctgtggctcactggaaggaaasccagrcaaggcsaagmtggstsaaagagcaaycagccacctctgcaryctgccacctcctgctggcargatttgtttttgcatcctgtgaagagccaaggaggcaccagggcataagtcyactcacttatatctgtctgraacataacgcttgtttgtttttacaacaaataaaattgatcttgaataa

SEQ ID NO: 2304 - DNA, 3900 bp, Homo sapiens
ctaggcctgggactcctgggtccccggcagtgtctggaggcatggctggggctggcgggggcctcggggtctgggggaacctggtgctgctgggcctgtgcagctggacaggggccagggcgcctgcccccaacccagggaggaacctgacagtggagactcagaccaccagctccatctccctgagctgggaggtccccgatggcctagactcacagaactccaactactgggttcagtgtactggagacggcggcacaacagagactcgaaacacaacagccaccaaygtcaccgtggatggccttggacccgggtcattgtatacgtgttctgtgtgggtggagaaagacggagtaaatagctctgtggggactgtcactactgccacagctcccaacccagtgaggaacctgagagtggaggctcagaccaacagctccatcgccctgacctgggaggtccccgacggcccagacccacagaactccacctacggggttgagtacactggagatggtggcagagcagggactcgaagcacagcayacacyaacatcaccgtggatggacttgaacccgggtgtttgtatgcgttttccatgtgggtgggaaagaatggaatcaacagctcccgggagactcgaaatgccaccacagctcacaacccagtgaggaacctgagagtggaggctcagaccaccagctccatctccctgagctgggaggtccccgatggcacagacccacagaactcsacctactgcrttcagtgcactggagatggtggcrgaacagagactcgaaacacaacagacaccagagtcaccgtggatggccttggacccgrgtcattgtatacgtgttctgtgtgggtggagaaagacggagtaaatagctctgtggagattgtcactagtgccacagctcccaacccagtgagaaacctgacagtggaggctcagaccaacagctccatcgccctgacctgggaggtccccgayggcccagacccacagaactccacctacggggttgagtacactggagatggtggcagagcagggactcgaagcacagcayacaccaacatcacygtggatagacttgaacccgggtgtttgtatgtgttttccgtgtgggtggggaagaatggaatcaacagctcccgggagactcgaaatgccaccacagcccccaacccagtgagaaacctccatatggagactcagaccaacagctccatcgccctatgctgggaagtccccgatggcccataccctcaggactacacctactgggtagagtacactggagacggtggtggcrcagagacccgaaacacaacaaataccagtgtgacagctgagagacttgagcccggaaccttgtacacattctctgtatgggcagaaaaaaatggagcacgtggctccaggcagaatgtcagcatctccacagtccccaacgcagtgacaagcctcagcaagcaggactggaccaacagcaccattgctttgcgctggacagctccccagggcccaggccagtcttcctacagctactgggtctcatgggtcagggaaggcatgactgaccccaggacccaaagcacctcaggtactgacatcaccctaaaggaactggaagctggcagcctgtaccacytcaccgtctgggccgagaggaatgaggtcagaggctataacagcaccctcacygcagccactgctcccaatgaggtcacagatctcmagaatgaaactcagactaagaactcagtcatgctgtggtggaaggcccctggagacccccactctcagttgtacgtatactgggtccagtgggccagcaagggacatccccggagggggcaagatccccaagcgaattgggtcaaccagaccagcaggaccaatgagacgtggtacaaagtggaggcyctggaacccgggacrytgtacaatttcaccgtgtgggcagagaggaatgacgtagccagttccacgcagagcctctgtgcgtccacatacccagacacagtcaccatcacttcctgtgtcagcacctcagcgggctatggagtcaacttgatctggtcctgcccccagggaggctacgaggcctttgagttggaggtgggaggacagcggggctcccaggacagatcttcatgtggggaggctgtgtctgtgttgggtctcgggccggctcggtcctacccagccaccatcacgaccatctgggacggaatgaaggtcgtgtctcactctgtggtctgccacaccgagagtgcaggggtcattgccggagmctttgtgggcatcctcctgtttctcatcctcgtgggcctgctgattttcttcctgaagaggaggaataakaagaagcagcagaaaccagaactcagggatctggtctttagctccccaggggacatcccagctgaagacttcgctgaccacgtcaggaagaaygagagggacagcaactgtggttttgcagacragtaccagcaactctccctggtggrccacagccagtctcagatggtggcttcggcttcagagaacaacgccaagaaccgctacagaaatgtgctgccctatgactggtcccgggtgcccctgaagcccatccatgaggagccaggctctgactacatcaatgccagcttcatgcccggtctctggagcccccaggagttcattgcaacccagggtcccctgccayagacagtgggtgacttctggcgcctggtgtgggaacagcagagccacaccctggtcatgctgaccaactgcatggaggccggcygggtgaagtgtgagcattactggcctctggactcgcagccctgcacccatgggcacctgcgggtaaccctggtagrtgaggaagtgatggagaactggacggtgcgggaactgctgctyctccaggtggaggagcagaagacactgtctgtgcgccaattccactaccaggcctggccggatcacggcgttccctcctccccagacaccttgctggctttctggaggatgcttcggcagtggctggatcagaccatggagggaggcccacccattgtgcactgcagtgctggcgtgggtcgcacaggaaccctcattgccctggacgtcctgctccggcagctgcagtccgagggtctccttgggsccttcagctttgtaaggaagatgagagagagtcggccgttgatggtgcagactgaggctcagtacgtattcctgcatcagtgcrtcctgcggttcctccaacagtcagcccaggccccagccgagaaggaagtcccgtatgaggatgtcgaaaacctcatctacgagaacgtggccgccatccaggcccacaagttggaggtctragtgacgagggggctgggtcggcagcccaggcatcctcaagstctggacacccacttgagcccagattcctggaagagcagagggctgggctcccagactcctgggtrctgtgggaggagggggctggtatcccaaactctggtttccccaggagagagtggtcwggtgggcttcagatgagtcctatgggagctggggatctggattcctggttccctgaaggaggagagggatgatagcttggattccctaggtctttccaggatgcagaaagaaacaggctggggcctggattctgaggcaggaaggaatttgggtctggagttctggctacttgaggaccaaaggcaggaaggatcctgccttgattttacttcagaaaccaaatcagtcttctataatctggggtcggagggagtccctgtgcccaaggtctctctgcaccccaccatccacatgtatttttccttctatcccataatttattaaatcactgttctccccagagaca

SEQ ID NO: 2305 - DNA, 1653 bp, Homo sapiens
gtttacatatatcaacttaacaaacaagggcgttttttggacctctatgggaaaatagaagcctggatggaacaatccaaagttttaatcaaagaaggtggtgtttagttgctgctcaggatagttgatacctcaggatttggagatgcagtggatagtagtaattgctggcagcctgttatcgattacattgatagtraatttgaggactacctaaatgcagaatcgcgagtgagcagacgtcagatgcctgataacaggaccattacataactgaagactcccaccttcaggcaggattgggtagtgcatgtttgtaactacttgacattgccttttgttgagacttaaaccactggatgttgagtttatgaaacatttgcatgaaaaagtgaatatcatcccacttactgccaaagcagacacactcacaccagaggaatgtcaacagtttacaaaacagataatgaaagaaatccaagaacataaaattaaaatatatgaatttccagaaacagatgatgaagaagaaaagaaacgtgttaaaaagataaaggaccgtttacctcttgctgtggtgggtagtgatattatcactgaagttaatggaaaaagggtcagaggaaggcagtatccttggggtatatattgtgctgtgatttagctccagcagtgccatgtgcaactgaaaaagaatttgggagcacggcacaaagaattagaggagaaacgtcgtcagtttgaggatgagaaagcaaactgggaagctcaacaacgtattttagagcaacagaactctttgagaaccttggaaaagaacaacaagaaagggaagatcttttaaactctctattgaccaccagttgtgtattagttgccaatatgccagcttggacatcagtgtttgttggattcatttgaccaatttgcaccagtttgatccataatgatggatttaacaacatgacaaaaattatttttgttgttgttgttcttgatggagattaagatgcctcgaattgtctagggtgttgtgtacttagaaagtaacagctctaagtacctttcctacattttctttttctttttttattaaacaggtctcttcagtttaatgcaagagaacattttactgttgtacaatcatgttctggtggtttgatagtttacaggagattccaaaataaaaggactctggaaggttttcattgacgatgaattgccataatatgatgcaaactgtgcttctctatgataattataatacaaaggttccattcaatgcagcatatacaataatgtaatttagtctaacacagttgaccctatttttgacacttccattgtttaaaaaaaaacacatgaaaaaaaaaccctatatgcttacagtgcacctagagctttttataataacctctttttgtttgtttgttttggattctttaaatatatattattctcatttagtgccctctttagccagaatctcattacagcttcatttttgtaataatatttaatttagatattttccaaatattgaccctgctaaaatagaatatagcatcttccatatggtaggaaccaacaaggaaactttgctttaactccctttttacgatttayggtaggtagcaggggggaaaaatgcat

SEQ ID NO: 2306 - DNA, 2334 bp, Homo sapiens
gtggagcagcccctgtaaactggctcgggcgcccccacgcccgcccttccttctyctcccagcattgccccccccrcgtttcagcacagcgctggccgcagtctgacaggaaagggacggagccaagatggcggcggccgacggcgacgactcgctgtaccccatcgcggtgctcatagacgaactccgcaatgaggacgttcagcttcgcctcaacagcatcaagaagctgtccaccatcgccttggcccttggggttgaaaggacccgaagtgagcttctgcctttccttacagataccatctatgatgaagatgaggtcctcctggccctggcagaacagctgggaaccttcactaccctggtgggaggcccagagtacgtgcactgcctgctgccaccgctggagtcgctggccacagtggaggagacagtggtgcgggacaaggcagtggagtccttacgggccatctcacacgagcactcgccctctgacctggaggcgcactttgtgccgctagtgaagcggctggcgggcggcgactggttcacctcccgcacctcggcctgcggcctcttctccgtctgctacccccgagtgtcyagtgctgtgaaggcggaacttcgacagtacttccggaacctgtgctcagatgacacccccatggtgcggcgggccgcagcctccaagctgggggagtttgccaaggtgctggagctggacaacgtcaagagtgagatcatccccatgttctccaacctggcctctgacgagcaggactcggtgcggctgctggcggtggaggcgtgcgtgaacatcgcccagcttctgccccaggaggatctggaggccctggtgatgcccactctgcgccaggccgctgaagacaagtcctggcgcgtccgctacatggtggctgacaagttcacagagctccagaaagcagtggggcctgagatcaccaagacagacctggtccctgccttccagaacctgatgaaagactgtgaggccgaggtgagggccgcagcctcccacaaggtcaaagagttctgtgaaaacctctcagctgactgtcgggagaatgtgatcatgtcccagatcttgccctgcatcaaggagctggtgtccgatgccaaccaacatgtcaagtctgccctggcctcagtcatcatgggtctctctcccatcttgggcaaagacaacaccatcgagcacctcttgcccctcttcctggctcagctgaaggatgagtgccctgaggtacggctgaacatcatctctaacctggactgtgtgaacgaggtgattggcatccggcagctgtcccagtccctgctccctgccattgtggagctggctgaggacgccaagtggcgggtgcggctggccatcattgagtacatgcccctcctggctggacagctgggagtggagttctttgatgagaaacttaactccttgtgcatggcctggcttgtggatcatgtatatgccatccgcgaggcagccaccagcaacctgaagaagctagtggaaaagtttgggaaggagtgggcccatgccacaatcatccccaaggtcttggccatgtccggagaccccaactacctgcaccgcatgactacgctcttctgcatcaatgtgctgtctgaggtctgtgggcaggacatcaccaccaagcacatgctacccacggttctgcgcatggctggggacccggttgccaatgtccgcttcaatgtggccaagtctctgcagaagatagggcccatcctggacaacagcaccttgcagagtgaagtcaagcccatcctagagaagctgacccaggaccaggatgtggaygtcaaatactttgcccaggaggctctgactgttctgtctctcgcctgatgctggaagaggagcaaacactggcctctggtgtccaccctccaacccccacaagtccctctttggggagacactggggggcctttggctgtcactccctgtgcatggtctgaccccaggccccttcccccagcacggttcctcctctccccagcctgggaagatgtctcactgtccacctcccaacgggctaggggagcacggggttggacaggacagtgaccttgggaggaaggggctactccgcccacgtcagggagagatgtgagcatcccgggtcactggatcctgctgctgtaatgggaacccctcccccatttacttctccacctcccgtcctccccatcattggtttttttttgtgtgtcaactgtgccgtttttattttattccttttattttcccccttttcacagagaaataaaggtctagaagta

SEQ ID NO: 2307 - DNA, 1256 bp, Homo sapiens
ggtgggagtggtattatataggtctcagccaagacatgtgataatcactgtagtagtagctggaaagagaaatctgtgactccaattagccagttcctgcagaccttgtgaggactagaggaagaaygctyctggctgttttgtactgcctgctgtggagtttccagacctccgctggccawttcyctagagcctgtgtctcctctaagaacctgatggagaaggaatgctrtccaccrtggagcggggrcaggagtccctgtgrccagctttsaggcakaggttcctrtcagaatatccttytgtccaatgcaccacttgggcctcaatttcccttcacaggggtggatgacyrgkagtcgygrcyttccgtcttttataataggaccygccagtgctctggcaacttcatgrgattcaactgtggaaactgcaagtttggcttttggrgaccaaactgcacagagagaygactcttggtgagaagaaacatcttcgatttgagtgccccagagaaggacaaatkttttgcctacctcactttagcaaagcataccatcagctcagactatgtcatcyccatagggacctatggccaaatgaaaaatggatcaacacccatgtttaacgacatcaatatttatgacctcwttgtctrgatgcattattatgtgtcaatggatgcactgcttgggggatmtgaaatctggagagacattgattttgcccatgaagcamcarcttttctgccttggcatagactcttcttgwtgbrgtgggaacaagaaatccagaagctgacaggagatgaaaacttcactattccatattvggactggcgggatgcagaaaagtgtgacatttgcacagatgagtacatgrgaggtcagyaccccacaaatcctaacttactcagcccarcatcattcttctcctcttggcagattgtctgtagccgattggaggagtacaacagccatcagtcttyabgcaatggaacgcccrrgggacctttacggmrtaatcctggaaaccatgacaaatccasaaccccaaggstccsctcttcagctgatgtagaattttgcctgagtttgrcccaatatsaatctggttccatggataaagctgccaatttcagctttagaaatacactggaagagatgggatttctccatattggctgggctggtctcaaactcctgacctcaagagatccaccaccttagcctcccaaaatgctgggattacaggct

SEQ ID NO: 2308 - DNA, 2091 bp, Homo sapiens
  misc_feature (1)...(2091): n = A,T,C or G
ggtgggagtggtattatataggtctcagccaagacatgtgataatcactgtagtagtagctggaaagagaaatctgtgactccaattagccagttcctgcagaccttgtgaggactagaggaagaaygctyctggctgttttgtactgcctgctgtggagtttccagacctccgctggccawttcyctagagcctgtgtctcctctaagaacctgatggagaaggaatgctrtccaccrtggagcggggrcaggagtccctgtgrccagctttsaggcakaggttcctrtcagaatatccttytgtccaatgcaccacttgggcctcaatttcccttcacaggggtggatgacyrgkagtcgygrcyttccgtcttttataataggaccygccagtgctctggcaacttcatgrgattcaactgtggaaactgcaagtttggcttttggrgaccaaactgcacagagagaygactcttggtgagaagaaacatcttcgatttgagtgccccagagaaggacaaatkttttgcctacctcactttagcaaagcataccatcagctcagactatgtcatcyccatagggacctatggccaaatgaaaaatggatcaacacccatgtttaacgacatcaatatttatgacctcwttgtctrgatgcattattatgtgtcaatggatgcactgcttgggggatmtgaaatctggagagacattgattttgcccatgaagcamcarcttttctgccttggcatagactcttcttgwtgbrgtgggaacaagaaatccagaagctgacaggagatgaaaacttcactattccatattvggactggcgggatgcagaaaagtgtgacatttgcacagatgagtacatgrgaggtcagyaccccacaaatcctaacttactcagcccarcatcattcttctcctcttggcagattgtctgtagccgattggaggagtacaacagccatcagtcttyabgcaatggaacgcccrrgggacctttacggmrtaatcctggaaaccatgacaaatccasaaccccaaggstccsctcttcagctgatgtagaattttgcctgagtttgrcccaatatsaatctggttccatggataaagctgccaatttcagctttagaaatacactggaaggatttgctagtccacttactgggatagcrgatgcctctyaaagcagmatgcacaatgccttgyrcatctataygwmtggaamaatgtccyaggtayagggayctgccaacgatcctatcttccttcttcaccatgcatttgttgacagtatttttgagcagtggctccraaggcaccgtcctcttcaagaagtttatccagaagccaatgcacccattrgacataaccrggaatcctacatggttccttttatamyactgtacagaaatggtgatttctttatttcatccaaagatctgggctatgactatagctatctacaagattcagacccagactcttttcaagactacattaagtcctatttggaacaagcnagtcggatctggtcatggctccttggggcggcsatggtaggggccgtcctcactgccctgctggcagggcttgtgagcttgctgtgtcgtcacaagagaaagcagcttcctgaagaaaagcagccactcctcatggagaaagaggattaccacagcttgtatcagagccatttataaaaggcttaggcaatagagtagggccaaaaagcctgacctcactctaactcaaagtaatgtccaggttcccagagaatatctgctgntatttttctgtaaagaccatttgcaaaattgtaacctaatacaaagtntagccttcttccaactcaggtagaacacacctgtctttgtcttgctgttttcactcagcccttttaacattttcccctaagcccatatgtctaaggaaaggatgctatttggtaatgaggaactgttatttgtatgtgaattaaagtgctcttattttaaaaaattgaaataattttgatttttgccttctgattatttaaagatctatatatgttttattggccccttctttattttaata

SEQ ID NO: 2309 - DNA, 1785 bp, Homo sapiens
gaaatggtgggcaggagcacatgttgcttaaatttctgacagtggctggagattaccgattggttaggggagaggaagtaaagtaaaatatttataaattctccactgggtggagtctgagcagttctttgaatttctcaccctaagatctggcctgtacattttcaaggaattcttgagaggttcttggagagattctgggagccaaacactccattgggatcctagctgttttagagaacaacttgtaatggagccttcatctcttgagctgccggctgacacagtgcagcgcattgcggctgaactcaaatgccacccaacggatgagagggtggctctccacctagatgaggaagataagctgaggcacttcagggagtgcttttatattcccaaaatacaggatctgcctccagttgatttatcattagtgaataaagatgaaaatgccatctatttcttgggaaattctcttggccttcaaccaaaaatggttaaaacatatcttgaagaagaactagataagtgggccaaaatagcagcctatggtcatgaagtggggaagcgtccttggattacaggagatgagagtattgtaggccttatgaaggacattgtaggagccaatgagaaagaaatagccctaatgaatgctttgactgtaaatttacatcttctaatgttatcattttttaagcctacgccaaaacgatataaaattcttctagaagccaaagccttcccttctgatcattatgctattgagtcacaactacaacttcacggacttaacattgaagaaagtatgcrgatgataaagccaagagagggggaagaaaccttaagaatagaggatatccttgaagtaattgagaaggaaggagactcaattgcagtgatcctgttcagtggggtgcatttttacactggacagcactttaatattcctgccatcacaaaagctggacaagcgaagggttgttatgttggctttgatctagcacatgcagttggaaatgttgaactctacttacatgactggggagttgattttgcctgctggtgttcctacaagtatttaaatgcaggagcaggaggaattgctggtgccttcattcatgaaaagcatgcccatacgattaaacctgcattagtgggatggtttggccatgaactcagcaccagatttaagatggataacaaactgcagttaatccctggggtctgtggattccgaatttcaaatcctcccattttgttggtctgttccttgcatgctagtttagagatctttaagcaagcgacaatgaaggcattgcggaaaaaatctgttttgctaactggctatctggaatacctgatcaagcataactatggcaaagataaagcagcaaccaagaaaccagttgtgaacataattactccgtctcatgtagaggagcgggggtgccagctaacaataacattttctgttccaaacraagatgttttccaagaactagaaaaaagaggagtggtttgtgacaagcggaatccaaatggcattcgagtggctccagttcctctctataattctttccatgatgtttataaatttaccaatctgctcacttctatacttgactctgcagaaacaaaaaattagcagtgttttctagaacaacttaagcaaattatactgaaarctgctgtggttatttcagtattattcgatttttaattattgaaagtatgtcaccattgaccacatgtaactaacaataaataatayaccttacagaa

SEQ ID NO: 2310 - DNA, 1324 bp, Homo sapiens
ggaaaggagacgatggagccgccatgttgaacacgtctagcctcagatatctgtcctgggacaccagtcatctcctgaataacactgtcagctaaaattacacaatttccagcaaaaagaaaaaaaaagattcccacggataaccgtgagttttagagaacaacttgtaatggagccttcatctcttgagctgccggctgacacagtgcagcgcattgcggctgaactcaaatgccacccaacggatgagagggtggctctccacctagatgaggaagataagctgaggcacttcagggagtgcttttatattcccaaaatacaggatctgcctccagttgatttatcattagtgaataaagatgaaaatgccatctatttcttgggaaattctcttggccttcaaccaaaaatggttaaaacatatcttgaagaagaactagataagtgggccaaaatagcagcctatggtcatgaagtggggaagcgtccttggattacaggagatgagagtattgtaggccttatgaaggacattgtaggagccaatgagaaagaaatagccctaatgaatgctttgactgtaaatttacatcttctaatgttatcattttttaagcctacgccaaaacgatataaaattcttctagaagccaaagccttcccttctgatcattatgctattgagtcacaactacaacttcacggacttaacattgaagaaagtatgcrgatgataaagccaagagagggggaagaaaccttaagaatagaggatatccttgaagtaattgagaaggaaggagactcaattgcagtgatcctgttcagtggggtgcatttttacactggacagcactttaatattcctgccatcacaaaagctggacaagcgaagggttgttatgttggctttgatctagcacatgcagttggaaatgttgaactctacttacatgactggggagttgattttgcctgctggtgttcctacaagtatttaaatgcaggagcaggaggaattgctggtgccttcattcatgaaaagcatgcccatacgattaaacctgcgagatcggagttctttaattaggaatggaatgcaacagatttggacaagtcaaggacaagagctttagagagaccaaagagtttttcactgttaaagtgtccagtatgtagccragaaccatatggagaacatcaaatacagtggaacaaatgtaactgctattgatgtcacactttgtgaagtagtctttgttgcttaaaaagggtgacatctagtggctaaacatgttatttcaaataaataatatcgaaa

SEQ ID NO: 2311 - DNA, 1704 bp, Homo sapiens
ggaaaggagacgatggagccgccatgttgaacacgtctagcctcagatatctgtcctgggacaccagtcatctcctgaataacactgtcagctaaaattacacaatttccagcaaaaagaaaaaaaaagattcccacggataaccgtgagttttagagaacaacttgtaatggagccttcatctcttgagctgccggctgacacagtgcagcgcattgcggctgaactcaaatgccacccaacggatgagagggtggctctccacctagatgaggaagataagctgaggcacttcagggagtgcttttatattcccaaaatacaggatctgcctccagttgatttatcattagtgaataaagatgaaaatgccatctatttcttgggaaattctcttggccttcaaccaaaaatggttaaaacatatcttgaagaagaactagataagtgggccaaaatagcagcctatggtcatgaagtggggaagcgtccttggattacaggagatgagagtattgtaggccttatgaaggacattgtaggagccaatgagaaagaaatagccctaatgaatgctttgactgtaaatttacatcttctaatgttatcattttttaagcctacgccaaaacgatataaaattcttctagaagccaaagccttcccttctgatcattatgctattgagtcacaactacaacttcacggacttaacattgaagaaagtatgcrgatgataaagccaagagagggggaagaaaccttaagaatagaggatatccttgaagtaattgagaaggaaggagactcaattgcagtgatcctgttcagtggggtgcatttttacactggacagcactttaatattcctgccatcacaaaagctggacaagcgaagggttgttatgttggctttgatctagcacatgcagttggaaatgttgaactctacttacatgactggggagttgattttgcctgctggtgttcctacaagtatttaaatgcaggagcaggaggaattgctggtgccttcattcatgaaaagcatgcccatacgattaaacctgcattagtgggatggtttggccatgaactcagcaccagatttaagatggataacaaactgcagttaatccctggggtctgtggattccgaatttcaaatcctcccattttgttggtctgttccttgcatgctagtttagagatctttaagcaagcgacaatgaaggcattgcggaaaaaatctgttttgctaactggctatctggaatacctgatcaagcataactatggcaaagataaagcagcaaccaagaaaccagttgtgaacataattactccgtctcatgtagaggagcgggggtgccagctaacaataacattttctgttccaaacraagatgttttccaagaactagaaaaaagaggagtggtttgtgacaagcggaatccaaatggcattcgagtggctccagttcctctctataattctttccatgatgtttataaatttaccaatctgctcacttctatacttgactctgcagaaacaaaaaattagcagtgttttctagaacaacttaagcaaattatactgaaarctgctgtggttatttcagtattattcgatttttaattattgaaagtatgtcaccattgaccacatgtaactaacaataaataatayaccttacagaa

SEQ ID NO: 2312 - DNA, 1239 bp, Homo sapiens
atgtctgacaaactgccctacaaagtcgcagcctggggacgcaaggccctggacattgcagagaacaagatgccaggcctgatgcgcatatgggagcggtactccgcctccaagccactgaacggcgcccgcatccctggctgtctgcacaggaccgtggagactgccgtcctaatgagcctcatcaccctgggtactgaggtgcagtggtccagctgcaacatcttctctacccaggaccatgcggctgctgccattgccaaagctggcatttcagccagcactggcattccagtgttgccgttgccaaggctggcatgcctggaagggcgaaacagacgaggagtacctgtgacgggcgaccttaccaacctcatccacagcgagtactcgcagctcctgctgagcttccgaggtatatccaaagagaccacaatcggggtccacaacctgtacaagatgatggtcaatgggattctgaaggtgcctgccatcgatgtcaatgactccgccaccaagagcaagtttgacaacctctatggctgtggtatcaagcaggccacagacgtgatgattgccggcaaggtagcggtggtagcaggctatggcgataagggcaagagctgtgcccaggccctgcggggtttcagggccagcgtcatcatcaccaagactgaccccatcaaggcactgcaggctgccatggagggctatgaggtgactaccatggatgaggcctgtcaggagggcgacgtctttgtcaccaccacaggttgtgttgacatcatccttggccagcactttgagcagacgaaggatgataccattgtgtgtaacactggatactttgatgtggaaatggatgtcaagtggctcaacaagaacactgtggagaaggtgaacgtcaagctgcaggtggacccgtaccggctgaagaatgggcggggcatcatcctgctggctgagggtcrgctggttaacctggcttgtgccatgggtcaccctagcttcgtgaggagtaactccttcaccagccaggtgatggcgcagatcaagctgtggacccacccagacaagtaccccgttggggttcacttcctgcccaagaagctggatgagtcagtggctgaagcccacctgggcaagttgaacatgaagttgaccaagctgactgagaagcaggcccagtacctgggcatgtcttgttactgccccttcaagccagatcactaccgctac

SEQ ID NO: 2313 - DNA, 1312 bp, Homo sapiens
atgtctgacaaactgccctacaaagtcgcagcctggggacgcaaggccctggacattgcagagaacaagatgccaggcctgatgcgcatatgggagcggtactccgcctccaagccactgaacggcgcccgcatccctggctgtctgcacaggaccgtggagactgccgtcctaatgagcctcatcaccctgggtactgaggtgcagtggtccagctgcaacatcttctctacccaggaccatgcggctgctgccattgccaaagctggcatttcagccagcactggcattccagtgttgccgttgccaaggctggcatgcctggaagggcgaaacagacgaggagtacctgtggtgcattgagcagatgatgtacctcaaggacgggccccttaacatgattctggaagacgggcgaccttaccaacctcatccacagcgagtactcgcagctcctgctgagcttccgaggtatatccaaagagaccacaatcggggtccacaacctgtacaagatgatggtcaatgggattctgaaggtgcctgccatcgatgtcaatgactccgccaccaagagcaagtttgacaacctctatggctgtgggagcccctcataggtggtatcaagcaggccacagacgtgatgattgccggcaaggtagcggtggtagcaggctatggcgataagggcaagagctgtgcccaggccctgcggggtttcagggccagcgtcatcatcaccaagactgaccccatcaaggcactgcaggctgccatggagggctatgaggtgactaccatggatgaggcctgtcaggagggcgacgtctttgtcaccaccacaggttgtgttgacatcatccttggccagcactttgagcagacgaaggatgataccattgtgtgtaacactggatactttgatgtggaaatggatgtcaagtggctcaacaagaacactgtggagaaggtgaacgtcaagctgcaggtggacccgtaccggctgaagaatgggcggggcatcatcctgctggctgagggtcrgctggttaacctggcttgtgccatgggtcaccctagcttcgtgaggagtaactccttcaccagccaggtgatggcgcagatcaagctgtggacccacccagacaagtaccccgttggggttcacttcctgcccaagaagctggatgagtcagtggctgaagcccacctgggcaagttgaacatgaagttgaccaagctgactgagaagcaggcccagtacctgggcatgtcttgttactgccccttcaagccagatcactaccgctac

SEQ ID NO: 2314 - DNA, 2524 bp, Homo sapiens
tggatttacagccttgcttaatacttctatttcttacaaaacaaccgtataggggttaaagtatcagtgcaaagtcccgttcaaatattgactcagtaatgagctctacaagccagcctttgtgrcatgttaaattcaaaacaagcttagcatttttttttttttttggatagaaactggtgggggtggggaaagaaagagggaactgggaagagaaggaggggaacttaaaccttgcttcctgctctgtctttctcagaaaaccaaatatggcatcttccatgaggagcttgttttctgaccacgggaaatatgttgaatctttccggaggtttctcaaccattccacggaacaccagtgcatgcaggaattcatggacaagaagctgccaggcataataggaaggattggagacacaaaatcagaaattaagattctaagcataggcggaggtgcaggtgaaattgatcttcaaattctctccaaagttcaggctcaatacccaggagtttgtatcaacaatgaagttgttgagccaagtgctgaacaaattgccaaatacaaagagcttgtagccaagayatcgaacctcgagaacgtaaagtttgcttggcataaggagacatcatctgaataccaaagtagaatgttggagaaaaaggagcttcaaaagtgggactttattcatatgattcaaatgctgtattatgtaaaagacatcccagctaccctgaaattcttccatagtctcttaggtaccaatgctaagatgctcattattgttgtgtcaggaagcagtggctgggacaagctgtggaaaaagtacggatcacgctttccccaggatgacctctgccagtatatcacatcagatgacctcactcagatgctggacaacctagggcttaagtatgagtgctatgaccttttgtccaccatggatatatctgactgctttattgatggtaatgaaaatggagacctgctttgggattttttgactgaaacctgcaactttaatgccacagcaccacctgatctcagagcagagcttgggaaagatctacaagagcctgaatttagtgctaagaaagaggggaaggttctttttaataatactctgagtttcatagtgattgaggcataactatcaatcacaaaagtatattcaaaaattatattttgaacaactcgaatcactcatttrtttccatattaaaatcacaaactcatccattaatgtagataaagcactgtttggatatgagatgtagcaaattccaatacattattggacttccatttggaatcatatgggatactgctggtcttatcctgtccctcctccaggtagagagaccacawgcaggctcaacataacataagctagaaaaattagatgactgaatttctatggcatattgataataaaattcattccatttgctgattgtctgaaattttctagaatactaataaaatacatactatagattctttattagtgaagtatgcactaatcaatactttgaacacaaagcctgtgttactgatttggccgttttgtgaagaaacatttatctttgtacgttcttctattgtgctttctatctaatttttattaatttgtaagagtaagcacctttagaatattaaaaattaattctttatcacatgttgtcatttcttcccattgtgttttctcttgtaattttatctgtgaattaatagctttttgtttgtctttttgatatactgaagttttctattatattcagccagatttttttttaagtctcggcttctgatacattttaaaagaccttctaaaaccaaggttttagaatactaacattttatcaaaataatattatagttttgctttttttaaaaaatgaaatctttactatgtttgaaatttagataagtataaacagtgagaacaaactgtttcccctcaaaataatagccagatgtataaacaaaatttattgaagaacaaagaaacacaaaactaaacctgttctagcttaaaatgcagcttttaccagatttctaggaattgggtaaatgcaaggttctagaaaaccttcaatgcattttgatactttatagtttcttatgtcactctcaagaactcytataagaccaagagtcatctttggactgtaggatttcaggggggttttgaaaacaaatttgatgtttcttatttttaataataacgctctgttatttttgacataaacagtacatttaataattaataaataaatattttaagtatgtaaataattagtactccctgtcacaaacaaaacaaaagtaaggttttactaaacagctcatgagccctcattctgccagtgaggaagccttcaaccccgtgtgatactcactctttcatgcaatagggcttccatgtaatgttgccgtataatcactttaaaaagttaaacgacccatctcaatcacctagtttatccccagggaatacactggcatagagagcctatttacact

SEQ ID NO: 2315 - DNA, 597 bp, Homo sapiens
tttttttggatagaaactggtgggggtggggaaagaaagagggaactgggaagagaaggaggggaacttaaaccttgcttcctgctctgtctttctcagaaaaccaaatatggcatcttccatgaggagcttgttttctgaccacgggaaatatgttgaatctttccggaggtttctcaaccattccacggaacaccagtgcatgcaggaattcatggacaagaagctgccaggcataataggaagataccagaattgctgttaacaaataaaatactggccagatgtgttggttcacgcctgtaatcctagcacttcgggaggctgaggcgggaggattacttgagcctaggagtttgagaccagcctgggcaacatagcaagatcccatctctacaaaaaagtgaaaaagttagctgaacaaggcggcatgcacatgctactccagacgctgaagtgggaagatcacttaagtccgagagatcgaggcttcagtgagatatggctgagacactgctctcagcctggatgacagagtgagaacctgtctcaaacaagagaaaaaaataaatcaaatgctaytcaaaattctcatcc

SEQ ID NO: 2316 - DNA, 873 bp, Homo sapiens
tggatttacagccttgcttaatacttctatttcttacaaaacaaccgtataggggttaaagtatcagtgcaaagtcccgttcaaatattgactcagtaatgagctctacaagccagcctttgtgrcatgttaaattcaaaacaagcttagcatttttttttttttttggatagaaactggtgggggtggggaaagaaagagggaactgggaagagaaggaggggaacttaaaccttgcttcctgctctgtctttctcagaaaaccaaatatggcatcttccatgaggagcttgttttctgaccacgggaaatatgttgaatctttccggaggtttctcaaccattccacggaacaccagtgcatgcaggaattcatggacaagaagctgccaggcataataggaaggattggagacacaaaatcagaaattaagattctaagcataggcggaggtgcagattgtctcattcggggaagctccagggttctcaagcggaattcgtgtttcattttgtgtagcacccgtcagaaagacaagccaggcatgaggatccatgatgagcgctcttctgagttgccatttggagctgcccgtttagaaagcaaatctgcatttccctcattcctagtttccttcatcctcttttaagtgtcatcttttccatgaagcctactagatcacacagttgaaaattgcaaagtcttcacaccgcagcttcccctttctttgttgctttggttttctccgtgggacttcccaccatccgtaaaattaggtgtttttgcctgttttattcactgctacgtctccaatggttagaacctgacatttagtgggtgctcaataatatttgttgaagtaatgtataata

SEQ ID NO: 2317 - DNA, 4386 bp, Homo sapiens
cgcggggccgttctcgccgcgagccgatgggggcggggaaaagtccggctgggccgggacaaaagccggatcccgggaagctaccggctgctggggtgctccggattttgcggggttcgtcgggcctgtggaagaagcgccgcgcacggacttcggcagaggtagagcaggtctctctgcagccatgtcggccaaggcaatttcagagcagacgggcaaagaactcctttacaagttcatctgtaccacctcagccatccagaatcggttcaagtatgctcgggtcactcctgacacagactgggcccgcttgctgcaggaccacccctggctgctcagccagaacttggtagtcaagccagaccagctgatcaaacgtcgtggaaaacttggtctcgttggggtcracctcactctggatggggtcaagtcctggctgaagccacggctgggacaggaagccacagttggcaaggccacaggcttcctcaagaactttctgatcgagcccttcgtcccccacagtcaggctgaggagttctatgtctgcatctatgccacccgagaaggggactacgtcctgttccaccacgaggggggtgtggacgtgggtgatgtggacgccaaggcccagaagctgcttgttggcgtggatgagaaactgaatcctgaggacatcaaaaaacacctgttggtccacgcccctgamgacaagaaagaaattctggccagttttatctccggcctcttcaatttctacgaggacttgtacttcacctacctcgagatcaatccccttgtagtgaccaaagatggagtctatgtccttgacttggcggccaaggtggacgccactgccgactacatctgcaaagtgaagtggggtgacatcgagttccctccccccttcgggcgggaggcatatccagaggaagcctacattgcagacctcgatgccaaaagtggggcaagcctgaagctgaccttgctgaaccccaaagggaggatctggaccatggtggccgggggtggcgcctctgtcgtgtacagcgataccatctgtgatctagggggtgtcaacgagctggcaaactatggggagtactcaggcgcccccagcgagcagcagacctatgactatgccaagactatcctctccctcatgacccgagagaagcacccagatggcaagatcctcatcattggaggcagcatcgcaaacttcaccaacgtggctgccacgttcaagggcatcgtgagagcaattcgagattaccagggccccctgaaggagcacgaagtcacaatctttgtccgaagaggtggccccaactatcaggagggcttacgggtgatgggagaagtcgggaagaccactgggatccccatccatgtctttggcacagagactcacatgacggccattgtgggcatggccctgggccaccggcccatccccaaccagccacccacagcggcccacactgcaaacttcctcctcaacgccagagcgggagttaacgccagcccccagcaggacagcatctttttctgagtccagggccgatgaggtggcgcctgcaaagaaggccaagcctgccatgccacaagattcagtcccaagtccaagatccctgcaaggaaagagcaccaccctcttcagccgccacaccaaggccattgtgtggggcatgcagacccgggccgtgcaaggcatgctggactttgactatgtctgctcccgagacragccctcagtggctgccatggtctaccctttcactggggaccacaagcagaagttttactgggggcacaaagagatcctgatccctgtcttcaagaacatggctgatgccatgaggaagcayccggaggtagatgtgctcatcaactttgcctctctccgctctgcctatgacagcaccatggagaccatgaactatgcccagatccggaccatcgccatcatagctgaaggcatccctgaggccctcacgagaaagctgatcaagaaggcggaccagaagggagtgaccatcatcggacctgccactgttggaggcatcaagcctgggtgctttaagattggcaacacaggtgggatgctggacaacatcctggcctccaaactgtaccgcccaggcagcgtggcctatgtctcacgttccggaggcatgtccaacgagctcaacaatatcatctctcggaccacggatggcgtctatgagggcgtggccattggtggggacaggtacccgggctccacattcatggatcatgtgttacgctatcaggacactccaggagtcaaaatgattgtggttcttggagagattgggggcactgaggaatataaratttgccggggcatcaaggagggccgcctcactaagcccatcgtctgctggtgcatcgrgacgtgtgccaccatgttctcctctgaggtccagtttggccatgctggagcttgtgccaaccaggcttctgaaactgcagtagccaagaaccaggctttgaaggaagcaggagtgtttgtgccccggagctttgatgagcttggagagatcatccagtctgtatacgaagatctygtggccaatggagtcattgtacctgcccaggaggtgccgcccccaaccgtgcccatggactactcctgggccagggagcttggtttgatccgcaaacctgcctcgttcatgaccagcatctgcgatgagcgaggacaggagctcatctacgcgggcatgcccatcactgaggtcttcaaggaagagatgggcattggcggggtcctyggcctcctctggttccagaaaaggttgcctaagtactcttgccagttcattgagatgtgtctgatggtgacagctgatcacgggccagccgtctctggagcccacaacaccatcatttgtgcgcgagctgggaaagacctggtctccagcctcacctcggggctgctcaccatcggggatcggtttgggggtgccttggatgcagcagccaagatgttcagtaaagcctttgacagtggcattatccccatggagtttgtgaacaagatgaagaaggaagggaagctgatcatgggcattggtcaccgagtgaagtcgataaacaacccagacatgcgagtgcagatcctcaaagattacgtcaggcagcacttccctgccactcctctgctcgattatgcactggaagtagagaagattaccacctcgaagaagccaaatcttatcctgaatgtagatggtctcatcggagtcgcatttgtagacatgcttagaaactgtgggtcctttactcgggaggaagctgatgaatatattgacattggagcsctcaatggcatctttgtgctgggaaggagtatggggttcattggacactatcttgatcagaagaggctgaagcaggggctgtatcgtcatccgtgggatgatatttcatatgttcttccggaacacatgagcatgtaacagagccaggaaccctactgcagtaaactgaagacaagawctcttcccccaagaaaaagtgtacagacagctggcagtggagcctgctttatttagcaggggcctggaatgtaaacagccactggggtacaggcaccgaagaccaacatccacaggctaacaccccttcagtccacacaaagaagcttcatattttttttataagcatagaaataaaaaccaagccaatatttgtgactttgctctgctacctgctgtatttattatatggaagcatctaagtactgtcaggatggggtcttcctcattgtagggcgttaggatgttgctttctttttccattagttaaacatttttttctcctttggaggaagggaatgaaacatttatggcctcaagatactatacatttaaagcaccccaatgtctctctttttttttttttacttccctttcttcttccttatataacatgaagaacattgtattaatctgatttttaaagatctttttgtatgttacgtgttaagggcttgtttggtatcccactgaaatgttctgtgttgcagaccagagtctgtttatgtcagggggakggggccattgcatccttagccattgtcacaaaatatgtggagtagtaacttaatatgtaaagttgtaacatacatacatttaaaatggaaatgcagaaagctgtgaaatgtcttgtgtcttatgttctctgtatttatgcagctgatttgtctgtctgtaactgaagtgtgggtccaaggactcctaactactttgcatctgtaatccmcaaagattctgggcagctgccacctcagtctcttctctgtattatcatagtctggtttaaataaactatatagtaacaatgaaggcatactgc

SEQ ID NO: 2318 - DNA, 3804 bp, Homo sapiens
gccggatcccgggaagctaccggctgctggggtgctccggattttgcggggttcgtcgggcctgtggaagaagcgccgcgcacggacttcggcagagacaggtagagcaggtctctctgcagccatgtcggccaaggcaatttcagagcagacgggcaaagaactcctttacaagttcatctgtaccacctcagccatccagaatcggttcaagtatgctcgggtcactcctgacacagactgggcccgcttgctgcaggaccacccctggctgctcagccagaacttggtagtcaagccagaccagctgatcaaacgtcgtggaaaacttggtctcgttggggtcracctcactctggatggggtcaagtcctggctgaagccacggctgggacaggaagccacagttggcaaggccacaggcttcctcaagaactttctgatcgagcccttcgtcccccacagtcaggctgaggagttctatgtctgcatctatgccacccgagaaggggactacgtcctgttccaccacgaggggggtgtggacgtgggtgatgtggacgccaaggcccagaagctgcttgttggcgtggatgagaaactgaatcctgaggacatcaaaaaacacctgttggtccacgcccctgamgacaagaaagaaattctggccagttttatctccggcctcttcaatttctacgaggacttgtacttcacctacctcgagatcaatccccttgtagtgaccaaagatggagtctatgtccttgacttggcggccaaggtggacgccactgccgactacatctgcaaagtgaagtggggtgacatcgagttccctccccccttcgggcgggaggcatatccagaggaagcctacattgcagacctcgatgccaaaagtggggcaagcctgaagctgaccttgctgaaccccaaagggaggatctggaccatggtggccgggggtggcgcctctgtcgtgtacagcgataccatctgtgatctagggggtgtcaacgagctggcaaactatggggagtactcaggcgcccccagcgagcagcagacctatgactatgccaagactatcctctccctcatgacccgagagaagcacccagatggcaagatcctcatcattggaggcagcatcgcaaacttcaccaacgtggctgccacgttcaagggcatcgtgagagcaattcgagattaccagggccccctgaaggagcacgaagtcacaatctttgtccgaagaggtggccccaactatcaggagggcttacgggtgatgggagaagtcgggaagaccactgggatccccatccatgtctttggcacagagactcacatgacggccattgtgggcatggccctgggccaccggcccatccccaaccagccacccacagcggcccacactgcaaacttcctcctcaacgccagcgggagcacatcgacgccagcccccagcaggacagcatctttttctgagtccagggccgatgaggtggcgcctgcaaagaaggccaagcctgccatgccacaaggaaagagcaccaccctcttcagccgccacaccaaggccattgtgtggggcatgcagacccgggccgtgcaaggcatgctggactttgactatgtctgctcccgagacragccctcagtggctgccatggtctaccctttcactggggaccacaagcagaagttttactgggggcacaaagagatcctgatccctgtcttcaagaacatggctgatgccatgaggaagcayccggaggtagatgtgctcatcaactttgcctctctccgctctgcctatgacagcaccatggagaccatgaactatgcccagatccggaccatcgccatcatagctgaaggcatccctgaggccctcacgagaaagctgatcaagaaggcggaccagaagggagtgaccatcatcggacctgccactgttggaggcatcaagcctgggtgctttaagattggcaacacaggtgggatgctggacaacatcctggcctccaaactgtaccgcccaggcagcgtggcctatgtctcacgttccggaggcatgtccaacgagctcaacaatatcatctctcggaccacggatggcgtctatgagggcgtggccattggtggggacaggtacccgggctccacattcatggatcatgtgttacgctatcaggacactccaggagtcaaaatgattgtggttcttggagagattgggggcactgaggaatataaratttgccggggcatcaaggagggccgcctcactaagcccatcgtctgctggtgcatcgrgacgtgtgccaccatgttctcctctgaggtccagtttggccatgctggagcttgtgccaaccaggcttctgaaactgcagtagccaagaaccaggctttgaaggaagcaggagtgtttgtgccccggagctttgatgagcttggagagatcatccagtctgtatacgaagatctygtggccaatggagtcattgtacctgcccaggaggtgccgcccccaaccgtgcccatggactactcctgggccagggagcttggtttgatccgcaaacctgcctcgttcatgaccagcatctgcgatgagcgaggacaggagctcatctacgcgggcatgcccatcactgaggtcttcaaggaagagatgggcattggcggggtcctyggcctcctctggttccagaaaaggttgcctaagtactcttgccagttcattgagatgtgtctgatggtgacagctgatcacgggccagccgtctctggagcccacaacaccatcatttgtgcgcgagctgggaaagacctggtctccagcctcacctcggggctgctcaccatcggggatcggtttgggggtgccttggatgcagcagccaagatgttcagtaaagcctttgacagtggcattatccccatggagtttgtgaacaagatgaagaaggaagggaagctgatcatgggcattggtcaccgagtgaagtcgataaacaacccagacatgcgagtgcagatcctcaaagattacgtcaggcagcacttccctgccactcctctgctcgattatgcactggaagtagagaagattaccacctcgaagaagccaaatcttatcctgaatgtagatggtctcatcggagtcgcatttgtagacatgcttagaaactgtgggtcctttactcgggaggaagctgatgaatatattgacattggagcsctcaatggcatctttgtgctgggaaggagtatggggttcattggacactatcttgatcagaagaggctgaagcaggggctgtatcgtcatccgtgggatgatatttcatatgttcttccggaacacatgagcatgtaacagagccaggaaccctactgcagtaaactgaagacaagawctcttcccccaagaaaaagtgtacagacagctggcagtggagcctgctttatttagcaggggcctggaatgtaaacagccactggggtacaggcaccgaagaccaacatccacaggctaacaccccttcagtccacacaaagaagcttcatattttttttataagcatagaaatggaagcatctaagtactgtcaggatggggtcttcctcattgtagggcgttaggatgttgctttctttttccattagttaaacatttttttctcctttggaggaagggaatgaaacatttatggcctcaagatactatacatttaaagcaccccaatgtctctctttttttttttttacttccctttcttc

SEQ ID NO: 2319 - DNA, 3834 bp, Homo sapiens
gccggatcccgggaagctaccggctgctggggtgctccggattttgcggggttcgtcgggcctgtggaagaagcgccgcgcacggacttcggcagagacaggtagagcaggtctctctgcagccatgtcggccaaggcaatttcagagcagacgggcaaagaactcctttacaagttcatctgtaccacctcagccatccagaatcggttcaagtatgctcgggtcactcctgacacagactgggcccgcttgctgcaggaccacccctggctgctcagccagaacttggtagtcaagccagaccagctgatcaaacgtcgtggaaaacttggtctcgttggggtcracctcactctggatggggtcaagtcctggctgaagccacggctgggacaggaagccacagttggcaaggccacaggcttcctcaagaactttctgatcgagcccttcgtcccccacagtcaggctgaggagttctatgtctgcatctatgccacccgagaaggggactacgtcctgttccaccacgaggggggtgtggacgtgggtgatgtggacgccaaggcccagaagctgcttgttggcgtggatgagaaactgaatcctgaggacatcaaaaaacacctgttggtccacgcccctgamgacaagaaagaaattctggccagttttatctccggcctcttcaatttctacgaggacttgtacttcacctacctcgagatcaatccccttgtagtgaccaaagatggagtctatgtccttgacttggcggccaaggtggacgccactgccgactacatctgcaaagtgaagtggggtgacatcgagttccctccccccttcgggcgggaggcatatccagaggaagcctacattgcagacctcgatgccaaaagtggggcaagcctgaagctgaccttgctgaaccccaaagggaggatctggaccatggtggccgggggtggcgcctctgtcgtgtacagcgataccatctgtgatctagggggtgtcaacgagctggcaaactatggggagtactcaggcgcccccagcgagcagcagacctatgactatgccaagactatcctctccctcatgacccgagagaagcacccagatggcaagatcctcatcattggaggcagcatcgcaaacttcaccaacgtggctgccacgttcaagggcatcgtgagagcaattcgagattaccagggccccctgaaggagcacgaagtcacaatctttgtccgaagaggtggccccaactatcaggagggcttacgggtgatgggagaagtcgggaagaccactgggatccccatccatgtctttggcacagagactcacatgacggccattgtgggcatggccctgggccaccggcccatccccaaccagccacccacagcggcccacactgcaaacttcctcctcaacgccagcgggagcacatcgacgccagcccccagcaggacagcatctttttctgagtccagggccgatgaggtggcgcctgcaaagaaggccaagcctgccatgccacaagattcagtcccaagtccaagatccctgcaaggaaagagcaccaccctcttcagccgccacaccaaggccattgtgtggggcatgcagacccgggccgtgcaaggcatgctggactttgactatgtctgctcccgagacragccctcagtggctgccatggtctaccctttcactggggaccacaagcagaagttttactgggggcacaaagagatcctgatccctgtcttcaagaacatggctgatgccatgaggaagcayccggaggtagatgtgctcatcaactttgcctctctccgctctgcctatgacagcaccatggagaccatgaactatgcccagatccggaccatcgccatcatagctgaaggcatccctgaggccctcacgagaaagctgatcaagaaggcggaccagaagggagtgaccatcatcggacctgccactgttggaggcatcaagcctgggtgctttaagattggcaacacaggtgggatgctggacaacatcctggcctccaaactgtaccgcccaggcagcgtggcctatgtctcacgttccggaggcatgtccaacgagctcaacaatatcatctctcggaccacggatggcgtctatgagggcgtggccattggtggggacaggtacccgggctccacattcatggatcatgtgttacgctatcaggacactccaggagtcaaaatgattgtggttcttggagagattgggggcactgaggaatataaratttgccggggcatcaaggagggccgcctcactaagcccatcgtctgctggtgcatcgrgacgtgtgccaccatgttctcctctgaggtccagtttggccatgctggagcttgtgccaaccaggcttctgaaactgcagtagccaagaaccaggctttgaaggaagcaggagtgtttgtgccccggagctttgatgagcttggagagatcatccagtctgtatacgaagatctygtggccaatggagtcattgtacctgcccaggaggtgccgcccccaaccgtgcccatggactactcctgggccagggagcttggtttgatccgcaaacctgcctcgttcatgaccagcatctgcgatgagcgaggacaggagctcatctacgcgggcatgcccatcactgaggtcttcaaggaagagatgggcattggcggggtcctyggcctcctctggttccagaaaaggttgcctaagtactcttgccagttcattgagatgtgtctgatggtgacagctgatcacgggccagccgtctctggagcccacaacaccatcatttgtgcgcgagctgggaaagacctggtctccagcctcacctcggggctgctcaccatcggggatcggtttgggggtgccttggatgcagcagccaagatgttcagtaaagcctttgacagtggcattatccccatggagtttgtgaacaagatgaagaaggaagggaagctgatcatgggcattggtcaccgagtgaagtcgataaacaacccagacatgcgagtgcagatcctcaaagattacgtcaggcagcacttccctgccactcctctgctcgattatgcactggaagtagagaagattaccacctcgaagaagccaaatcttatcctgaatgtagatggtctcatcggagtcgcatttgtagacatgcttagaaactgtgggtcctttactcgggaggaagctgatgaatatattgacattggagcsctcaatggcatctttgtgctgggaaggagtatggggttcattggacactatcttgatcagaagaggctgaagcaggggctgtatcgtcatccgtgggatgatatttcatatgttcttccggaacacatgagcatgtaacagagccaggaaccctactgcagtaaactgaagacaagawctcttcccccaagaaaaagtgtacagacagctggcagtggagcctgctttatttagcaggggcctggaatgtaaacagccactggggtacaggcaccgaagaccaacatccacaggctaacaccccttcagtccacacaaagaagcttcatattttttttataagcatagaaatggaagcatctaagtactgtcaggatggggtcttcctcattgtagggcgttaggatgttgctttctttttccattagttaaacatttttttctcctttggaggaagggaatgaaacatttatggcctcaagatactatacatttaaagcaccccaatgtctctctttttttttttttacttccctttcttc

SEQ ID NO: 2320 - DNA, 1288 bp, Homo sapiens
ggctggccccgctcrgtcacccgcagcrggcgtgcagtttccsggctctccgcgcggccggggaaggtcagcgccgtaatggcgttcttggcgtcgggaccctacctgacccatcagcaaaaggtgttgcggctttataagcgggcgctacgccacctcgagtcgtggtgcgtccagagagacaaataccgatactttgcttgtttgatgagagcccggtttgaagaacataagaatgaaaaggatatggcgaaggccacccagctgctgaaggaggccgaggaagaattctggtaccgtcagcatccacagccatacatcttccctgactctcctgggggcacctcctatgagagatacgattgctacaaggtcccagaatggtgcttagatgactggcatccttctgagaaggcaatgtatcctgattactttgccaagagagaacagtggaagaaactgcggagggaaagctgggaacgagaggttaagcagctgcaggaggaaacgccayctggtggtcctttaactgaagctttgccccctgcccgaaaggaaggtgatttgcccccactgtggtggtatattgtgaccagaccccgggagcggcccatgtagaaagagagagacctcatctttcatgcttgcaagtgaaatatgttacagaacatgcacttgccctaataaaaaatcagtgaaatggtctctggtatgactgacgttcttctaagaattactgtgatgccaagtgactgtgccactgtcattgttttatcaatcgtgcatgtaaagaaaatgacaggacatgtagtcagtcagctgtgttctctgcaataaatcactgatagcatatgttaccagtaaggaaaaactgaggcagaaccagattgaggcgaacaaactctcaagtcaaaggcctaattagctgtggtaactagaaggaataaacaaagccaagaacagaaatactgaggatttaaaaataacctttttggttttctaaagatttcactaatggaacttagtttttattagaagaacaactctccctaagaagtacatagtcaacaaataagcatggaatttgtggagttctgtcaggggtggaggtttgatggttggggttaaatggtccaatctgggataaaactttgtggcgcttattttagaagcagttttccagctttgcttctgctaccgtagcttggattgtctgcggactcaaaggtaagggaataacagaactccttaaatgtttcagaagctttgtttttgttttttaaagata

SEQ ID NO: 2321 - DNA, 1778 bp, Homo sapiens
cttgggatgacactagtggcggaggcaatggccagcaaccctctgtaagcgaggcrtggaagacatatgcttgtgagaaaaaggtgtctatgaaactatggatggtacaagaacttcacttgacattgaagagtactccaatactgaggtacagaaaaaccaagtactaactctggaagaatggcaagacaagtgggtgaacggcaacactgcttttcatcaggaacaaggacctcagctatyaaagaaacatttagatacttttcttaaaggagagagtggactgagggtattttttcctctttgcagaaaagaggttgagatgaaatggtttscagaccggggacacagcgtagttggtgtggaaatcagtgaacttgggatacgagaattttttacagagcagaatctatcttactcagaagaaccaatcaccgaaattcctggaaccaaagcatttaagagttcttcggggaacatttcatcatactgttgcagtatttttgatcttcccaggacaaatattggcacatttgacatgatttgggatagaggarcattagttgccattaatccaggtgatcgcaaatgctatgcggatataatgttatccctcctgggaaagaagtttcaatatctcctgtgtgtctttcttacgatccaactaaacatccaggtccaccattttatgttccacatgctgaaattgaaagrttgtttggtaaaatatgcaatatacrttgtcttgagaaggttgatgcttttgaagaatgacataaaaattgggggattgacyatctttctgaaaagttatatctacttacagaaaagtaaatgagacatagataaaatcacattgacatgtttttgaggaattgaaaattatgctaaagcctgaaaatgtaatggatgaattttttaaattgtttataaatcacatgatagatctatactaaaaatggctttttagtaaagctgtttactttttctaaaaaagttttaggagaaaaagatgtaactaaacttttcaagtagctcctttggagaggagattatgatgtgaaagattatgcctgtgtgtcttacagattgcaagatattttatcaatcagtgtgtgttacctgtacaattaaaaaaatattttaaaatgcaatgcatattaaacataatacacacagaaaaactggcatttattttatttttttgagatggagtttcgttctcgttgcccaacctggagtgcaatggcacaatctcagctcactgcaacctctgcctcccaggttcaagtgattctcctgcctcagcctcccaagtagctgagattacaggtgtgcrccaccatgcccagctaattttttgtatttttagtagagacagggtttcaccatgttggtcaggctggtctcgaactccagacctcaggtgatctacccacctcagcctcccaaagtgctgggattacaggcgtgagccactgtgcctggcctgacattctttatgaaatttagaattgttgaaaaaaatataacacttcagtagggttcaaggtggtcccaaaagttatataaaagattagtttttactataaacccttgtcttttactcagatcctagcatcccttttcacatggtttctccatatatgtaacagaatcaagaaacaaattttaattaaacaatctgtaacagaatcaagaaacaaataaattttaattaaacaatctatatggaacaaacattcccaaattctaagaataaatttttctttaagttt

SEQ ID NO: 2322 - DNA, 1032 bp, Homo sapiens
agcaaggcggctgcagcagctgtagaagaggtcagctcagccggccagtttgaggagctgctgcgcctcaaagccaagtccctccttgtggtccacaatgtgcacagatgaacgaagttatggcagagttagctaaagaacaccctcaagtttcatttgtgaagttggaagctgaaggtgttcctgaagtatctgaaaaatatgaaattggctctgttcccacttttctgtttttcaataattctcagaaaattgaccgattagatggtgcacacatcccagagttgaccaaaaaagctcagcgacatctagtggctccttcccacccagcactgatgaacatcttaaagaccaaaaaagctcagcgacatgcatctagtggctccttcccacccagcactgaygaacatcttaaagaagatctcaaccttcgcttacagaaactgactcatgctgccccctgcatgctgtttatgaaaggaactcctcaagaaccactctgtggtttcagcaagcagatggtggaaattgttcacaaacataatatttagtttagcagttttgatgtctttagatcaagaggttcgacaggggctcaaagcctattccaattggcctacctatcctcagctctacgtttctggagagctcataggaggacttgatataattaaggagatacacgcatctgaagaactagatataatttgtcccaaagctcccaaattagaggaaaggctcaaagtgctgacaaatgaagcttctatgatgctctttatgaaaggaaacaaacaggaagcaaaatgtggattcagcaaacaaattctggaaatactaaatagtactggtggtgaatatgaaacattcgatatattggaggatgaaggagatcggcaaggattaaaagcttactcaaattggccaacataccctcagctgtatgtgaaaggggagctggtgggaggattggatattgtgaaagagctgaaagaaaatggtgaattgctgcctatactgagaggagaaaattaa

SEQ ID NO: 2323 - DNA, 3410 bp, Homo sapiens
ggagagaggacctatttctacctaaggacattcccggaaggcaatgggtttcaaacaatatcctgaagagactcatctcggggaactaagcaggtggtmatcagagaacacagagcccmcggaagaattttatgrcatttcaggcaagccacaggycagcctggggaaaaagcaggaagaaaaactggcaatacgagggcccaacccaaaagttattcctgaagagaaacaacgtgtcagcaccagatgggccttcagaccccagcatctccgygagcagtgagcaaagcggggcacagcagcctcccgstttacaggttgaaaggattgttgacaaaaggaaaaataaaaaagggaagacagagtatttggttcggtggaaaggytatgacagcgaggacgacacttgggagccggaacagcacctcgtgaactgtgaggaatacatccaygacttcaacagacgccacacggagaagcagaaggagagcacattgaccagaacaaacaggacctctcccaacaatgctaggaaacaaatctccagatccaccaacagcaacttttctaagacctctcctaaggcactcgtgattgggaaagaccacgaatccaaaaacagccagctgtttgctgccagccagaagttcaggaagaacacagctccatctctctccagccggaagaacatggacctagcgaagtcaggtatcaagatcctcgtgcctaaaagccccgttaagagcaggacygcagtggacggctttcagagcgagagccctgagaaactggaccccgtcgagcagggtcaggaggacacagtggcacccgaagtggcagcggaaaagccggtcggagctttattgggccccggtgcygagagggccaggatggggagcaggcccaggatacacccactagtgcctcaggtgcccggccctgtgactgcagccatggccacaggcttagctgttaacgggaaaggtacatctccgttcatggatgcattaacagccaatgggacaaccaacatacagacatctgttacaggagtgactgccagcaaaaggaaatttattgacgacagaagagaccagccttttgacaagcgattgcgtttcagcgtgaggcaaacagaaagtgcctacagatacagagatattgtggtcaggaagcaggatggcttcacccacatcttgttatccacaaagtcctcagagaataactcactaaatccagaggtaatgagagaagtccagagtgctctgagcacggccgctgccgatgacagcaagctggtactgctcagcgccgttggcagcgtcttctgttgtggacttgactttatttattttatacgacgtctgacagatgacaggaaaagagaaagcactaaaatggcagaagctatcagaaacttcgtgaatactttcattcaatttaagaagcccattattgtagcagtcaatggcccagccatyggtctaggagcatctatattgcctctttgcgatgtggtttgggctaatgaaaaggcttggtttcaaacaccctataccaccttcggacagagtccagatggctgttctaccgttatgtttcccaagataatgggaggagcatctgcaaacgagatgctgctcagtggacggaagctgacagcgcaggaggcgtgtggcaagggcctggtctcccaggtgttttggcccgggacgttcactcaggaagtgatggttcgcattaaggagcttgcctcgtgcaatccagttgtgcttgaggaatccaaagccctygtgcgctgcaacatgaagatggagctggagcaggccaacgagagggagtgtgaggtgctgaagaaaatctggggctcggcccaggggatggactccatgttaaagtacttgcagaggaagatcgatgagttctgagtgtcgggctgcccactggtgacaccgggatcgggctgagcaggagaacatcaccggctccagttsccctgatccattctcacagcctgaaacaagctcacccgtagcttacgcttggaagyaggactgggaacatccacgctatttattatcgaggagttttaaagtactgtaactttaaaataaataactacaaagcttctttgtccaaacgtcattattttatacttatatacacgcaggtgtaaaagtataaaggtgagcactagactgctcttagaagctctaatttttgttttctttggctagtactgtataaaaaacagaattgtgttttattggttttggatgacagaaaagtctggaataatgtttgttttcctcatttcttccttctagaacacagaatctaaaggggtrttagccagcctcgcctccctgccccacgtagagacacagagtgatgtgaggcgttggctttttctccaagaaggtacagatacctcagattcgggaaactcaaaatcaaaagacttagcttctaggataaatacttctgatgaaaaatccgctgaggagcataccccaaaccagacatatgcttaggattcatgctgagatatcaattggtttccccttctttttaaaatacgtccagttcttacccagttaacatgaagaaaccactgtctctagaagaaagcttgttttgcagtattagtgaatcactgaatagcttaagtatgactatctaagttataagttagtctttagtgggttttaaatagtttttctgacccttctgaaaaataactacataagtgcttcttgttgctgggtgagaaatactactttatagacagttttggttttctgtttgcagatatgattgatgtatttcaccaaaataaaatatttttatgtttataaagtgtaatttttaggttcacttagaatatattttatttaataagttaaaattcttttggcacactattaaatgcaaaaactcctttcaaaacaaaaaagaactaccttatattcaacatttaatgttcttggcctctgcttttatgtctatacaatatactgagttcagtatggtgtccaagagtgccctgtgtggatagacatgtgcactccttccaggagtgggtactgattccagactccagatgcctattattagttaggcttctgagcttgcaatcatattgaatgtatgaagagcgaaatcaaattcttatttttgtacagttttgaagtttatacttagaactgaccacctccccggccacgcggagagctgtacagtgtgtaaatctgcctttatcttggattgattggtacagtatttttgcatctgtgggacctaccttttcgttcagtagtttgaactatatataaactgtacaatctgtaaagtttttatagaataaatattcagctgtgaaaactggttaaataaaactaatatttctt

SEQ ID NO: 2324 - DNA, 1566 bp, Homo sapiens
agctttgacccaaagagagcagtgcagcaactcagagcctgsggggtrttggaracgattcgaatcagtgcagctggctacccatccaggaagcagtcacgggtcctgagcttctcccatacacccagttgtgactccttgaccctgtcagggcgcctgctccccagcaagctagaggcactccaggaacccaagggccgcaatgctggaagatctggagctctaagagaacctgctccagagcacggtgtgcccgtactgcccaccatgctgcagctgaatccaaagctgtgggcctaccatgactttttcaaccggtatcgggtgctggtcaagaagagagagctcgccaacacagacaaaaaggccatctgcaggtctgtcctggagaacctcatcaaggaccccgacaagttccagtttggccgcaccaagatcttctttcgagcaggccaggtggcctacctggagaagctgcgggctgacaagttccggacagccaccatcatgatccagaaaactgtccggggatggctgcagaasgtgaaatatcacaggctgaagggggctaccttaaccctgcagaggtactgccggggacacctggcccgcaggctggctgagcacctgcggaggatcagagcggctgtggtgctccagaaacattaccgcatgcagagggcccgccaggcctaccagagggtccgcagagctgccgttgttatccaggccttcacccgggccatgtttgtgcggagaacctaccgccaggttcttgctctttgtgttgttccagtgaagccaaaacccttgggttcaggagccccacatcaggacacatctgttcaaccagtgcaaacccacaagatgtgtatccttgtttcccgccaggtcctcatggagcacaaggccaccaccatccagaagcacgtgcggggctggatggcacgcaggcacttccagcggctgcgggatgcagccattgtcatccagtgtgccttccggatgctcaaggccaggcgggagctgaaggccctcaggattgaggcccgctcagcagagcatctgaaacrtctcaacgtgggcatggagaacaaggtggtccagctgcagcggaagatcgatgagcagaacaaagagttcargacactttcagagcagttgtccgtgaccacctcaacatacaccatggaggtagagcggctgaagaaggagctggtgcactaccagcagagcccaggtgaggacaccagcctcaggctgcaggaggaggtggagagcctgcgcacagagctgcagagggcccactcrgagcgcaagwtcttggaggacgcccacagcagggagaaagatgagctgaggaagcctgtgcattgtgtacatttcrttctttttgaaagcttcagcgatccctatgccggctgcttttgtacagctgtgctgttttgcatggctgctctgtttggtgaaagagaggtggcccccagggctgccctaggcacagaggtgacagctcattattcagaatctgctctgaaggctgctcaatgggaccasagcaaggct

SEQ ID NO: 2325 - DNA, 7610 bp, Homo sapiens
gtggagtacctctctgatggttttctggagaaaaacagagacacggtgtatgaagagcagatcaatatcctgaaggccagcaagtggctgacttgtttcatgatgacaaggaccytgttcctgccaccacccctgggaaggggtcatcttcgaagatcagcgtccgttctgccagaccccccatgaaagtctccaacaaggagcacaagaaaaccgttggccaccagttccgtacctccctgcatctgctcatggagaccctgaatgccacgacacctcactatgtccgytgcatcaagcccaacgatgagaagctcccctttcactttgacccaaagagagcagtgcagcaactcagagcctgsggggtrttggaracgattcgaatcagtgcagctggctacccatccaggtgggcctaccatgactttttcaaccggtatcgggtgctggtcaagaagagagagctcgccaacacagacaaaaaggccatctgcaggtctgtcctggagaacctcatcaaggaccccgacaagttccagtttggccgcaccaagatcttctttcgagcaggccaggtggcctacctggagaagctgcgggctgacaagttccggacagccaccatcatgatccagaaaactgtccggggatggctgcagaasgtgaaatatcacaggctgaagggggctaccttaaccctgcagaggtactgccggggacacctggcccgcaggctggctgagcacctgcggaggatcagagcggctgtggtgctccagaaacattaccgcatgcagagggcccgccaggcctaccagagggtccgcagagctgccgttgttatccaggccttcacccgggccatgtttgtgcggagaacctaccgccaggtcctcatggagcacaaggccaccaccatccagaagcacgtgcggggctggatggcacgcaggcacttccagcggctgcgggatgcagccattgtcatccagtgtgccttccggatgctcaaggccaggcgggagctgaaggccctcaggattgaggcccgctcagcagagcatctgaaacrtctcaacgtgggcatggagaacaaggtggtccagctgcagcggaagatcgatgagcagaacaaagagttcargacactttcagagcagttgtccgtgaccacctcaacatacaccatggaggtagagcggctgaagaaggagctggtgcactaccagcagagcccaggtgaggacaccagcctcaggctgcaggaggaggtggagagcctgcgcacagagctgcagagggcccactcrgagcgcaagwtcttggaggacgcccacagcagggagaaagatgagctgaggaagcgagttgcagacctggagcaagaaaatgctctcttgaaagatgagaaagaacagctcaacaaccaaatcctgtgccagtctaaagatgaatttgcccagaastctgtgaaggaaaatctcatgaagaaagaactggaggaggagcgatcccggtaccagaaccttgtgaaggaatattcacagtkggagcagagatacgacaaccttygggatgaaatgaccatcataaagcaaactccaggtcataggcggaacccatcaaaccaaagtagcttagaatctgactccaattacccctccatctccacatctgagatcggagacactgargatgccctccagcaggtggaggaaattggcctggagaaggcagccatggacatgacrgtcttcctgaagctgcagaagagagtacgggagctggagcaggagaggaaaaagctgcaagtgcagctggagaagagagaacagcaggacagcaagaaagtccaggcggaaccaccacagactgacatagatttggacccgaatgcagatctggcctayaatagtctgaagaggcaagagctggagtcagagaacaaaaagctgaagaatgacctgaatgagctgaggaaagccgtggccgaccaagccacgcagaataactccagccacggctccccagatagctacagcctcctgctgaaccagctcaagctggcccacgaggagctcgaggtgcgcaaggaggaggtgctcatcctcaggacccagatcgtgagcgccgaccagcggcgactcgccggcaggaacgcggagccgaacattaatgccagatcaagttggcctaacagtgaaaagcatgttgaccaggaggatgccattgaggcctatcacggggtctgccagacaaacagcaagactgaggattgggratatttaaatgaagatggagaactcggcttggcctaccaaggcctaaagcaagttgccaggctgctggaggctcagctgcaggcccagagcctggagcatgaggaggaggtggagcatctcaargctcagctcgaggccctgaaggaggagatggacaaacagcagcagaccttctgccagacgctactgctctccccagaggcccaggtggaattcggcgttcagcaggaaatatcccggctgaccaacgagaatctggaccttaaagaactggtagaaaagctggaaaagaatgagaggaagctcaaaaagcaactgaagatttacatgaagaaagcccaggacctagaagctgcccaggcattggcccagagtgagaggaagcgccatgagctcaacaggcaggtcacggtccagcggaaagagaaggatttccagggcatgctggagtaccacaaagaggacgaggccctcctcatccggaacctggtgacagacttraagccccagatgctgtcgggcacagtgccctgtctccccgcctacatcctctacatgtgcatccggcacgcggactacaccaacgacgatctcaaggtgcactccctgctgacctccaccatcaacggcattaagaaagtcctgaaaaagcacaatgatgactttgagatgacgtcattctggttatccaacacctgccgccttcttcactgtctgaagcagtacagcggggatgagggcttcatgactcagaacactgcaaagcagaatgaacactgtcttaagaattttgacctcaccgaataccgtcaggtgctgagtgacctttccattcagatctaccagcagctcattaaaattgccgagggcgtgttacagccgatgatagtttctgccatgttggaaaatgagagcattcagggtctatctggtgtgaagcccaccggctaccggaagcgctcctccagcatggcagatggggataactcatactgcctggaagctatcatccgccagatgaatgcctttcatacagtcatgtgtgaccagggcttggaccctgagatcatcctgcaggtattcaaacagctcttctacatgatcaacgcagtgactcttaacaacctgctcttgcggaaggacgtctgctcttggagcacaggcatgcaactcaggtacaatataagtcagcttgaggagtggcttcggggaagaaaccttcaccagagtggagcagttcagaccatggaacctctgatccaagcagcccagctcctgcaattaaagaagaaaacccaggaggacgcagaggctatctgctccctgtgtacctccctcagcacccagcagattgtcaaaattttaaacctttatactcccctgaatgaatttgaagaacgggtaacagtggcctttatacgaacaatccaggcacaactacaagagcggaatgaccctcagcaactgctattagatgccaagcamatgtttcctgttttgtttccatttmatccatcttctctaaccatggastcaatccacatcccagcrtgtctcaatctggarttcctcaatgaagtctgaagaygcatgtttccagcattagtytgattcccaatgtgarcaaraaggaagtatakacagtaaagtaaattcaaggatctgttaaatctggtaaaagtmgatcaaatcagagattgacagcctgtggagggtgctgaactatacagaattagacacaactatgkcrttattttttgtacctactgctcagaataaaaacacttgaaatatggaagattttaagtttgatttcagtccaacacatatacataatttatagacaccaagcagtccccatagacatataaaaggtgtcaattctataaaaygaagctgcctagttttgatctttgcatagaactagagaatgtccaaattaaaataccaaatayatataagtcacataaattgccttcaaagggctttaacaaataatggtactaataaccatgataatggcatatactgacatttcccaaagtttgcaaaccataggtgtggttgagtttgtggtgagatgttttaagaacaaaaatatggggatgagacttctgagaaatattcccaaaatattttttaatggctgattatacacagacagtggtgtaactgacctccagaccagacattttgagtactggtttctgaagcaaaattagaagtgccagtcctcagtgtgctcaaacgcttttgtgttatcttgatttaatggaagagattattaaaatgctgctatcccaaactccaagtgagaaagatggaaaaatattttgtttctgatgctagtccatacactttccaagtcccacaaaactttcacaaaaatgtatataagctaaatattagaaacggataacaaacttgttttatttatagatgtaaaaaccaaacaartcaatatgaaagcttttaatctcttaataccattaagcttccagtaagagcatcacataatgctctactgttccagaaaccmaatagtaaaacaaactaaagttcgcacatcagatcatctgaaaaaccttcaaaaataatcagttcagggatattatacaaaagtttgggttttttttttttaagagaataaaatggcttaggtcaactttcccttttcaggttattttcaacgtttttcaaatttagcacacaaaaaattgtaaatatctctcccacaaaataaggattttaaaaaagtaattcagtaatataacaggcttagatgtttgctgctcttagaattttttttaacttgtttttggtttcttcaaaagcaagcattcaattggaaacccatattctttccacacttttttttactgtcttttctgtatttcttgatagcagtatgctgttcccataagaaaaaaatggtatttgcaaatcatggaagaacagcctctgtattacattgagaaaataagatttatccatgaattggaagtagaacagcctgccttcaccctcttttactcaaccacccaacttaaaaggctcttggaaacacagcacactccacgctaccttctgcactgtgcccttagagcacagcttcctcagttgttctctgcatctcctggggcttaggccagtcttagcctgggttaagkctgctgacattgtgttccaatcagttgtcatgggcattatcccctctacatccacattaaacatgccggcttctcttgggcatckgcagagctgtgcctttttctttcagttacagttacrtaatcactgacgtccatgacacttacccatggatccatgtgctgacttcatttagaaggccaatctaaaacaactgggtttgtggctacctctttaaagttgtttgtgaaggataatttgttttttaatgcactttagtttgaaagtgagtctcttatgtaaggaccatccttaaaagaccaaaaatgccttgttagagtgttaaggagttttgacatgcagtggttccacaaacacagtggcttactatccttatacactgtcttataccatcattctctccatctctcttggtcactactctctgctgtcactggttaatcactaggtgccaagagcttactgaataaaagcttggcaattagaataaatggggagggaaggaccttatgaatagtccatttagcctaagaaatggcagatttagttcttctcttccaaaagataaaggtatatcctggaattgtacttaaaacttacagatgactaacaaatatatactttatatgtagttaatatttagatctgtcttmtttaatacttggaggctagaagaagcatctttaggggaactatataatcttttgttagcattttctctgcattttaaaaaatcatttcaattcaaacatttatcagtgtcatgaaatcagtaatgactctttaacaattcaggtttgaactctgcattagatgtctctttaattttttaatatttaaaatttagttgacatttttttcaccaggtgcctttagcggttactaagataactgacatcagttgtttctctgaaataagtgttgctgtgggaataattttaatgttcaaggtgatatcatgggggagttttgtcttttaaaacattagaagcattttaaatattaagaatcaaatatttatagatcaaaacttgtgttttaagtattatacgggacctgtttacttatagtaaatgtgaatgtacacatgagttgttgctgaagctgacaagcatattacatacatgcattttccctgtgccctcatagttgcagttagmgttccagtacctgtaggctcacctgggaggcagattagacccaaaggtagatktttttcccctttccatgaagcatgtcagtgggagttgcttcctttgatttccctagtactaaattttaaggcttttgtaaaaacaaaacaaaactaggagcttggaacagttaaaaatcaacactgctaccatcaattcatcaaatatttacttagagctttcatacattaagattccagtaaccaataaattagaattcatttcttctgcataaagtaaattttcatacacttgacctactaagacagcaagggtgtcctaaattgaggcatttgtataatgcctgcataactaaatggtcactaaaatgggacagcatggggcaagaccttgtagttcttcacagaatatttgtggtcagtttctccaattaatttgctgcatgagccaaataaccataattcactttttatacccactggtgccataattagagaattagagggtgtagacagaggttaatgccaatgagaaacacaggacagggttttttttattataaaggtcattagatacaaaagattgtttttcaaaaaatttctaattctaacaaaggggatcaatcagaaatgaaactaagctactttctaaagtgacactgtatcagaataatccagatttgaatataacattttgccaccaactgacatttagatgaaggactgcctctctgaaagagttcagatcatattcaggggtgaatccaacaccatggaagaaagactactgatgaaaatattttcccactttgcacaaatctgtaaactacacctttgtttatagaaaaatgcttgtaatagtcactgtaatatttagctgtggataaaaatttgtggaaataaatacttttgaataaagaggtgtgccaaatctaaatgaaatttaaaactctgcagctacaggttgacaaagtttctttgtaatgctctcttgagaagct
